(19) United States
(12) Patent Application Publication
(10) Pub. No.: US 2022/0290187 A1
(43) Pub. Date: Sep. 15, 2022

(54) CLASS II, TYPE V CRISPR SYSTEMS

(71) Applicant: METAGENOMI, INC., Emeryville, CA (US)

(72) Inventors: Brian C. THOMAS, Emeryville, CA (US); Christopher BROWN, Emeryville, CA (US); Audra DEVOTO, Emeryville, CA (US); Cristina BUTTERFIELD, Emeryville, CA (US); Lisa ALEXANDER, Emeryville, CA (US); Daniela S.A. GOLTSMAN, Emeryville, CA (US); Justine B. ALBERS, Emeryville, CA (US); Alan BROOKS, Emeryville, CA (US); Greg COST, Emeryville, CA (US); Morayma TEMOCHE-DIAZ, Emeryville, CA (US); Cindy CASTELLE, Emeryville, CA (US); Rebecca LAMOTHE, Emeryville, CA (US)

(21) Appl. No.: 17/706,466

(22) Filed: Mar. 28, 2022

Related U.S. Application Data
(63) Continuation of application No. PCT/US2021/021259, filed on Mar. 6, 2021.
(60) Provisional application No. 62/986,477, filed on Mar. 6, 2020.
(60) Provisional application No. 63/022,276, filed on May 8, 2020.
(60) Provisional application No. 63/045,815, filed on Jun. 29, 2020.
(60) Provisional application No. 63/068,316, filed on Aug. 20, 2020.
(60) Provisional application No. 63/069,699, filed on Aug. 24, 2020.
(60) Provisional application No. 63/116,157, filed on Nov. 19, 2020.

(51) Int. Cl. C12N 15/90; C12N 9/22; C12N 15/11; C12N 15/10

(52) U.S. Cl. CPC C12N 15/90; C12N 9/22; C12N 15/11; C12N 15/111; C12N 15/1068; C12N 2310/20; C12N 2800/80

(57) ABSTRACT

Described herein are methods, compositions, and systems derived from uncultivated microorganisms useful for gene editing.

### CROSS-REFERENCE

[0001] This application is a continuation of International Application No. PCT/US2021/021259 filed on Mar. 6, 2021 which claims the benefit of U.S. Provisional Application No. 62/986,477, filed on Mar. 6, 2020, entitled “CLASS II, TYPE V CRISPR SYSTEMS”, U.S. Provisional Application No. 63/022,276, filed on May 8, 2020, entitled “CLASS II, TYPE V CRISPR SYSTEMS”, U.S. Provisional Application No. 63/045,815, filed on Jun. 29, 2020, entitled “CLASS II, TYPE V CRISPR SYSTEMS”, U.S. Provisional Application No. 63/068,316, filed on Aug. 20, 2020, entitled “CLASS II, TYPE V CRISPR SYSTEMS”, U.S. Provisional Application No. 63/069,699, filed on Aug. 24, 2020, entitled “CLASS II, TYPE V CRISPR SYSTEMS”, U.S. Provisional Application No. 63/116,157, filed on Nov. 19, 2020, entitled “CLASS II, TYPE V CRISPR SYSTEMS”, each of which is incorporated by reference herein in its entirety.

### BACKGROUND OF THE INVENTION

[0002] Cas enzymes along with their associated Clustered Regularly Interspaced Short Palindromic Repeats (CRISPR) guide ribonucleic acids (RNAs) appear to be a pervasive (˜45% of bacteria, ˜84% of archaea) component of prokaryotic immune systems, serving to protect such microorganisms against non-self nucleic acids, such as infectious viruses and plasmids by CRISPR-RNA guided nucleic acid cleavage. While the deoxyribonucleic acid (DNA) elements encoding CRISPR RNA elements may be relatively conserved in structure and length, their CRISPR-associated (Cas) proteins are highly diverse, containing a wide variety of nucleic acid-interacting domains. While CRISPR DNA elements have been observed as early as 1987, the programmable endonuclease cleavage ability of CRISPR/Cas complexes has only been recognized relatively recently, leading to the use of recombinant CRISPR/Cas systems in diverse DNA manipulation and gene editing applications.

### SEQUENCE LISTING

[0003] The instant application contains a Sequence Listing which has been submitted electronically in ASCII format and is hereby incorporated by reference in its entirety. Said ASCII copy, created on Mar. 5, 2021, is named 55921-710_301_SL.txt and is 2,617 KB in size.

### SUMMARY OF THE INVENTION

[0004] In some aspects, the present disclosure provides for an engineered nuclease system comprising: (a) an endonuclease comprising a RuvC domain, wherein the endonuclease is derived from an uncultivated microorganism, and wherein the endonuclease is a Cas12a endonuclease; and (b) an engineered guide RNA, wherein the engineered guide RNA is configured to form a complex with the endonuclease and the engineered guide RNA comprises a spacer sequence configured to hybridize to a target nucleic acid sequence. In some embodiments, the Cas12a endonuclease comprises the sequence GWxxxK. In some embodiments, the engineered guide RNA comprises UCUAC[N₃₋₅]GUAGAU (N₄). In some embodiments, the engineered guide RNA comprises CCUGC[N₄]GCAGG (N₃₋₄). In some aspects, the present disclosure provides for an engineered nuclease system comprising: (a) an endonuclease having at least 75% sequence identity to any one of SEQ ID NOs: 1-3470 or a variant thereof; and (b) an engineered guide RNA, wherein the engineered guide RNA is configured to form a complex with the endonuclease and the engineered guide RNA comprises a spacer sequence configured to hybridize to a target nucleic acid sequence. In some embodiments, the endonuclease comprises a RuvCI, II, or III domain. In some embodiments, the endonuclease has at least about 20%, at least about 25%, at least about 30%, at least about 35%, at least about 40%, at least about 45%, at least about 50%, at least about 55%, at least about 60%, at least about 65%, at least about 70%, at least about 75%, at least about 80%, at least about 85%, at least about 90%, at least about 91%, at least about 92%, at least about 93%, at least about 94%, at least about 95%, at least about 96%, at least about 97%, at least about 98%, at least about 99% identity to a RuvCI, II, or III domain of any one of SEQ ID NOs: 1-3470 or a variant thereof. In some embodiments, the RuvCI domain comprises a D catalytic residue. In some embodiments the RuvCII domain comprises an E catalytic residue. In some embodiments the RuvCIII domain comprises a D catalytic residue. In some embodiments, said RuvC domain does not have nuclease activity. In some embodiments, said endonuclease further comprises a WED II domain having at least about 20%, at least about 25%, at least about 30%, at least about 35%, at least about 40%, at least about 45%, at least about 50%, at least about 55%, at least about 60%, at least about 65%, at least about 70%, at least about 75%, at least about 80%, at least about 85%, at least about 90%, at least about 91%, at least about 92%, at least about 93%, at least about 94%, at least about 95%, at least about 96%, at least about 97%, at least about 98%, at least about 99% identity to a WED II domain of any one of SEQ ID NOs: 1-3470 or a variant thereof. In some aspects, the present disclosure provides for an engineered nuclease system comprising: (a) an endonuclease configured to bind to a protospacer adjacent motif (PAM) sequence comprising any one of SEQ ID NOs: 3862-3913, wherein the endonuclease is a class 2, type V Cas endonuclease; and (b) an engineered guide RNA, wherein the engineered guide RNA is configured to form a complex with the endonuclease and the engineered guide RNA comprises a spacer sequence configured to hybridize to a target nucleic acid sequence. In some embodiments, the endonuclease further comprises a zinc finger-like domain. In some embodiments, the guide RNA comprises a sequence with at least 80% sequence identity to the non-degenerate nucleotides of any one of SEQ ID NOs: 3471, 3551-3559, 3608-3609, 3612, 3636-3637, 3640-3641, 3644-3645, 3648-3649, 3652-3653, 3656-3657, 3660-3661, 3664-3667, 3671-3672, −3678, 3695-3696, 3729-3730, 3734-3735, and 3851-3857. In some aspects, the present disclosure provides for an engineered nuclease system comprising: (a) an engineered guide RNA comprising a sequence with at least 80% sequence identity to the non-degenerate nucleotides of any one of SEQ ID NOs: 3471, 3539, 3551-3559, 3608-3609, 3612, 3636-3637, 3640-3641, 3644-3645, 3648-3649, 3652-3653, 3656-3657, 3660-3661, 3664-3667, 3671-3672, 3677-3678, 3695-3696, 3729-3730, 3734-3735, or 3851-3857, and (b) a class 2, type V Cas endonuclease configured to bind to the engineered guide RNA. In some embodiments, the endonuclease is configured to bind to a protospacer adjacent motif (PAM) sequence comprising any one of SEQ ID NOs: 3863-3913. In some embodiments, the guide RNA comprises a sequence complementary to a eukaryotic, fungal, plant, mammalian, or human genomic polynucleotide sequence. In some embodiments, the guide RNA is 30-250 nucleotides in length. In some embodiments, the endonuclease comprises one or more nuclear localization sequences (NLSs) proximal to an N- or C-terminus of the endonuclease. In some embodiments, the NLS comprises a sequence at least 80% identical to a sequence from the group consisting of SEQ ID NO: 3938-3953. In some embodiments, the endonuclease comprises at least one of the following mutations: S168R, E172R, N577R, or Y170R when a sequence of the endonuclease is optimally aligned to SEQ ID NO: 215. In some embodiments, the endonuclease comprises the mutations S168R and E172R when a sequence of the endonuclease is optimally aligned to SEQ ID NO: 215. In some embodiments, the endonuclease comprises the mutations N577R or Y170R when a sequence of the endonuclease is optimally aligned to SEQ ID NO: 215. In some embodiments, the endonuclease comprises the mutation S168R when a sequence of the endonuclease is optimally aligned to SEQ ID NO: 215. In some embodiments, the endonuclease does not comprise a mutation of E172, N577, or Y170. In some embodiments, the engineered nuclease system further comprises

[0005] a single- or double-stranded DNA repair template comprising from 5′ to 3′: a first homology arm comprising a sequence of at least 20 nucleotides 5′ to the target deoxyribonucleic acid sequence, a synthetic DNA sequence of at least 10 nucleotides, and a second homology arm comprising a sequence of at least 20 nucleotides 3′ to the target sequence. In some embodiments, the first or second homology arm comprises a sequence of at least 40, 80, 120, 150, 200, 300, 500, or 1,000 nucleotides. In some embodiments, the first and second homology arms are homologous to a genomic sequence of a prokaryote, bacteria, fungus, or eukaryote. In some embodiments, the single- or double-stranded DNA repair template comprises a transgene donor. In some embodiments, the engineered nuclease system further comprises a DNA repair template comprising a double-stranded DNA segment flanked by one or two single-stranded DNA segments. In some embodiments, single-stranded DNA segments are conjugated to the 5′ ends of the double-stranded DNA segment. In some embodiments, the single stranded DNA segments are conjugated to the 3′ ends of the double-stranded DNA segment. In some embodiments, the single-stranded DNA segments have a length from 4 to 10 nucleotide bases. In some embodiments, the single-stranded DNA segments have a nucleotide sequence complementary to a sequence within the spacer sequence. In some embodiments, the double-stranded DNA sequence comprises a barcode, an open reading frame, an enhancer, a promoter, a protein-coding sequence, a miRNA coding sequence, an RNA coding sequence, or a transgene. In some embodiments, the double-stranded DNA sequence is flanked by a nuclease cut site. In some embodiments, the nuclease cut site comprises a spacer and a PAM sequence. In some embodiments, the system further comprises a source of Mg²⁺. In some embodiments, the guide RNA comprises a hairpin comprising at least 8, at least 10, or at least 12 base-paired ribonucleotides. In some embodiments, the hairpin comprises 10 base-paired ribonucleotides. In some embodiments: (a) the endonuclease comprises a sequence at least 75%, 80%, or 90% identical to any one of SEQ ID NOs: 141, 215, 229, 261, or 1711-1721 or a variant thereof; and (b) the guide RNA structure comprises a sequence at least 80%, or 90% identical to the non-degenerate nucleotides of any one of SEQ ID NOs: 3608-3609, 3853, or 3851-3857. In some embodiments, the endonuclease is configured to bind to a PAM comprising any one of SEQ ID NOs: 3863-3913. In some embodiments, the endonuclease is configured to bind to a PAM comprising SEQ ID NO: 3871. In some embodiments, the sequence identity is determined by a BLASTP, CLUSTALW, MUSCLE, MAFFT algorithm, or a CLUSTALW algorithm with the Smith-Waterman homology search algorithm parameters. In some embodiments, the sequence identity is determined by the BLASTP homology search algorithm using parameters of a wordlength (W) of 3, an expectation (E) of 10, and a BLOSUM62 scoring matrix setting gap costs at existence of 11, extension of 1, and using a conditional compositional score matrix adjustment.

[0006] In some aspects, the present disclosure provides for an engineered guide RNA comprising: (a) a DNA-targeting segment comprising a nucleotide sequence that is complementary to a target sequence in a target DNA molecule; and (b) a protein-binding segment comprising two complementary stretches of nucleotides that hybridize to form a double-stranded RNA (dsRNA) duplex, wherein the two complementary stretches of nucleotides are covalently linked to one another with intervening nucleotides, and wherein the engineered guide ribonucleic acid polynucleotide is capable of forming a complex with an endonuclease having at least 75% sequence identity to any one of SEQ ID NOs: 1-3470, and targeting the complex to the target sequence of the target DNA molecule. In some embodiments, the DNA-targeting segment is positioned 3′ of both of the two complementary stretches of nucleotides. In some embodiments, the protein binding segment comprises a sequence having at least 70%, at least 80%, or at least 90% identity to the non-degenerate nucleotides of SEQ ID NO: 3608-3609. In some embodiments, the double-stranded RNA (dsRNA) duplex comprises at least 5, at least 8, at least 10, or at least 12 ribonucleotides.

[0007] In some aspects, the present disclosure provides for a deoxyribonucleic acid polynucleotide encoding the engineered guide ribonucleic acid polynucleotide described herein.

[0008] In some aspects, the present disclosure provides for a nucleic acid comprising an engineered nucleic acid sequence optimized for expression in an organism, wherein the nucleic acid encodes a class 2, type V Cas endonuclease, and wherein the endonuclease is derived from an uncultivated microorganism, wherein the organism is not the uncultivated organism. In some embodiments, the endonuclease comprises a variant having at least 70% or at least 80% sequence identity to any one of SEQ ID NOs: 1-3470. In some embodiments, the endonuclease comprises a sequence encoding one or more nuclear localization sequences (NLSs) proximal to an N- or C-terminus of the endonuclease. In some embodiments, the NLS comprises a sequence selected from SEQ ID NOs: 3938-3953. In some embodiments, the NLS comprises SEQ ID NO: 3939. In some embodiments, the NLS is proximal to the N-terminus of the endonuclease. In some embodiments, the NLS comprises SEQ ID NO: 3938. In some embodiments, the NLS is proximal to the C-terminus of the endonuclease. In some embodiments, the organism is prokaryotic, bacterial, eukaryotic, fungal, plant, mammalian, rodent, or human.

[0009] In some aspects, the present disclosure provides for an engineered vector comprising a nucleic acid sequence encoding a class 2, type V Cas endonuclease or a Cas12a endonuclease, wherein the endonuclease is derived from an uncultivated microorganism.

[0010] In some aspects, the present disclosure provides for an engineered vector comprising a nucleic acid described herein.

[0011] In some aspects, the present disclosure provides for an engineered vector comprising a deoxyribonucleic acid polynucleotide described herein. In some embodiments, the vector is a plasmid, a minicircle, a CELiD, an adeno-associated virus (AAV) derived virion, a lentivirus, or an adenovirus.

[0012] In some aspects, the present disclosure provides for a cell comprising a vector described herein.

[0013] In some aspects, the present disclosure provides for a method of manufacturing an endonuclease, comprising cultivating any of the host cells described herein.

[0014] In some aspects, the present disclosure provides for a method for binding, cleaving, marking, or modifying a double-stranded deoxyribonucleic acid polynucleotide, comprising: (a) contacting the double-stranded deoxyribonucleic acid polynucleotide with a class 2, type V Cas endonuclease in complex with an engineered guide RNA configured to bind to the endonuclease and the double-stranded deoxyribonucleic acid polynucleotide; (b) wherein the double-stranded deoxyribonucleic acid polynucleotide comprises a protospacer adjacent motif (PAM); and (c) wherein the PAM comprises a sequence comprising any one of SEQ ID NOs: 3863-3913. In some embodiments, the double-stranded deoxyribonucleic acid polynucleotide comprises a first strand comprising a sequence complementary to a sequence of the engineered guide RNA and a second strand comprising the PAM. In some embodiments, the PAM is directly adjacent to the 5′ end of the sequence complementary to the sequence of the engineered guide RNA. In some embodiments, the PAM comprises SEQ ID NO: 3871. In some embodiments, the class 2, type V Cas endonuclease is derived from an uncultivated microorganism. In some embodiments, the double-stranded deoxyribonucleic acid polynucleotide is a eukaryotic, plant, fungal, mammalian, rodent, or human double-stranded deoxyribonucleic acid polynucleotide. In some embodiments, the method comprising delivering to the target nucleic acid locus the engineered nuclease system of any one of claims [0004]-26, wherein the endonuclease is configured to form a complex with the engineered guide ribonucleic acid structure, and wherein the complex is configured such that upon binding of the complex to the target nucleic acid locus, the complex modifies the target nucleic acid locus. In some embodiments, modifying the target nucleic acid locus comprises binding, nicking, cleaving, or marking the target nucleic acid locus. In some embodiments, the target nucleic acid locus comprises deoxyribonucleic acid (DNA) or ribonucleic acid (RNA). In some embodiments, the target nucleic acid comprises genomic DNA, viral DNA, viral RNA, or bacterial DNA. In some embodiments, the target nucleic acid locus is in vitro. In some embodiments, the target nucleic acid locus is within a cell. In some embodiments, the cell is a prokaryotic cell, a bacterial cell, a eukaryotic cell, a fungal cell, a plant cell, an animal cell, a mammalian cell, a rodent cell, a primate cell, a human cell, or a primary cell. In some embodiments, the cell is a primary cell. In some embodiments, the primary cell is a T cell. In some embodiments, the primary cell is a hematopoietic stem cell (HSC). In some embodiments, delivering the engineered nuclease system to the target nucleic acid locus comprises delivering the nucleic acid of any of claims [0007]-[0008] or the vector of any of claims [0008]-[0011]. In some embodiments, delivering the engineered nuclease system to the target nucleic acid locus comprises delivering a nucleic acid comprising an open reading frame encoding the endonuclease. In some embodiments, the nucleic acid comprises a promoter to which the open reading frame encoding the endonuclease is operably linked. In some embodiments, delivering the engineered nuclease system to the target nucleic acid locus comprises delivering a capped mRNA containing the open reading frame encoding the endonuclease. In some embodiments, delivering the engineered nuclease system to the target nucleic acid locus comprises delivering a translated polypeptide. In some embodiments, delivering the engineered nuclease system to the target nucleic acid locus comprises delivering a deoxyribonucleic acid (DNA) encoding the engineered guide RNA operably linked to a ribonucleic acid (RNA) pol III promoter. In some embodiments, the endonuclease induces a single-stranded break or a double-stranded break at or proximal to the target locus. In some embodiments, the endonuclease induces a staggered single stranded break within or 3′ to the target locus.

[0015] In some aspects, the present disclosure provides for a method of editing a TRAC locus in a cell, comprising contacting to the cell (a) an RNA-guided endonuclease; and (b) an engineered guide RNA, wherein the engineered guide RNA is configured to form a complex with the endonuclease and the engineered guide RNA comprises a spacer sequence configured to hybridize to a region of the TRAC locus, wherein the engineered guide RNA comprises a targeting sequence having at least 85% identity at least 18 consecutive nucleotides of any one of SEQ ID NOs: 4316-4369. In some embodiments, the RNA-guided nuclease is a Cas endonuclease. In some embodiments, the Cas endonuclease is a class 2, type V Cas endonuclease. In some embodiments, the class 2, type V Cas endonuclease comprises a RuvC domain comprising a RuvCI subdomain, a RuvCII subdomain, and a RuvCIII subdomain. In some embodiments, the class 2, type V Cas endonuclease comprises an endonuclease having at least 75% sequence identity to any one of SEQ ID NOs: 1-3470 or a variant thereof. In some embodiments, the engineered guide RNA further comprises a sequence with at least 80% sequence identity to at least 19 of the non-degenerate nucleotides of any one of SEQ ID NOs: 3471, 3539, 3551-3559, 3608-3609, 3612, 3636-3637, 3640-3641, 3644-3645, 3648-3649, 3652-3653, 3656-3657, 3660-3661, 3664-3667, 3671-3672, 3677-3678, 3695-3696, 3729-3730, 3734-3735, and 3851-3857. In some embodiments, the endonuclease comprises a sequence at least 75%, 80%, or 90% identical to any one of SEQ ID NOs: 141, 215, 229, 261, or 1711-1721 or a variant thereof. In some embodiments, the guide RNA structure comprises a sequence at least 80%, or at least 90% identical to at least 19 of the non-degenerate nucleotides of any one of SEQ ID NOs: 3608-3609, 3853, or 3851-3857. In some embodiments, the method further comprises contacting to the cell or introducing to the cell a donor nucleic acid comprising a cargo sequence flanked on a 3′ or 5′ end by sequence having at least 80% identity to any one of SEQ ID NOs: 4424 or 4425. In some embodiments, the cell is a peripheral blood mononuclear cell (PBMC). In some embodiments, the cell is a T-cell or a precursor thereof or a hematopoietic stem cell (HSC). In some embodiments, the cargo sequence comprises a sequence encoding a T-cell receptor polypeptide, a CAR-T polypeptide, or a fragment or derivative thereof. In some embodiments, the engineered guide RNA comprises a sequence having at least 80% identity to any one of SEQ ID NOs:4370-4423. In some embodiments, the engineered guide RNA comprises the nucleotide sequence of sgRNAs 1-54 from Table 5A comprising the corresponding chemical modifications listed in Table 5A. In some embodiments, the engineered guide RNA comprises a targeting sequence having at least 80% sequence identity to any one of SEQ ID NOs: 4334, 4350, or 4324. In some embodiments, the engineered guide RNA comprises a sequence having at least 80% sequence identity to any one of SEQ ID NOs: 4388, 4404, or 4378. In some embodiments, the engineered guide RNA comprises the nucleotide sequence of sgRNAs 9, 35, or 19 from Table 5A.

[0016] In some aspects, the present disclosure provides for an engineered nuclease system comprising: (a) an RNA-guided endonuclease; and (b) an engineered guide RNA, wherein the engineered guide RNA is configured to form a complex with the endonuclease and the engineered guide RNA comprises a spacer sequence configured to hybridize to a target nucleic acid sequence, wherein the engineered guide RNA comprises at least one of the following modifications: (i) a 2′-O methyl or a 2′-fluoro base modification of at least one nucleotide within the first 4 bases of the 5′ end of the engineered guide RNA or the last 4 bases of a 3′ end of the engineered guide RNA; (ii) a thiophosphate (PS) linkage between at least 2 of the first five bases of a 5′ end of the engineered guide RNA, or a thiophosphate linkage between at least two of the last five bases of a 3′ end of the engineered guide RNA; (iii) a thiophosphate linkage within a 3′ stem or a 5′ stem of the engineered guide RNA; (iv) a 2′-0 methyl or 2′base modification within a 3′ stem or a 5′ stem of the engineered guide RNA; (v) a 2′-fluoro base modification of at least 7 bases of a spacer region of the engineered guide RNA; and (vi) a thiophosphate linkage within a loop region of the engineered guide RNA. In some embodiments, the engineered guide RNA comprises a 2′-O methyl or a 2′-fluoro base modification of at least one nucleotide within the first 5 bases of a 5′ end of the engineered guide RNA or the last 5 bases of a 3′ end of the engineered guide RNA. In some embodiments, the engineered guide RNA comprises a 2′-O methyl or a 2′-fluoro base modification at a 5′ end of the engineered guide RNA or a 3′ end of the engineered guide RNA. In some embodiments, the engineered guide RNA comprises a thiophosphate (PS) linkage between at least 2 of the first five bases of a 5′ end of the engineered guide RNA, or a thiophosphate linkage between at least two of the last five bases of a 3′ end of the engineered guide RNA. In some embodiments, the engineered guide RNA comprises a thiophosphate linkage within a 3′ stem or a 5′ stem of the engineered guide RNA. In some embodiments, the engineered guide RNA comprises a 2′-0 methyl base modification within a 3′ stem or a 5′ stem of the engineered guide RNA. In some embodiments, the engineered guide RNA comprises a 2′-fluoro base modification of at least 7 bases of a spacer region of the engineered guide RNA. In some embodiments, the engineered guide RNA comprises a thiophosphate linkage within a loop region of the engineered guide RNA. In some embodiments, the engineered guide RNA comprises at least three 2′-O methyl or 2′-fluoro bases at the 5′ end of the engineered guide RNA, two thiophosphate linkages between the first 3 bases of the 5′ end of the engineered guide RNA, at least 4 2′-O methyl or 2′-fluoro bases at the 4′ end of the engineered guide RNA, and three thiophosphate linkages between the last three bases of the 3′ end of the engineered guide RNA. In some embodiments, the engineered guide RNA comprises at least two 2′-O-methyl bases and at least two thiophosphate linkages at a 5′ end of the engineered guide RNA and at least one 2′-O-methyl bases and at least one thiophosphate linkage at a 3′ end of the engineered guide RNA. In some embodiments, the engineered guide RNA comprises at least one 2′-O-methyl base in both the 3′ stem or the 5′ stem region of the engineered guide RNA. In some embodiments, the engineered guide RNA comprises at least one to at least fourteen 2′-fluoro bases in the spacer region excluding a seed region of the engineered guide RNA. In some embodiments, the engineered guide RNA comprises at least one 2′-O-methyl base in the 5′ stem region of the engineered guide RNA and at least one to at least fourteen 2′-fluoro bases in the spacer region excluding a seed region of the guide RNA. In some embodiments, the guide RNA comprises a spacer sequence targeting a VEGF-A gene. In some embodiments, the guide RNA comprises a spacer sequence having at least 80% identity to SEQ ID NO: 3985. In some embodiments, the guide RNA comprises the nucleotides of guide RNAs 1-7 from Table 7 comprising the chemical modifications listed in Table 7. In some embodiments, the RNA-guided nuclease is a Cas endonuclease. In some embodiments, the Cas endonuclease is a class 2, type V Cas endonuclease In some embodiments, the class 2, type V Cas endonuclease comprises a RuvC domain comprising a RuvCI subdomain, a RuvCII subdomain, and a RuvCIII subdomain. In some embodiments, the class 2, type V Cas endonuclease comprises an endonuclease having at least 75% sequence identity to any one of SEQ ID NOs: 1-3470 or a variant thereof. In some embodiments, the class 2, type V Cas endonuclease comprises an endonuclease having at least 75% sequence identity to any one of SEQ ID NOs: 141, 215, 229, 261, or 1711-1721 or a variant thereof. In some embodiments, the engineered guide RNA comprises a sequence with at least 80% sequence identity to the non-degenerate nucleotides of any one of SEQ ID NOs: 3471, 3539, 3551-3559, 3608-3609, 3612, 3636-3637, 3640-3641, 3644-3645, 3648-3649, 3652-3653, 3656-3657, 3660-3661, 3664-3667, 3671-3672, 3677-3678, 3695-3696, 3729-3730, 3734-3735, and 3851-3857. In some embodiments, the engineered guide RNA comprises a sequence with at least 80% sequence identity to the non-degenerate nucleotides of any one of SEQ ID NOs: 3608-3609, 3853, or 3851-3857.

[0017] In some aspects, the present disclosure provides for a host cell comprising an open reading frame encoding a heterologous endonuclease having at least 75% sequence identity to any one of SEQ ID NOs: 1-3470 or a variant thereof. In some embodiments, the endonuclease has at least 75% sequence identity to any one of SEQ ID NOs: 141, 215, 229, 261, or 1711-1721, or a variant thereof. In some embodiments, the host cell is an E. coli cell or a mammalian cell. In some embodiments, the host cell is an E. coli cell, wherein the E. coli cell is a λDE3 lysogen or the E. coli cell is a BL21(DE3) strain. In some embodiments, the E. coli cell has an ompT lon genotype. In some embodiments, the open reading frame is operably linked to a T7 promoter sequence, a T7-lac promoter sequence, a lac promoter sequence, a tac promoter sequence, a trc promoter sequence, a ParaBAD promoter sequence, a PrhaBAD promoter sequence, a T5 promoter sequence, a cspA promoter sequence, an araP_{BAD} promoter, a strong leftward promoter from phage lambda (pL promoter), or any combination thereof. In some embodiments, the open reading frame comprises a sequence encoding an affinity tag linked in-frame to a sequence encoding the endonuclease. In some embodiments, the affinity tag is an immobilized metal affinity chromatography (IMAC) tag. In some embodiments, the IMAC tag is a polyhistidine tag. In some embodiments, the affinity tag is a myc tag, a human influenza hemagglutinin (HA) tag, a maltose binding protein (MBP) tag, a glutathione S-transferase (GST) tag, a streptavidin tag, a FLAG tag, or any combination thereof. In some embodiments, the affinity tag is linked in-frame to the sequence encoding the endonuclease via a linker sequence encoding a protease cleavage site. In some embodiments, the protease cleavage site is a tobacco etch virus (TEV) protease cleavage site, a PreScission® protease cleavage site, a Thrombin cleavage site, a Factor Xa cleavage site, an enterokinase cleavage site, or any combination thereof. In some embodiments, the open reading frame is codon-optimized for expression in the host cell. In some embodiments, the open reading frame is provided on a vector. In some embodiments, the open reading frame is integrated into a genome of the host cell.

[0018] In some aspects, the present disclosure provides for a culture comprising any of the host cells described herein in compatible liquid medium.

[0019] In some aspects, the present disclosure provides for a method of producing an endonuclease, comprising cultivating any of the host cells described herein in compatible growth medium. In some embodiments, the method further comprises inducing expression of the endonuclease In some embodiments, the inducing expression of the nuclease is by addition of an additional chemical agent or an increased amount of a nutrient, or by temperature increase or decrease. In some embodiments, an additional chemical agent or an increased amount of a nutrient comprises Isopropyl β-D-1-thiogalactopyranoside (IPTG) or additional amounts of lactose In some embodiments, the method further comprises isolating the host cell after the cultivation and lysing the host cell to produce a protein extract. In some embodiments, the method further comprises isolating the endonuclease. In some embodiments, the isolating comprises subjecting the protein extract to IMAC, ion-exchange chromatography, anion exchange chromatography, or cation exchange chromatography. In some embodiments, the open reading frame comprises a sequence encoding an affinity tag linked in-frame to a sequence encoding the endonuclease. In some embodiments, the affinity tag is linked in-frame to the sequence encoding the endonuclease via a linker sequence encoding protease cleavage site. In some embodiments, the protease cleavage site comprises a tobacco etch virus (TEV) protease cleavage site, a PreScission® protease cleavage site, a Thrombin cleavage site, a Factor Xa cleavage site, an enterokinase cleavage site, or any combination thereof. In some embodiments, the method further comprises cleaving the affinity tag by contacting a protease corresponding to the protease cleavage site to the endonuclease. In some embodiments, the affinity tag is an IMAC affinity tag. In some embodiments, the method further comprises performing subtractive IMAC affinity chromatography to remove the affinity tag from a composition comprising the endonuclease.

[0020] In some aspects, the present disclosure provides for a system comprising (a) a class 2, Type V-A Cas endonuclease configured to bind a 3- or 4-nucleotide PAM sequence, wherein the endonuclease has increased cleavage activity relative to sMbCas12a; and (b) an engineered guide RNA, wherein the engineered guide RNA is configured to form a complex with the class 2, Type V-A Cas endonuclease and the engineered guide RNA comprises a spacer sequence configured to hybridize to a target nucleic acid comprising a target nucleic acid sequence. In some embodiments, the cleavage activity is measured in vitro by introducing the endonucleases alongside compatible guide RNAs to cells comprising the target nucleic acid and detecting cleavage of the target nucleic acid sequence in the cells. In some embodiments, the class 2, Type V-A Cas endonuclease comprises a sequence having at least 75% identity to any one of 215-225 or a variant thereof. In some embodiments, the engineered guide RNA comprises a sequence having at least 80% identity to the non-degenerate nucleotides of SEQ ID NO: 3609. In some embodiments, the target nucleic acid further comprises a YYN PAM sequence proximal to the target nucleic acid sequence. In some embodiments, the class 2, Type V-A Cas endonuclease has at least about 5%, 10%, 20%, 30%, 40%, 50%, 60%, 70%, 80%, 90%, 100%, or 200%, or more increased activity relative to sMbCas12a.

[0021] In some aspects, the present disclosure provides for a system comprising: (a) a class 2, Type V-A′ Cas endonuclease; and (b) an engineered guide RNA, wherein the engineered guide RNA comprises a sequence having at least 80% identity to about 19 to about 25 or about 19 to about 31 consecutive nucleotides of a natural effector repeat sequence of a class 2, Type V Cas endonuclease. In some embodiments, the natural effector repeat sequence is any one of SEQ ID NOs: 3560-3572. In some embodiments, the class 2, Type V-A′ Cas endonuclease has at least 75% identity to SEQ ID NO: 126.

[0022] In some aspects, the present disclosure provides for a system comprising: (a) a class 2, Type V-L endonuclease, and (b) an engineered guide RNA, wherein the engineered guide RNA comprises a sequence having at least 80% identity to about 19 to about 25 or about 19 to about 31 consecutive nucleotides of a natural effector repeat sequence of a class 2, Type V Cas endonuclease. In some embodiments, the class 2, Type V-L endonuclease has at least 75% sequence identity to any one of SEQ ID NOs: 793-1163.

[0023] In some aspects, the present disclosure provides for a method of disrupting the VEGF-A locus in a cell, comprising introducing to the cell: (a) a class 2, type V Cas endonuclease; and (b) an engineered guide RNA, wherein the engineered guide RNA is configured to form a complex with the endonuclease and the engineered guide RNA comprises a spacer sequence configured to hybridize to a region of the VEGF-A locus, wherein the engineered guide RNA comprises a targeting sequence having at least 80% identity to SEQ ID NO: 3985; or wherein the engineered guide RNA comprises the nucleotide sequence of any one of guide RNAs 1-7 from Table 7 In some embodiments, the class 2, type V Cas endonuclease comprises an endonuclease having at least 75% sequence identity to any one of SEQ ID NOs: 1-3470 or a variant thereof. In some embodiments, the class 2, type V Cas endonuclease comprises an endonuclease having at least 75% sequence identity to any one of SEQ ID NOs: 141, 215, 229, 261, or 1711-1721 or a variant thereof. In some embodiments, the engineered guide RNA comprises a sequence with at least 80% sequence identity to the non-degenerate nucleotides of any one of SEQ ID NOs: 3471, 3539, 3551-3559, 3608-3609, 3612, 3636-3637, 3640-3641, 3644-3645, 3648-3649, 3652-3653, 3656-3657, 3660-3661, 3664-3667, 3671-3672, 3677-3678, 3695-3696, 3729-3730, 3734-3735, and 3851-3857. In some embodiments, the engineered guide RNA comprises a sequence with at least 80% sequence identity to the non-degenerate nucleotides of any one of SEQ ID NOs: 3608-3609, 3853, or 3851-3857.

[0024] In some aspects, the present disclosure provides for a method of disrupting a locus in a cell, comprising contacting to the cell a composition comprising: (a) a class 2, type V Cas endonuclease having at least 75% identity to any one of SEQ ID NOs: 215-225 or a variant thereof; and (b) an engineered guide RNA, wherein the engineered guide RNA is configured to form a complex with the endonuclease and the engineered guide RNA comprises a spacer sequence configured to hybridize to a region of the locus, wherein the class 2, type V Cas endonuclease has at least equivalent cleavage activity to spCas9 in the cell. In some embodiments, the cleavage activity is measured in vitro by introducing the endonucleases alongside compatible guide RNAs to cells comprising the target nucleic acid and detecting cleavage of the target nucleic acid sequence in the cells. In some embodiments, the composition comprises 20 pmoles or less of the class 2, type V Cas endonuclease. In some embodiments, the composition comprises 1 pmol or less of the class 2, type V Cas endonuclease.

[0025] Additional aspects and advantages of the present disclosure will become readily apparent to those skilled in this art from the following detailed description, wherein only illustrative embodiments of the present disclosure are shown and described. As will be realized, the present disclosure is capable of other and different embodiments, and its several details are capable of modifications in various obvious respects, all without departing from the disclosure. Accordingly, the drawings and description are to be regarded as illustrative in nature, and not as restrictive.

### INCORPORATION BY REFERENCE

[0026] All publications, patents, and patent applications mentioned in this specification are herein incorporated by reference to the same extent as if each individual publication, patent, or patent application was specifically and individually indicated to be incorporated by reference.

### BRIEF DESCRIPTION OF THE DRAWINGS

[0027] The novel features of the invention are set forth with particularity in the appended claims. A better understanding of the features and advantages of the present invention will be obtained by reference to the following detailed description that sets forth illustrative embodiments, in which the principles of the invention are utilized, and the accompanying drawings of which:

[0028] FIG. 1 depicts typical organizations of CRISPR/Cas loci of different classes and types that were previously described before this disclosure.

[0029] FIG. 2 depicts environmental distribution of MG nucleases described herein. Protein length is shown for representatives of the MG29 protein family. Shades of circle indicates the environment or environment type from which each protein was identified (dark gray circle indicates high temperature environment source; light gray circle indicates non-high temperature environment source). N/A denotes the type of environment the sample was collected from is unknown.

[0030] FIG. 3 depicts the number of predicted catalytic residues present in MG nucleases detected from sample types described herein (e.g. FIG. 2). Protein length is shown for representatives of the MG29 protein family. The number of catalytic residues that were predicted for each protein are indicated in the figure legend (3.0 residues). The first, second and third catalytic residues are located in the RuvCI domain, the RuvCII domain and the RuvCIII domain, respectively.

[0031] FIG. 4 shows the diversity of CRISPR Type V-A effectors. FIG. 4A depicts per family distribution of taxonomic classification of contigs encoding the novel Type V-A effectors. FIG. 4B depicts the phylogenetic gene tree inferred from an alignment of 119 novel and 89 reference Type V effector sequences. MG families are denoted in parentheses. PAM requirements for active nucleases are outlined with boxes associated with the family. Non-Type V-A reference sequences were used to root the tree (*MG61 family requires a crRNA with an alternative stem-loop sequence).

[0032] FIG. 5 provides various characteristic information about nucleases described herein. FIG. 5A depicts the per family distribution of effector protein length and the type of sample; FIG. 5B shows the presence of RuvC catalytic residues. FIG. 5C shows the number of CRISPR arrays having various repeat motifs. FIG. 5D depicts the per family distribution of repeat motifs.

[0033] FIG. 6 depicts multiple sequence alignment of catalytic and PAM interacting regions in Type V-A sequences. Francisella novicida Cas12a (FnCas12) is a reference sequence. Other reference sequences are Acidaminococcus sp. (AsCas12a), Moraxella bovoculi (MbCas12a), and Lachnospiraceae bacterium ND2006 (LbCas12a). FIG. 6A shows blocks of conservation around the DED catalytic residues in RuvC-I (left), RuvC-II (middle), and RuvC-III (right) regions. FIG. 6B shows WED-II and PAM interacting regions containing residues involved in PAM recognition and interaction. The grey boxes underneath the FnCas12a sequence identify the domains. Darker boxes in the alignments indicate increased sequence identity. Black boxes over the FnCas12a sequence indicate catalytic residues (and positions) of the reference sequence. Grey boxes indicate domains in the reference sequence at the top of the alignment (FnCas12a). Black boxes indicate catalytic residues (and positions) of the reference sequence.

[0034] FIG. 7 depicts Type V-A and associated V-A′ effectors. FIG. 7A shows Type V-A (MG26-1) and V-A′ (MG26-2) indicated by arrows pointing in the direction of transcription. The CRISPR array is indicated by a gray bar. Predicted domains for each protein in the contig are indicated by boxes. FIG. 7B shows sequence alignments of Type V-A′ MG26-2 and AsCas12a reference sequence. Top: RuvC-I domain. Middle: region containing the RuvC-I and RuvC-II catalytic residues. Bottom: region containing the RuvC-III catalytic residue. Catalytic residues are indicated by squares.

[0035] FIG. 8 depicts a schematic representation of the structure of a sgRNA and a target DNA in a ternary complex with AacC2C1 (see Yang, Hui, Pu Gao, Kanagalaghatta R. Raj ashankar, and Dinshaw J. Patel. 2016. “PAM-Dependent Target DNA Recognition and Cleavage by C2c1 CRISPR-Cas Endonuclease.” Cell 167 (7): 1814-28.e12 which is incorporated by reference herein in its entirety).

[0036] FIG. 9 depicts the effects of mutations or truncations in the R-AR domains of an sgRNA on AacC2c1-mediated cleavage of linear plasmid DNA; WT, wild-type sgRNA. The mutant nucleotides within sgRNA (lanes 1-5) are highlighted in the left panel. Δ15: 15 nt deleted from the sgRNA R-AR 1 region. Δ12: 12 nt have been removed from the sgRNA J2/4 R-AR 1 region (see Liu, Liang, Peng Chen, Min Wang, Xueyan Li, Jiuyu Wang, Maolu Yin, and Yanli Wang. 2017. “C2c1-sgRNA Complex Structure Reveals RNA-Guided DNA Cleavage Mechanism.” Molecular Cell 65 (2): 310-22 which is incorporated by reference herein in its entirety).

[0037] FIG. 10 depicts the CRISPR RNA (crRNA) structure is conserved among Type V-A systems. FIG. 10A shows the fold structure of the reference crRNA sequence in the LbCpf1 system. FIG. 10B shows multiple sequence alignment of CRISPR repeats associated with novel Type V-A systems. The LbCpf1 processing site is indicated with a black bar. FIG. 10C shows the fold structure of MG61-2 putative crRNA with an alternative stem-loop motif CCUGC[N₃₋₄]GCAGG. FIG. 10D shows multiple sequence alignment of CRISPR repeats with the alternative repeat motif sequence. The processing sites and loop are indicated.

[0038] FIG. 11 depicts a predicted structure of a guide RNA utilized herein (SEQ ID NO: 3608).

[0039] FIG. 12 depicts predicted structures of corresponding sgRNAs of MG enzymes described herein (clockwise, SEQ ID NOs: 3636, 3637, 3641, 3640).

[0040] FIG. 13 depicts predicted structures of corresponding sgRNAs of MG enzymes described herein (clockwise, SEQ ID NOs: 3644, 3645, 3649, 3648).

[0041] FIG. 14 depicts predicted structures of corresponding sgRNAs of MG enzymes described herein (clockwise, SEQ ID NOs: 3652, 3653, 3657, 3656).

[0042] FIG. 15 depicts predicted structures of corresponding sgRNAs of MG enzymes described herein (clockwise, SEQ ID NOs: 3660, 3661, 3665, 3664).

[0043] FIG. 16 depicts predicted structures of corresponding sgRNAs of MG enzymes described herein (clockwise, SEQ ID NOs: 3666, 3667, 3672, 3671).

[0044] FIG. 17 depicts an agarose gel showing the results of PAM vector library cleavage in the presence of TXTL extracts containing various MG family nucleases and their corresponding tracrRNA or sgRNAs (as described in Example 12).

[0045] FIG. 17A shows lane 1: ladder. The bands are, from top to bottom, 766, 500, 350, 300, 350, 200, 150, 100, 75, 50; lane 2: 28-1+MGcrRNA spacer1 (SEQ ID NOs: 141+3860); lane 3: 29-1+MGcrRNA spacer1 (SEQ ID NOs: 215+3860); lane 4: 30-1+MGcrRNA spacer1 (SEQ ID NOs:226+3860); lane 5: 31-1+MGcrRNA spacer1 (SEQ ID NOs: 229+3860); lane 6: 32-1+MGcrRNA spacer1 (SEQ ID NOs: 261+3860); lane 7: ladder. FIG. 17B shows lane 1: ladder; lane 2: LbaCas12a+LbaCas12a crRNA spacer2; lane 3: LbaCas12a+MGcrRNA spacer2; lane 4: Apo 13-1; lane 5: 28-1+MGcrRNA spacer2 (SEQ ID NOs: 141+3861); lane 6: 29-1+MGcrRNA spacer2 (SEQ ID NOs: 215+3861); lane 7: 30-1+MGcrRNA spacer2 (SEQ ID NOs: 226+3861); lane 8: 31-1+MGcrRNA spacer2 (SEQ ID NOs: 229+3861); lane 9: 32-1+MGcrRNA spacer2 (SEQ ID NOs: 261+3861).

[0046] FIG. 18 shows Type V-A effectors described herein are active nucleases.

[0047] FIG. 18A depicts seqLogo representations of PAM sequences determined for 6 nucleases described herein.

[0048] FIG. 18B shows a boxplot of plasmid transfection activity assays inferred from frequency of indel edits for active nucleases. The boundaries of the boxplots indicate first and third quartile values. The mean is indicated with an “x” and the median is represented by the midline within each box. FIG. 18C shows plasmid transfection editing frequencies at four target sites for MG29-1 and AsCas12a. One side-by-side experiment with AsCas12a was done. FIG. 18D shows plasmid and RNP editing activity for nuclease MG29-1 at 14 target loci with either TTN or CCN PAMs. FIG. 18E shows the editing profile of nuclease MG29-1 from RNP transfection assays. One side-by-side experiment with AsCas12a was done. Editing frequency and profile experiments for MG29-1 were done in duplicate. The bar plots FIG. 18C and FIG. 18D show mean editing frequency with one standard deviation error bar.

[0049] FIG. 19 depicts in cell indel formation generated by transfection of HEK cells with MG29-1 constructs described in Example 12 alongside their corresponding sgRNAs containing various different targeting sequences targeting various locations in the human genome.

[0050] FIG. 20 depicts seqLogo representations of PAM sequences of specific MG family enzymes derived via NGS as described herein (as described in Example 13).

[0051] FIG. 21 depict seqLogo representations of PAM sequences of specific MG family enzymes derived via NGS as described herein (top to bottom, SEQ ID NOs: 3865, 3867, 3872).

[0052] FIG. 22 depict seqLogo representations of PAM sequences derived via NGS as described herein (top to bottom, SEQ ID NOs: 3878, 3879, 3880, 3881).

[0053] FIG. 23 depict seqLogo representations of PAM sequences derived via NGS as described herein (top to bottom, SEQ ID NOs: 3883, 3884, 3885).

[0054] FIG. 24 depict seqLogo representations of PAM sequences derived via NGS as described herein (SEQ ID NO: 3882).

[0055] FIG. 25 depicts in cell indel formation generated by transfection of HEK cells with MG31-1 constructs described in Example 14 alongside their corresponding sgRNAs containing various different targeting sequences targeting various locations in the human genome.

[0056] FIG. 26 shows the biochemical characterization of Type V-A nucleases. FIG. 26A shows PCR of cleavage products with adaptors ligated to their ends shows activity of nucleases described herein and Cpf1 (positive control) when bound to a universal crRNA. Expected cleavage product band labeled with an arrow. FIG. 26B shows PCR of cleavage products with adaptors ligated to their ends show activity of nucleases described herein when bound to their native crRNA. Cleavage product band indicated with an arrow. FIG. 26C shows analysis of the NGS cut sites shows cleavage on the target strand at position 22, sometimes with less frequent cleavage after 21 or 23 nt.

[0057] FIGS. 27A and 27B depict multiple sequence alignments of Type V-L nucleases described herein, showing (FIG. 27A) an example locus organization for a Type V-L nuclease, and (FIG. 27B) a multiple sequence alignment. Regions containing putative RuvC-III domains are shown as light grey rectangles. Putative RuvC catalytic residues are shown as small dark grey rectangles above each sequence. Putative single-guide RNA binding sequences are small white rectangles, putative scissile phosphate binding sites are indicated by black rectangles above sequences, and residues predicted to disrupt base stacking near the scissile phosphate in the target sequence are indicated by small medium-grey rectangles above sequences.

[0058] FIG. 28 shows a Type V-L candidate labeled MG60 as an example locus organization alongside an effector repeat structure and a phylogenetic tree showing the location of the enzyme in the Type V families.

[0059] FIG. 29 shows examples of smaller Type V effectors one of which may be labeled as MG70.

[0060] FIG. 30 shows characteristic information of MG70 as described herein. Depicted is an example locus organization alongside a phylogenetic tree illustrating the location of these enzymes in the Type V family.

[0061] FIG. 31 shows another example of a small Type V effector MG81 as described herein. Depicted is an example locus organization alongside a phylogenetic tree illustrating the location of these enzymes in the Type V family.

[0062] FIG. 32 shows that the activity individual enzymes of Type V effector families identified herein (e.g. MG20, MG60, MG70, other) is maintained over a variety of different enzyme lengths (e.g. 400-1200 AA). Light dots (True) indicate active enzymes while dark dots (unknown) indicate untested enzymes.

[0063] FIG. 33 depicts sequence conservation of MG nucleases described herein. The black bars indicate putative RuvC catalytic residues.

[0064] FIG. 34 and FIG. 35 depicts an enlarged version of multiple sequence alignments in FIG. 33 of regions of the MG nucleases described herein containing putative RuvC catalytic residues (dark-grey rectangles), scissile phosphate-binding residues (black rectangles), and residues predicted to disrupt base stacking adjacent to the scissile phosphate (light-grey rectangles).

[0065] FIG. 36 depicts the regions of the MG nucleases described herein containing putative RuvC-III domain & catalytic residues.

[0066] FIG. 37 depicts regions of the MG nucleases containing putative single-guide RNA-binding residues (white rectangles above sequences).

[0067] FIG. 38 depicts multiple protein sequence alignment of representatives from several MG type V Families. Shown are conserved regions containing portions of the RuvC domain predicted to be involved in nuclease activity. Predicted catalytic residues are highlighted.

[0068] FIG. 39 shows a screen of the TRAC locus for MG29-1 gene editing. A bar graph shows indel creation resulting from transfection of MG29-1 with 54 separate guide RNAs targeting the TRAC locus in primary human T cells. The corresponding guide RNAs depicted in the figure are identified in SEQ ID NOs: 4316-4423.

[0069] FIG. 40 depicts the optimization of MG29-1 editing at TRAC. A bar graph shows indel creation resulting from transfection of MG29-1 (at the indicated concentrations) with the four best 22 nt guide RNAs from the experiment shown in the figure above (9, 19, 25, and 35). Legend: MG29-1 9 is MG29-1 effector (SEQ ID NO: 215) and Guide 9 (SEQ ID NO: 4378), MG29-1 19 is MG29-1 effector (SEQ ID NO: 215) and Guide 19 (SEQ ID NO: 4388), MG29-1 25 is MG29-1 effector (SEQ ID NO: 215) and Guide 25 (SEQ ID NO: 4394), and MG29-1 35 is MG29-1 effector (SEQ ID NO: 215) and Guide 35 (SEQ ID NO: 4404).

[0070] FIG. 41 depicts the optimization of dose and guide length for MG29-1 editing at TRAC. Line graphs show the indel creation resulting from transfection of MG29-1 and either guide RNA #19 (SEQ ID NO: 4388) or guide RNA #35 (SEQ ID NO: 4404). Three different doses of nuclease/guide RNA were used. For each dose, six different guide lengths were tested, successive one-nucleotide 3′ truncations of SEQ ID NOs: 4388 and 4404. The guides used in FIG. 39 and FIG. 40 are the 22 nt-long spacer-containing guides in this case.

[0071] FIG. 42 shows a correlation of indel generation at TRAC and loss of the T cell receptor expression in the Experiment of Example 22.

[0072] FIG. 43 depicts targeted transgene integration at TRAC stimulated by MG29-1 cleavage. Cells receiving only the transgene donor by AAV infection retain TCR expression and lack CAR expression; cells transfected with MG29-1 RNPs and infected with 100,000 vg (vector genomes) of a CAR transgene donor lose TCR expression and gain CAR expression. Shown are FACS plots of CAR antigen binding vs TCR expression for cells transfected with only AAV containing the CAR-T-containing donor sequence (“AAV”); AAV containing the CAR-T-containing donor sequence with MG29-1 enzyme and sgRNA 19 (SEQ ID NO: 4388) (“AAV+MG29-1-19-22” comprising a 22 nucleotide spacer), or AAV containing the CAR-T-containing donor sequence with MG29-1 enzyme and sgRNA 35 (SEQ ID NO: 4404) (“AAV+MG29-1-35-22” comprising a 22 nucleotide spacer).

[0073] FIG. 44 shows MG29-1 gene editing at TRAC in hematopoietic stem cells. A bar graph shows the extent of indel creation at TRAC after transfection with MG29-1-9-22 (“MG29-1 9”; MG29-1 plus guide RNA #19) and MG29-1-35-22 (“MG29-1 35”; MG29-1 plus guide RNA #35) compared to mock-transfected cells.

[0074] FIG. 45 shows the refinement of the MG29-1 PAM based on analysis of gene editing outcomes in cells. Guide RNAs were designed using a 5′-NTTN-3′ PAM sequence and then sorted according to the gene editing activity observed. The identity of the underlined base (the 5′-proximal N) is shown for each bin. All of the guides with activity greater than 10% had a T at this position in the genomic DNA indicating that the MG29-1 PAM may be best described as 5′-TTTN-3′. The statistical significance of the over-representation of T at this position is shown for each bin.

[0075] FIG. 46 depicts the analysis of gene editing activity versus the base composition of MG29-1 spacer sequences. A bar graph shows experimental data illustrating a relationship between GC content (%) and indel frequency (“high” signifies >50% indels (N=4); “medium” signifies 10-50% indels (N=15); “>1%” signifies 1-5% indels (N=12); “<1%” signifies less than 1% indels (N=82)).

[0076] FIG. 47 depicts MG29-1 guide RNA chemical modifications. The bar graph shows the consequences of modifications from Table 7 on VEGF-A editing activity relative to an unmodified guide RNA (sample #1).

[0077] FIG. 48 depicts a dose titration of a variously chemically modified MG29-1 RNA. The bar graphs show indel generation after transfection of RNPs with guides using modification patterns 1, 4, 5, 7, and 8. RNPs doses were 126 pmol MG29-1 and 160 pmol guide RNA or as indicated. Full dose (A), ¼th (B), ⅛th (C), 1/16th (D), and 1/32nd (E).

[0078] FIG. 49 depicts a plasmid map of pMG450 (MG29-1 nuclease protein in lac inducible tac promoter E. coli BL21 expression vector.

[0079] FIG. 50 depicts the indel profile of MG29-1 with spacer mALb29-1-8 (SEQ ID NO: 3999) compared to spCas9 with a guide targeting mouse albumin intron 1.

[0080] FIG. 51 is a representative indel profile of MG29-1 with a guide targeting mouse albumin intron 1 determined by next generation sequencing (approximately 15,000 total reads analyzed) as in Example 29.

[0081] FIG. 52 shows the editing efficiency of MG29-1 compared to spCas9 in mouse liver cell line Hepa1-6 nucleofected with RNP as in Example 29.

[0082] FIG. 53 shows the editing efficiencies in mammalian cells of MG29-1 variants with single and double amino acid substitutions compared to wild type MG29-1. FIG. 53A depicts editing efficiency in Hepa 1-6 cells transfected with plasmids codifying for MG29-1 WT or mutant versions. FIG. 53B depicts Editing efficiency in Hepa 1-6 cells transfected with mRNA encoding WT or S168R at various concentrations. FIG. 53C depicts the editing efficiency in Hepa 1-6 cells transfected with mRNA codifying versions of MG29-1 with single or double amino acid substitutions. FIG. 53D depicts the editing efficiency in Hepa 1-6 and HEK293T cells transfected with MG29-1 WT vs S168R in combination with 13 guides. 12 guides correspond to guides in Table 7. Guide “35 (TRAC)” is a guide targeting the human locus TRAC.

[0083] FIG. 54 shows the predicted secondary structure of the MG29-1 guide mAlb29-1-8.

[0084] FIG. 55 shows the impact of chemical modifications of the MG29-1 sgRNA sequence upon the stability of the sgRNA in whole cell extracts of mammalian cells.

[0085] FIG. 56 shows the use of sequencing to identify the cut site on the target strand in an in vitro reaction performed with MG29-1 protein, a guide RNA and an appropriate template. FIG. 56A shows the distance of the cut position from the PAM in nucleotides as determined by next generation sequencing. FIG. 56B shows the use of Sanger Sequencing to define the MG29-1 cut site on the target strand. FIG. 56C shows the use of Sanger Sequencing to define the MG29-1 cut site on the non-target strand. Run-off Sanger sequencing was performed on in vitro reactions containing MG29-1, a guide and an appropriate template to evaluate the cleavage of both strands. The cleavage site on the target strand is position 23 which is consistent with the NGS data in FIG. 56A which shows cleavage at 21-23 bases. The “A” peak at the end of the sequence is due to polymerase run off and is expected. The cleavage site on the non-target strand can be seen in the reverse read in which the expected terminating base is “T”. The marked spot (line) shows cleavage at position 17 from the PAM and then the terminal T. However, there is a mixed T signal at positions 18, 19, and 20 from the PAM suggesting variable cleavage on this strand at positions 17, 18, and 19.

### BRIEF DESCRIPTION OF THE SEQUENCE LISTING

[0086] The Sequence Listing filed herewith provides exemplary polynucleotide and polypeptide sequences for use in methods, compositions and systems according to the disclosure. Below are exemplary descriptions of sequences therein.

### MG11

[0087] SEQ ID NOs: 1-37 show the full-length peptide sequences of MG11 nucleases.

[0088] SEQ ID NO: 3471 shows a crRNA 5′ direct repeats designed to function with an MG11 nuclease.

[0089] SEQ ID NOs: 3472-3538 show effector repeat motifs of MG11 nucleases.

[0090] SEQ ID NOs: 38-118 show the full-length peptide sequences of MG13 nucleases.

[0091] SEQ ID NO: 3540-3550 show effector repeat motifs of MG13 nucleases.

### MG19

[0092] SEQ ID NOs: 119-124 show the full-length peptide sequences of MG19 nucleases.

[0093] SEQ ID NOs: 3551-3558 show the nucleotide sequences of sgRNAs engineered to function with a MG19 nuclease.

[0094] SEQ ID NOs: 3863-3866 show PAM sequences compatible with MG19 nucleases.

### MG20

[0095] SEQ ID NO: 125 shows the full-length peptide sequence of a MG20 nuclease.

[0096] SEQ ID NO: 3559 shows the nucleotide sequence of a sgRNA engineered to function with a MG20 nuclease.

[0097] SEQ ID NO: 3867 shows a PAM sequence compatible with an MG20 nuclease.

### MG26

[0098] SEQ ID NOs: 126-140 show the full-length peptide sequences of MG26 nucleases.

[0099] SEQ ID NOs: 3560-3572 show effector repeat motifs of MG26 nucleases.

### MG28

[0100] SEQ ID NOs: 141-214 show the full-length peptide sequences of MG28 nucleases.

[0101] SEQ ID NOs: 3573-3607 show effector repeat motifs of MG28 nucleases.

[0102] SEQ ID NOs: 3608-3609 show crRNA 5′ direct repeats designed to function with an MG28 nuclease.

[0103] SEQ ID NOs: 3868-3869 shows a PAM sequence compatible with an MG28 nuclease.

### MG29

[0104] SEQ ID NOs: 215-225 show the full-length peptide sequences of MG29 nucleases.

[0105] SEQ ID NOs: 3610-3611 show effector repeat motifs of MG29 nucleases.

[0106] SEQ ID NO: 3612 shows the nucleotide sequence of a sgRNA engineered to function with a MG29 nuclease.

[0107] SEQ ID NOs: 3870-3872 show PAM sequences compatible with an MG29 nuclease.

### MG30

[0108] SEQ ID NOs: 226-228 show the full-length peptide sequences of MG30 nucleases.

[0109] SEQ ID NOs: 3613-3615 show effector repeat motifs of MG30 nucleases.

[0110] SEQ ID NO: 3873 shows a PAM sequence compatible with an MG30 nuclease.

### MG31

[0111] SEQ ID NOs: 229-260 show the full-length peptide sequences of MG31 nucleases.

[0112] SEQ ID NOs: 3616-3632 show effector repeat motifs of MG31 nucleases.

[0113] SEQ ID NOs: 3874-3876 show PAM sequences compatible with a MG31 nuclease.

### MG32

[0114] SEQ ID NO: 261 shows the full-length peptide sequence of a MG32 nuclease.

[0115] SEQ ID NO: 3633-3634 show effector repeat motifs of MG32 nucleases.

[0116] SEQ ID NO: 3876 shows a PAM sequence compatible with a MG32 nuclease.

### MG37

[0117] SEQ ID NOs: 262-426 show the full-length peptide sequences of MG37 nucleases.

[0118] SEQ ID NO: 3635 shows an effector repeat motif of MG37 nucleases.

[0119] SEQ ID NOs: 3636-3637, 3640-3641, 3644-3645, 3648-3649, 3652-3653, 3656-3657, and 3660-3661 show the nucleotide sequence of sgRNA engineered to function with an MG37 nuclease.

[0120] SEQ ID NOs: 3638, 3642, 3646, 3650, 3654, 3658, and 3662 show the nucleotide sequences of MG37 tracrRNAs derived from the same loci as MG37 nucleases above.

[0121] SEQ ID NO: 3639, 3643, 3647, 3651, 3655, and 3659 show 5′ direct repeat sequences derived from native MG37 loci that serve as crRNAs when placed 5′ to a 3′ targeting or spacer sequence.

### MG53

[0122] SEQ ID NOs: 427-428 show the full-length peptide sequences of MG53 nucleases.

[0123] SEQ ID NO: 3663 shows a 5′ direct repeat sequence derived from native MG53 loci that serve as a crRNA when placed 5′ to a 3′ targeting or spacer sequence.

[0124] SEQ ID NOs: 3664-3667 show the nucleotide sequence of sgRNAs engineered to function with an MG53 nuclease.

[0125] SEQ ID NOs: 3668-3669 show the nucleotide sequences of MG53 tracrRNAs derived from the same loci as MG53 nucleases above.

### MG54

[0126] SEQ ID NOs: 429-430 show the full-length peptide sequences of MG54 nucleases.

[0127] SEQ ID NO: 3670 shows a 5′ direct repeat sequence derived from native MG54 loci that serve as a crRNA when placed 5′ to a 3′ targeting or spacer sequence.

[0128] SEQ ID NOs: 3671-3672 show the nucleotide sequence of sgRNA engineered to function with an MG54 nuclease.

[0129] SEQ ID NOs: 3673-3676 show the nucleotide sequences of MG54 tracrRNAs derived from the same loci as MG54 nucleases above.

### MG55

[0130] SEQ ID NOs: 431-688 show the full-length peptide sequences of MG55 nucleases.

### MG56

[0131] SEQ ID NOs: 689-690 show the full-length peptide sequences of MG56 nucleases.

[0132] SEQ ID NO: 3678 shows a crRNA 5′ direct repeats designed to function with an MG56 nuclease.

[0133] SEQ ID NOs: 3679-3680 show effector repeat motifs of MG56 nucleases.

### MG57

[0134] SEQ ID NOs: 691-721 show the full-length peptide sequences of MG57 nucleases.

[0135] SEQ ID NOs: 3681-3694 show effector repeat motifs of MG57 nucleases.

[0136] SEQ ID NOs: 3695-3696 show the nucleotide sequences of sgRNAs engineered to function with an MG57 nuclease.

[0137] SEQ ID NOs: 3879-3880 shows PAM sequences compatible with MG57 nucleases.

### MG58

[0138] SEQ ID NOs: 722-779 show the full-length peptide sequences of MG58 nucleases.

[0139] SEQ ID NOs: 3697-3711 show effector repeat motifs of MG58 nucleases.

### MG59

[0140] SEQ ID NOs: 780-792 show the full-length peptide sequences of MG59 nucleases.

[0141] SEQ ID NOs: 3712-3728 show effector repeat motifs of MG59 nucleases.

[0142] SEQ ID NOs: 3729-3730 show the nucleotide sequences of sgRNAs engineered to function with an MG59 nuclease.

[0143] SEQ ID NOs: 3881-3882 shows PAM sequences compatible with MG59 nucleases.

### MG60

[0144] SEQ ID NOs: 793-1163 show the full-length peptide sequences of MG60 nucleases.

[0145] SEQ ID NOs: 3731-3733 show effector repeat motifs of MG60 nucleases.

### MG61

[0146] SEQ ID NOs: 1164-1469 show the full-length peptide sequences of MG61 nucleases.

[0147] SEQ ID NOs: 3734-3735 show crRNA 5′ direct repeats designed to function with MG61 nucleases.

[0148] SEQ ID NOs: 3736-3847 show effector repeat motifs of MG61 nucleases.

### MG62

[0149] SEQ ID NOs: 1470-1472 show the full-length peptide sequences of MG62 nucleases.

[0150] SEQ ID NOs: 3848-3850 show effector repeat motifs of MG62 nucleases.

### MG70

[0151] SEQ ID NOs: 1473-1514 show the full-length peptide sequences of MG70 nucleases.

### MG75

[0152] SEQ ID NOs: 1515-1710 show the full-length peptide sequences of MG75 nucleases.

### MG77

[0153] SEQ ID NOs: 1711-1712 show the full-length peptide sequences of MG77 nucleases.

[0154] SEQ ID NOs: 3851-3852 show the nucleotide sequences of sgRNAs engineered to function with an MG77 nuclease.

[0155] SEQ ID NOs: 3883-3884 show PAM sequences compatible with MG77 nucleases.

### MG78

[0156] SEQ ID NOs: 1713-1717 show the full-length peptide sequences of MG78 nucleases.

[0157] SEQ ID NO: 3853 shows the nucleotide sequence of a sgRNA engineered to function with an MG78 nuclease.

[0158] SEQ ID NO: 3885 shows a PAM sequence compatible with a MG78 nuclease.

### MG79

[0159] SEQ ID NOs: 1718-1722 show the full-length peptide sequences of MG79 nucleases.

[0160] SEQ ID NOs: 3854-3857 shows the nucleotide sequences of sgRNAs engineered to function with an MG79 nuclease.

[0161] SEQ ID NOs: 3886-3889 show the PAM sequences compatible with MG79 nucleases.

### MG80

[0162] SEQ ID NO: 1723 shows the full-length peptide sequence of a MG80 nuclease.

### MG81

[0163] SEQ ID NOs: 1724-2654 show the full-length peptide sequences of MG81 nucleases.

### MG82

[0164] SEQ ID NOs: 2655-2657 show the full-length peptide sequences of MG82 nucleases.

### MG83

[0165] SEQ ID NOs: 2658-2659 show the full-length peptide sequences of MG83 nucleases.

### MG84

[0166] SEQ ID NOs: 2660-2677 show the full-length peptide sequences of MG84 nucleases.

### MG85

[0167] SEQ ID NOs: 2678-2680 show the full-length peptide sequences of MG85 nucleases.

### MG90

[0168] SEQ ID NOs: 2681-2809 show the full-length peptide sequences of MG90 nucleases.

### MG91

[0169] SEQ ID NOs: 2810-3470 show the full-length peptide sequences of MG91 nucleases.

### Spacer Segments

[0170] SEQ ID NOs: 3858-3861 show the nucleotide sequences of spacer segments.

### NLS

[0171] SEQ ID NOs: 3938-3953 show the sequences of example nuclear localization sequences (NLSs) that can be appended to nucleases according to the disclosure.

### DETAILED DESCRIPTION OF THE INVENTION

[0172] While various embodiments of the invention have been shown and described herein, it will be obvious to those skilled in the art that such embodiments are provided by way of example only. Numerous variations, changes, and substitutions may occur to those skilled in the art without departing from the invention. It should be understood that various alternatives to the embodiments of the invention described herein may be employed.

[0173] The practice of some methods disclosed herein employ, unless otherwise indicated, techniques of immunology, biochemistry, chemistry, molecular biology, microbiology, cell biology, genomics and recombinant DNA. See for example Sambrook and Green, Molecular Cloning: A Laboratory Manual, 4th Edition (2012); the series Current Protocols in Molecular Biology (F. M. Ausubel, et al. eds.); the series Methods In Enzymology (Academic Press, Inc.), PCR 2: A Practical Approach (M. J. MacPherson, B. D. Hames and G. R. Taylor eds. (1995)), Harlow and Lane, eds. (1988) Antibodies, A Laboratory Manual, and Culture of Animal Cells: A Manual of Basic Technique and Specialized Applications, 6th Edition (R. I. Freshney, ed. (2010)) (which is entirely incorporated by reference herein).

[0174] As used herein, the singular forms “a”, “an” and “the” are intended to include the plural forms as well, unless the context clearly indicates otherwise. Furthermore, to the extent that the terms “including”, “includes”, “having”, “has”, “with”, or variants thereof are used in either the detailed description and/or the claims, such terms are intended to be inclusive in a manner similar to the term “comprising”.

[0175] The term “about” or “approximately” means within an acceptable error range for the particular value as determined by one of ordinary skill in the art, which will depend in part on how the value is measured or determined, i.e., the limitations of the measurement system. For example, “about” can mean within one or more than one standard deviation, per the practice in the art. Alternatively, “about” can mean a range of up to 20%, up to 15%, up to 10%, up to 5%, or up to 1% of a given value.

[0176] As used herein, a “cell” generally refers to a biological cell. A cell may be the basic structural, functional and/or biological unit of a living organism. A cell may originate from any organism having one or more cells. Some non-limiting examples include: a prokaryotic cell, eukaryotic cell, a bacterial cell, an archaeal cell, a cell of a single-cell eukaryotic organism, a protozoa cell, a cell from a plant (e.g., cells from plant crops, fruits, vegetables, grains, soy bean, corn, maize, wheat, seeds, tomatoes, rice, cassava, sugarcane, pumpkin, hay, potatoes, cotton, cannabis, tobacco, flowering plants, conifers, gymnosperms, ferns, clubmosses, hornworts, liverworts, mosses), an algal cell, (e.g., Botryococcus braunii, Chlamydomonas reinhardtii, Nannochloropsis gaditana, Chlorella pyrenoidosa, Sargassum patens C. Agardh, and the like), seaweeds (e.g., kelp), a fungal cell (e.g., a yeast cell, a cell from a mushroom), an animal cell, a cell from an invertebrate animal (e.g., fruit fly, cnidarian, echinoderm, nematode, etc.), a cell from a vertebrate animal (e.g., fish, amphibian, reptile, bird, mammal), a cell from a mammal (e.g., a pig, a cow, a goat, a sheep, a rodent, a rat, a mouse, a non-human primate, a human, etc.), and etcetera. Sometimes a cell is not originating from a natural organism (e.g., a cell can be a synthetically made, sometimes termed an artificial cell).

[0177] The term “nucleotide,” as used herein, generally refers to a base-sugar-phosphate combination. A nucleotide may comprise a synthetic nucleotide. A nucleotide may comprise a synthetic nucleotide analog. Nucleotides may be monomeric units of a nucleic acid sequence (e.g., deoxyribonucleic acid (DNA) and ribonucleic acid (RNA)). The term nucleotide may include ribonucleoside triphosphates adenosine triphosphate (ATP), uridine triphosphate (UTP), cytosine triphosphate (CTP), guanosine triphosphate (GTP) and deoxyribonucleoside triphosphates such as dATP, dCTP, dITP, dUTP, dGTP, dTTP, or derivatives thereof. Such derivatives may include, for example, [αS]dATP, 7-deaza-dGTP and 7-deaza-dATP, and nucleotide derivatives that confer nuclease resistance on the nucleic acid molecule containing them. The term nucleotide as used herein may refer to dideoxyribonucleoside triphosphates (ddNTPs) and their derivatives. Illustrative examples of dideoxyribonucleoside triphosphates may include, but are not limited to, ddATP, ddCTP, ddGTP, ddITP, and ddTTP. A nucleotide may be unlabeled or detectably labeled, such as using moieties comprising optically detectable moieties (e.g., fluorophores). Labeling may also be carried out with quantum dots. Detectable labels may include, for example, radioactive isotopes, fluorescent labels, chemiluminescent labels, bioluminescent labels and enzyme labels. Fluorescent labels of nucleotides may include but are not limited fluorescein, 5-carboxyfluorescein (FAM), 2′7′-dimethoxy-4′5-dichloro-6-carboxyfluorescein (JOE), rhodamine, 6-carboxyrhodamine (R6G), N,N,N,N′-tetramethyl-6-carboxyrhodamine (TAMRA), 6-carboxy-X-rhodamine (ROX), 4-(4′dimethylaminophenylazo) benzoic acid (DABCYL), Cascade Blue, Oregon Green, Texas Red, Cyanine and 5-(2′-aminoethyl)aminonaphthalene-1-sulfonic acid (EDANS). Specific examples of fluorescently labeled nucleotides can include [R6G]dUTP, [TAMRA]dUTP, [R110]dCTP, [R6G]dCTP, [TAMRA]dCTP, [JOE]ddATP, [R6G]ddATP, [FAM]ddCTP, [R110]ddCTP, [TAMRA]ddGTP, [ROX]ddTTP, [dR6G]ddATP, [dR110]ddCTP, [dTAMRA]ddGTP, and [dROX]ddTTP available from Perkin Elmer, Foster City, Calif.; FluoroLink DeoxyNucleotides, FluoroLink Cy3-dCTP, FluoroLink Cy5-dCTP, FluoroLink Fluor X-dCTP, FluoroLink Cy3-dUTP, and FluoroLink Cy5-dUTP available from Amersham, Arlington Heights, Ill.; Fluorescein-15-dATP, Fluorescein-12-dUTP, Tetramethyl-rodamine-6-dUTP, IR770-9-dATP, Fluorescein-12-ddUTP, Fluorescein-12-UTP, and Fluorescein-15-2′-dATP available from Boehringer Mannheim, Indianapolis, Ind.; and Chromosome Labeled Nucleotides, BODIPY-FL-14-UTP, BODIPY-FL-4-UTP, BODIPY-TMR-14-UTP, BODIPY-TMR-14-dUTP, BODIPY-TR-14-UTP, BODIPY-TR-14-dUTP, Cascade Blue-7-UTP, Cascade Blue-7-dUTP, fluorescein-12-UTP, fluorescein-12-dUTP, Oregon Green 488-5-dUTP, Rhodamine Green-5-UTP, Rhodamine Green-5-dUTP, tetramethylrhodamine-6-UTP, tetramethylrhodamine-6-dUTP, Texas Red-5-UTP, Texas Red-5-dUTP, and Texas Red-12-dUTP available from Molecular Probes, Eugene, Oreg. Nucleotides can also be labeled or marked by chemical modification. A chemically-modified single nucleotide can be biotin-dNTP. Some non-limiting examples of biotinylated dNTPs can include, biotin-dATP (e.g., bio-N₆-ddATP, biotin-14-dATP), biotin-dCTP (e.g., biotin-11-dCTP, biotin-14-dCTP), and biotin-dUTP (e.g., biotin-11-dUTP, biotin-16-dUTP, biotin-20-dUTP).

[0178] The terms “polynucleotide,” “oligonucleotide,” and “nucleic acid” are used interchangeably to generally refer to a polymeric form of nucleotides of any length, either deoxyribonucleotides or ribonucleotides, or analogs thereof, either in single-, double-, or multi-stranded form. A polynucleotide may be exogenous or endogenous to a cell. A polynucleotide may exist in a cell-free environment. A polynucleotide may be a gene or fragment thereof. A polynucleotide may be DNA. A polynucleotide may be RNA. A polynucleotide may have any three-dimensional structure and may perform any function. A polynucleotide may comprise one or more analogs (e.g., altered backbone, sugar, or nucleobase). If present, modifications to the nucleotide structure may be imparted before or after assembly of the polymer. Some non-limiting examples of analogs include: 5-bromouracil, peptide nucleic acid, xeno nucleic acid, morpholinos, locked nucleic acids, glycol nucleic acids, threose nucleic acids, dideoxynucleotides, cordycepin, 7-deaza-GTP, fluorophores (e.g., rhodamine or fluorescein linked to the sugar), thiol-containing nucleotides, biotin-linked nucleotides, fluorescent base analogs, CpG islands, methyl-7-guanosine, methylated nucleotides, inosine, thiouridine, pseudouridine, dihydrouridine, queuosine, and wyosine. Non-limiting examples of polynucleotides include coding or non-coding regions of a gene or gene fragment, loci (locus) defined from linkage analysis, exons, introns, messenger RNA (mRNA), transfer RNA (tRNA), ribosomal RNA (rRNA), short interfering RNA (siRNA), short-hairpin RNA (shRNA), micro-RNA (miRNA), ribozymes, cDNA, recombinant polynucleotides, branched polynucleotides, plasmids, vectors, isolated DNA of any sequence, isolated RNA of any sequence, cell-free polynucleotides including cell-free DNA (cfDNA) and cell-free RNA (cfRNA), nucleic acid probes, and primers. The sequence of nucleotides may be interrupted by non-nucleotide components.

[0179] The terms “transfection” or “transfected” generally refer to introduction of a nucleic acid into a cell by non-viral or viral-based methods. The nucleic acid molecules may be gene sequences encoding complete proteins or functional portions thereof. See, e.g., Sambrook et al., 1989, Molecular Cloning: A Laboratory Manual, 18.1-18.88 (which is entirely incorporated by reference herein).

[0180] The terms “peptide,” “polypeptide,” and “protein” are used interchangeably herein to generally refer to a polymer of at least two amino acid residues joined by peptide bond(s). This term does not connote a specific length of polymer, nor is it intended to imply or distinguish whether the peptide is produced using recombinant techniques, chemical or enzymatic synthesis, or is naturally occurring. The terms apply to naturally occurring amino acid polymers as well as amino acid polymers comprising at least one modified amino acid. In some cases, the polymer may be interrupted by non-amino acids. The terms include amino acid chains of any length, including full length proteins, and proteins with or without secondary and/or tertiary structure (e.g., domains). The terms also encompass an amino acid polymer that has been modified, for example, by disulfide bond formation, glycosylation, lipidation, acetylation, phosphorylation, oxidation, and any other manipulation such as conjugation with a labeling component. The terms “amino acid” and “amino acids,” as used herein, generally refer to natural and non-natural amino acids, including, but not limited to, modified amino acids and amino acid analogues. Modified amino acids may include natural amino acids and non-natural amino acids, which have been chemically modified to include a group or a chemical moiety not naturally present on the amino acid. Amino acid analogues may refer to amino acid derivatives. The term “amino acid” includes both D-amino acids and L-amino acids.

[0181] As used herein, the “non-native” can generally refer to a nucleic acid or polypeptide sequence that is not found in a native nucleic acid or protein. Non-native may refer to affinity tags. Non-native may refer to fusions. Non-native may refer to a naturally occurring nucleic acid or polypeptide sequence that comprises mutations, insertions and/or deletions. A non-native sequence may exhibit and/or encode for an activity (e.g., enzymatic activity, methyltransferase activity, acetyltransferase activity, kinase activity, ubiquitinating activity, etc.) that may also be exhibited by the nucleic acid and/or polypeptide sequence to which the non-native sequence is fused. A non-native nucleic acid or polypeptide sequence may be linked to a naturally-occurring nucleic acid or polypeptide sequence (or a variant thereof) by genetic engineering to generate a chimeric nucleic acid and/or polypeptide sequence encoding a chimeric nucleic acid and/or polypeptide.

[0182] The term “promoter”, as used herein, generally refers to the regulatory DNA region which controls transcription or expression of a gene and which may be located adjacent to or overlapping a nucleotide or region of nucleotides at which RNA transcription is initiated. A promoter may contain specific DNA sequences which bind protein factors, often referred to as transcription factors, which facilitate binding of RNA polymerase to the DNA leading to gene transcription. A ‘basal promoter’, also referred to as a ‘core promoter’, may generally refer to a promoter that contains all the basic necessary elements to promote transcriptional expression of an operably linked polynucleotide. Eukaryotic basal promoters typically, though not necessarily, contain a TATA-box and/or a CAAT box.

[0183] The term “expression”, as used herein, generally refers to the process by which a nucleic acid sequence or a polynucleotide is transcribed from a DNA template (such as into mRNA or other RNA transcript) and/or the process by which a transcribed mRNA is subsequently translated into peptides, polypeptides, or proteins. Transcripts and encoded polypeptides may be collectively referred to as “gene product.” If the polynucleotide is derived from genomic DNA, expression may include splicing of the mRNA in a eukaryotic cell.

[0184] As used herein, “operably linked”, “operable linkage”, “operatively linked”, or grammatical equivalents thereof generally refer to juxtaposition of genetic elements, e.g., a promoter, an enhancer, a polyadenylation sequence, etc., wherein the elements are in a relationship permitting them to operate in the expected manner. For instance, a regulatory element, which may comprise promoter and/or enhancer sequences, is operatively linked to a coding region if the regulatory element helps initiate transcription of the coding sequence. There may be intervening residues between the regulatory element and coding region so long as this functional relationship is maintained.

[0185] A “vector” as used herein, generally refers to a macromolecule or association of macromolecules that comprises or associates with a polynucleotide and which may be used to mediate delivery of the polynucleotide to a cell. Examples of vectors include plasmids, viral vectors, liposomes, and other gene delivery vehicles. The vector generally comprises genetic elements, e.g., regulatory elements, operatively linked to a gene to facilitate expression of the gene in a target.

[0186] As used herein, “an expression cassette” and “a nucleic acid cassette” are used interchangeably generally to refer to a combination of nucleic acid sequences or elements that are expressed together or are operably linked for expression. In some cases, an expression cassette refers to the combination of regulatory elements and a gene or genes to which they are operably linked for expression.

[0187] A “functional fragment” of a DNA or protein sequence generally refers to a fragment that retains a biological activity (either functional or structural) that is substantially similar to a biological activity of the full-length DNA or protein sequence. A biological activity of a DNA sequence may be its ability to influence expression in a manner known to be attributed to the full-length sequence.

[0188] As used herein, an “engineered” object generally indicates that the object has been modified by human intervention. According to non-limiting examples: a nucleic acid may be modified by changing its sequence to a sequence that does not occur in nature; a nucleic acid may be modified by ligating it to a nucleic acid that it does not associate with in nature such that the ligated product possesses a function not present in the original nucleic acid; an engineered nucleic acid may synthesized in vitro with a sequence that does not exist in nature; a protein may be modified by changing its amino acid sequence to a sequence that does not exist in nature; an engineered protein may acquire a new function or property. An “engineered” system comprises at least one engineered component.

[0189] As used herein, “synthetic” and “artificial” can generally be used interchangeably to refer to a protein or a domain thereof that has low sequence identity (e.g., less than 50% sequence identity, less than 25% sequence identity, less than 10% sequence identity, less than 5% sequence identity, less than 1% sequence identity) to a naturally occurring human protein. For example, VPR and VP64 domains are synthetic transactivation domains.

[0190] As used herein, the term “Cas12a” generally refers to a family of Cas endonucleases that are class 2, Type V-A Cas endonucleases and that (a) use a relatively small guide RNA (about 42-44 nucleotides) that is processed by the nuclease itself following transcription from the CRISPR array, and (b) cleave DNA to leave staggered cut sites. Further features of this family of enzymes can be found, e.g. in Zetsche B, Heidenreich M, Mohanraju P, et al. Nat Biotechnol 2017; 35:31-34, and Zetsche B, Gootenberg J S, Abudayyeh O O, et al. Cell 2015; 163:759-771, which are incorporated by reference herein.

[0191] As used herein, a “guide nucleic acid” can generally refer to a nucleic acid that may hybridize to another nucleic acid. A guide nucleic acid may be RNA. A guide nucleic acid may be DNA. The guide nucleic acid may be programmed to bind to a sequence of nucleic acid site-specifically. The nucleic acid to be targeted, or the target nucleic acid, may comprise nucleotides. The guide nucleic acid may comprise nucleotides. A portion of the target nucleic acid may be complementary to a portion of the guide nucleic acid. The strand of a double-stranded target polynucleotide that is complementary to and hybridizes with the guide nucleic acid may be called the complementary strand. The strand of the double-stranded target polynucleotide that is complementary to the complementary strand, and therefore may not be complementary to the guide nucleic acid may be called noncomplementary strand. A guide nucleic acid may comprise a polynucleotide chain and can be called a “single guide nucleic acid.” A guide nucleic acid may comprise two polynucleotide chains and may be called a “double guide nucleic acid.” If not otherwise specified, the term “guide nucleic acid” may be inclusive, referring to both single guide nucleic acids and double guide nucleic acids. A guide nucleic acid may comprise a segment that can be referred to as a “nucleic acid-targeting segment” or a “nucleic acid-targeting sequence” or “spacer sequence.” A nucleic acid-targeting segment may comprise a sub-segment that may be referred to as a “protein binding segment” or “protein binding sequence” or “Cas protein binding segment”.

[0192] The term “sequence identity” or “percent identity” in the context of two or more nucleic acids or polypeptide sequences, generally refers to two (e.g., in a pairwise alignment) or more (e.g., in a multiple sequence alignment) sequences that are the same or have a specified percentage of amino acid residues or nucleotides that are the same, when compared and aligned for maximum correspondence over a local or global comparison window, as measured using a sequence comparison algorithm. Suitable sequence comparison algorithms for polypeptide sequences include, e.g., BLASTP using parameters of a wordlength (W) of 3, an expectation (E) of 10, and the BLOSUM62 scoring matrix setting gap costs at existence of 11, extension of 1, and using a conditional compositional score matrix adjustment for polypeptide sequences longer than 30 residues; BLASTP using parameters of a wordlength (W) of 2, an expectation (E) of 1000000, and the PAM30 scoring matrix setting gap costs at 9 to open gaps and 1 to extend gaps for sequences of less than 30 residues (these are the default parameters for BLASTP in the BLAST suite available at https://blast.ncbi.nlm.nih.gov); CLUSTALW with the Smith-Waterman homology search algorithm parameters with a match of 2, a mismatch of −1, and a gap of −1; MUSCLE with default parameters; MAFFT with parameters of a retree of 2 and max iterations of 1000; Novafold with default parameters; HMMER hmmalign with default parameters.

[0193] The term “optimally aligned” in the context of two or more nucleic acids or polypeptide sequences, generally refers to two (e.g., in a pairwise alignment) or more (e.g., in a multiple sequence alignment) sequences that have been aligned to maximal correspondence of amino acids residues or nucleotides, for example, as determined by the alignment producing a highest or “optimized” percent identity score.

[0194] Included in the current disclosure are variants of any of the enzymes described herein with one or more conservative amino acid substitutions. Such conservative substitutions can be made in the amino acid sequence of a polypeptide without disrupting the three-dimensional structure or function of the polypeptide. Conservative substitutions can be accomplished by substituting amino acids with similar hydrophobicity, polarity, and R chain length for one another. Additionally, or alternatively, by comparing aligned sequences of homologous proteins from different species, conservative substitutions can be identified by locating amino acid residues that have been mutated between species (e.g., non-conserved residues) without altering the basic functions of the encoded proteins. Such conservatively substituted variants may include variants with at least about 20%, at least about 25%, at least about 30%, at least about 35%, at least about 40%, at least about 45%, at least about 50%, at least about 55%, at least about 60%, at least about 65%, at least about 70%, at least about 75%, at least about 80%, at least about 85%, at least about 90%, at least about 91%, at least about 92%, at least about 93%, at least about 94%, at least about 95%, at least about 96%, at least about 97%, at least about 98%, at least about 99% identity to any one of the endonuclease protein sequences described herein (e.g. MG11, MG13, MG26, MG28, MG29, MG30, MG31, MG32, MG37, MG53, MG54, MG55, MG56, MG57, MG58, MG59, MG60, MG61, MG62, MG70, MG82, MG83, MG84 or MG85 family endonucleases described herein, or any other family nuclease described herein). In some embodiments, such conservatively substituted variants are functional variants. Such functional variants can encompass sequences with substitutions such that the activity of one or more critical active site residues or guide RNA binding residues of the endonuclease are not disrupted. In some embodiments, a functional variant of any of the proteins described herein lacks substitution of at least one of the conserved or functional residues called out in FIG. 17, 18, 10, 20, or 25 or a residue described in Table 1B. In some embodiments, a functional variant of any of the proteins described herein lacks substitution of all of the conserved or functional residues called out in FIG. 17, 18, 10, 20, or 25 or a residue described in Table 1B.

[0195] Also included in the current disclosure are variants of any of the enzymes described herein with substitution of one or more catalytic residues to decrease or eliminate activity of the enzyme (e.g. decreased-activity variants). In some embodiments, a decreased activity variant as a protein described herein comprises a disrupting substitution of at least one, at least two, or all three catalytic residues identified in Table 1B.

[0196] Conservative substitution tables providing functionally similar amino acids are available from a variety of references (see, for e.g., Creighton, Proteins: Structures and Molecular Properties (W H Freeman & Co.; 2nd edition (December 1993)). The following eight groups each contain amino acids that are conservative substitutions for one another:

[0197] 1) Alanine (A), Glycine (G);

[0198] 2) Aspartic acid (D), Glutamic acid (E);

[0199] 3) Asparagine (N), Glutamine (Q);

[0200] 4) Arginine (R), Lysine (K);

[0201] 5) Isoleucine (I), Leucine (L), Methionine (M), Valine (V);

[0202] 6) Phenylalanine (F), Tyrosine (Y), Tryptophan (W);

[0203] 7) Serine (S), Threonine (T); and

[0204] 8) Cysteine (C), Methionine (M)

### Overview

[0205] The discovery of new Cas enzymes with unique functionality and structure may offer the potential to further disrupt deoxyribonucleic acid (DNA) editing technologies, improving speed, specificity, functionality, and ease of use. Relative to the predicted prevalence of Clustered Regularly Interspaced Short Palindromic Repeats (CRISPR) systems in microbes and the sheer diversity of microbial species, relatively few functionally characterized CRISPR/Cas enzymes exist in the literature. This is partly because a huge number of microbial species may not be readily cultivated in laboratory conditions. Metagenomic sequencing from natural environmental niches containing large numbers of microbial species may offer the potential to drastically increase the number of new CRISPR/Cas systems known and speed the discovery of new oligonucleotide editing functionalities. A recent example of the fruitfulness of such an approach is demonstrated by the 2016 discovery of CasX/CasY CRISPR systems from metagenomic analysis of natural microbial communities.

[0206] CRISPR/Cas systems are RNA-directed nuclease complexes that have been described to function as an adaptive immune system in microbes. In their natural context, CRISPR/Cas systems occur in CRISPR (clustered regularly interspaced short palindromic repeats) operons or loci, which generally comprise two parts: (i) an array of short repetitive sequences (30-40 bp) separated by equally short spacer sequences, which encode the RNA-based targeting element; and (ii) ORFs encoding the Cas encoding the nuclease polypeptide directed by the RNA-based targeting element alongside accessory proteins/enzymes. Efficient nuclease targeting of a particular target nucleic acid sequence generally requires both (i) complementary hybridization between the first 6-8 nucleic acids of the target (the target seed) and the crRNA guide; and (ii) the presence of a protospacer-adjacent motif (PAM) sequence within a defined vicinity of the target seed (the PAM usually being a sequence not commonly represented within the host genome). Depending on the exact function and organization of the system, CRISPR-Cas systems are commonly organized into 2 classes, 5 types and 16 subtypes based on shared functional characteristics and evolutionary similarity (see FIG. 1).

[0207] Class I CRISPR-Cas systems have large, multi-subunit effector complexes, and comprise Types I, III, and IV. Class II CRISPR-Cas systems generally have single-polypeptide multidomain nuclease effectors, and comprise Types II, V and VI.

[0208] Type II CRISPR-Cas systems are considered the simplest in terms of components. In Type II CRISPR-Cas systems, the processing of the CRISPR array into mature crRNAs does not require the presence of a special endonuclease subunit, but rather a small trans-encoded crRNA (tracrRNA) with a region complementary to the array repeat sequence; the tracrRNA interacts with both its corresponding effector nuclease (e.g. Cas9) and the repeat sequence to form a precursor dsRNA structure, which is cleaved by endogenous RNAse III to generate a mature effector enzyme loaded with both tracrRNA and crRNA. Cas II nucleases are known as DNA nucleases. Type 2 effectors generally exhibit a structure consisting of a RuvC-like endonuclease domain that adopts the RNase H fold with an unrelated HNH nuclease domain inserted within the folds of the RuvC-like nuclease domain. The RuvC-like domain is responsible for the cleavage of the target (e.g., crRNA complementary) DNA strand, while the HNH domain is responsible for cleavage of the displaced DNA strand.

[0209] Type V CRISPR-Cas systems are characterized by a nuclease effector (e.g. Cas12) structure similar to that of Type II effectors, comprising a RuvC-like domain. Similar to Type II, most (but not all) Type V CRISPR systems use a tracrRNA to process pre-crRNAs into mature crRNAs; however, unlike Type II systems which requires RNAse III to cleave the pre-crRNA into multiple crRNAs, type V systems are capable of using the effector nuclease itself to cleave pre-crRNAs. Like Type-II CRISPR-Cas systems, Type V CRISPR-Cas systems are again known as DNA nucleases. Unlike Type II CRISPR-Cas systems, some Type V enzymes (e.g., Cas12a) appear to have a robust single-stranded nonspecific deoxyribonuclease activity that is activated by the first crRNA directed cleavage of a double-stranded target sequence.

[0210] CRISPR-Cas systems have emerged in recent years as the gene editing technology of choice due to their targetability and ease of use. The most commonly used systems are the Class 2 Type II SpCas9 and the Class 2 Type V-A Cas12a (previously Cpf1). The Type V-A systems in particular are becoming more widely used since their reported specificity in cells is higher than other nucleases, with fewer or no off-target effects. The V-A systems are also advantageous in that the guide RNA is small (42-44 nucleotides compared with approximately 100 nt for SpCas9) and is processed by the nuclease itself following transcription from the CRISPR array, simplifying multiplexed applications with multiple gene edits. Furthermore, the V-A systems have staggered cut sites, which may facilitate directed repair pathways, such as microhomology-dependent targeted integration (MITI).

[0211] The most commonly used Type V-A enzymes require a 5′ protospacer adjacent motif (PAM) next to the chosen target site: 5′-TTTV-3′ for Lachnospiraceae bacterium ND2006 LbCas12a and Acidaminococcus sp. AsCas12a; and 5′-TTV-3′ for Francisella novicida FnCas12a. Recent exploration of orthologs has revealed proteins with less restrictive PAM sequences that are also active in mammalian cell culture, for example YTV, YYN or TTN. However, these enzymes do not fully encompass V-A biodiversity and targetability, and may not represent all possible activities and PAM sequence requirements. Here, thousands of genomic fragments were mined from numerous metagenomes for Type V-A nucleases. The known diversity of V-A enzymes may have been expanded and novel systems may have been developed into highly targetable, compact, and precise gene editing agents.

### MG Enzymes

[0212] Type V-A CRISPR systems are quickly being adopted for use in a variety of genome editing applications. These programmable nucleases are part of adaptive microbial immune systems, the natural diversity of which has been largely unexplored. Novel families of Type V-A CRISPR enzymes were identified through a large-scale analysis of metagenomes collected from a variety of complex environments, and developed representatives of these systems into gene-editing platforms. The nucleases are phylogenetically diverse (see FIG. 4A) and recognize a single guide RNA with specific motifs. The majority of these systems come from uncultivated organisms, some of which encode a divergent Type V effector within the same CRISPR operon. Biochemical analysis uncovered unexpected PAM diversity (see FIG. 4B), indicating that these systems will facilitate a variety of genome engineering applications. The simplicity of guide sequences and activity in human cell lines suggest utility in gene and cell therapies.

[0213] In some aspects, the present disclosure provides for novel Type V-L candidates (see FIG. 27). Type V-L may be a novel subtype and some sub-families may have been identified. These nucleases are about 1000-1100 amino acids in length. Type V-L may be found in the same CRISPR locus as Type V-A effectors. RuvC catalytic residues may have been identified for Type V-L candidates and these Type V-L candidates may not require tracrRNA. One example of a Type V-L are the MG60 nucleases described herein (see FIG. 28 and FIG. 32).

[0214] In some aspects, the present disclosure provides for smaller Type V effectors (see FIG. 30). Such effectors may be small putative effectors. These effectors may simplify delivery and may extend therapeutic applications.

[0215] In some aspects, the present disclosure provides for novel type V effector. Such an effector may be MG70 as described herein (see FIG. 29). MG70 may be an ultra-small enzyme of about 373 amino acids in length. MG 70 may have a single transposase domain at the N-terminus and may have a predicted tracrRNA (see FIG. 30 and FIG. 32).

[0216] In some aspects, the present disclosure provides for a smaller Type V effector (see FIG. 31). Such an effector may be MG81 described herein. MG81 may be about 500-700 amino acids in length and may contain RuvC, and HTH DNA binding domains.

[0217] In one aspect, the present disclosure provides for an engineered nuclease system discovered through metagenomic sequencing. In some cases, the metagenomic sequencing is conducted on samples. In some cases, the samples may be collected from a variety of environments. Such environments may be a human microbiome, an animal microbiome, environments with high temperatures, environments with low temperatures. Such environments may include sediment. An example of the types of such environments of the engineered nuclease systems described herein may be found in FIG. 2.

[0218] In one aspect, the present disclosure provides for an engineered nuclease system comprising (a) an endonuclease. In some cases, the endonuclease is a Cas endonuclease. In some cases, the endonuclease is a class 2, type V Cas endonuclease. In some cases, the endonuclease is a class 2, type V-A Cas endonuclease. In some cases, the endonuclease is derived from an uncultivated microorganism. The endonuclease may comprise a RuvC domain. In some cases, the engineered nuclease system comprises (b) an engineered guide RNA. In some cases, the engineered guide RNA is configured to form a complex with the endonuclease. In some cases, the engineered guide RNA comprises a spacer sequence. In some cases, the spacer sequence is configured to hybridize to a target nucleic acid sequence.

[0219] In one aspect, the present disclosure provides for an engineered nuclease system comprising (a) an endonuclease. In some cases, the endonuclease has at least about 70% sequence identity to any one of SEQ ID NOs: 1-3470. In some cases, the endonuclease has at least about 20%, at least about 25%, at least about 30%, at least about 35%, at least about 40%, at least about 45%, at least about 50%, at least about 55%, at least about 60%, at least about 65%, at least about 70%, at least about 75%, at least about 80%, at least about 85%, at least about 90%, at least about 91%, at least about 92%, at least about 93%, at least about 94%, at least about 95%, at least about 96%, at least about 97%, at least about 98%, or at least about 99% identity to any one of SEQ ID NOs: 1-3470.

[0220] In some cases, the endonuclease comprises a variant having at least about 20%, at least about 25%, at least about 30%, at least about 35%, at least about 40%, at least about 45%, at least about 50%, at least about 55%, at least about 60%, at least about 65%, at least about 70%, at least about 75%, at least about 80%, at least about 85%, at least about 90%, at least about 91%, at least about 92%, at least about 93%, at least about 94%, at least about 95%, at least about 96%, at least about 97%, at least about 98%, or at least about 99% identity to any one of SEQ ID NOs: 1-3470. In some cases, the endonuclease may be substantially identical to any one of SEQ ID NOs: 1-3470.

[0221] In some cases, the engineered nuclease system comprises an engineered guide RNA. In some cases, the engineered guide RNA is configured to form a complex with the endonuclease. In some cases, the engineered guide RNA comprises a spacer sequence. In some cases, the spacer sequence is configured to hybridize to a target nucleic acid sequence.

[0222] In one aspect, the present disclosure provides an engineered nuclease system comprising (a) an endonuclease. In some cases, the endonuclease is configured to bind to a protospacer adjacent motif (PAM) sequence. In some cases, the PAM sequence is substantially identical to any one of SEQ ID NOs: 3863-3913. In some cases, the PAM sequence any one of SEQ ID NOs: 3863-3913. In some cases, the endonuclease is a Cas endonuclease. In some cases, the endonuclease is a class 2 Cas endonuclease. In some cases, the endonuclease is a class 2, type V Cas endonuclease. In some cases, the endonuclease is a class 2, type V-A Cas endonuclease. In some cases, the engineered nuclease system comprises (b) an engineered guide RNA. In some cases, the engineered guide RNA is configured to form a complex with the endonuclease. In some cases, the engineered guide RNA comprises a spacer sequence. In some cases, the spacer sequence is configured to hybridize to a target nucleic acid sequence.

[0223] In some cases, the endonuclease is not a Cpf1 or Cms1 endonuclease. In some cases, the endonuclease further comprises a zinc finger-like domain.

[0224] In some cases, the guide RNA comprises a sequence with at least 80% sequence identity to the first 19 nucleotides or the non-degenerate nucleotides of SEQ ID NO: 3471, 3539, 3551-3559, 3608-3609, 3612, 3636-3637, 3640-3641, 3644-3645, 3648-3649, 3652-3653, 3656-3657, 3660-3661, 3664-3667, 3671-3672, 3677-3678, 3695-3696, 3729-3730, 3734-3735, or 3851-3857. In some cases, the guide RNA comprises a sequence with at least about 20%, at least about 25%, at least about 30%, at least about 35%, at least about 40%, at least about 45%, at least about 50%, at least about 55%, at least about 60%, at least about 65%, at least about 70%, at least about 75%, at least about 80%, at least about 85%, at least about 90%, at least about 91%, at least about 92%, at least about 93%, at least about 94%, at least about 95%, at least about 96%, at least about 97%, at least about 98%, or at least about 99% identity to the first 19 nucleotides or the non-degenerate nucleotides of SEQ ID NO: 3471, 3539, 3551-3559, 3608-3609, 3612, 3636-3637, 3640-3641, 3644-3645, 3648-3649, 3652-3653, 3656-3657, 3660-3661, 3664-3667, 3671-3672, 3677-3678, 3695-3696, 3729-3730, 3734-3735, or 3851-3857. In some cases, the guide RNA comprises a variant having at least about 20%, at least about 25%, at least about 30%, at least about 35%, at least about 40%, at least about 45%, at least about 50%, at least about 55%, at least about 60%, at least about 65%, at least about 70%, at least about 75%, at least about 80%, at least about 85%, at least about 90%, at least about 91%, at least about 92%, at least about 93%, at least about 94%, at least about 95%, at least about 96%, at least about 97%, at least about 98%, or at least about 99% identity to the first 19 nucleotides or the non-degenerate nucleotides of SEQ ID NO: 3471, 3539, 3551-3559, 3608-3609, 3612, 3636-3637, 3640-3641, 3644-3645, 3648-3649, 3652-3653, 3656-3657, 3660-3661, 3664-3667, 3671-3672, 3677-3678, 3695-3696, 3729-3730, 3734-3735, or 3851-3857. In some cases, the guide RNA comprises a sequence which is substantially identical to the first 19 nucleotides or the non-degenerate nucleotides of SEQ ID NO: 3471, 3539, 3551-3559, 3608-3609, 3612, 3636-3637, 3640-3641, 3644-3645, 3648-3649, 3652-3653, 3656-3657, 3660-3661, 3664-3667, 3671-3672, 3677-3678, 3695-3696, 3729-3730, 3734-3735, or 3851-3857.

[0225] In some cases, the guide RNA comprises a sequence with at least about 20%, at least about 25%, at least about 30%, at least about 35%, at least about 40%, at least about 45%, at least about 50%, at least about 55%, at least about 60%, at least about 65%, at least about 70%, at least about 75%, at least about 80%, at least about 85%, at least about 90%, at least about 91%, at least about 92%, at least about 93%, at least about 94%, at least about 95%, at least about 96%, at least about 97%, at least about 98%, or at least about 99% identity to the first 19 nucleotides or the non-degenerate nucleotides of SEQ ID NO: 3471, 3539, 3551-3559, 3608-3609, 3612, 3636-3637, 3640-3641, 3644-3645, 3648-3649, 3652-3653, 3656-3657, 3660-3661, 3664-3667, 3671-3672, 3677-3678, 3695-3696, 3729-3730, 3734-3735, or 3851-3857. In some cases, the endonuclease is configured to bind to the engineered guide RNA. In some cases, the Cas endonuclease is configured to bind to the engineered guide RNA. In some cases, the class 2 Cas endonuclease is configured to bind to the engineered guide RNA. In some cases, the class 2, type V Cas endonuclease is configured to bind to the engineered guide RNA. In some cases, the class 2, type V-A Cas endonuclease is configured to bind to the engineered guide RNA.

[0226] In some cases, the endonuclease is configured to bind to a protospacer adjacent motif (PAM) sequence comprising any one of SEQ ID NOs: 3863-3913.

[0227] In some cases, the guide RNA comprises a sequence complementary to a eukaryotic, fungal, plant, mammalian, or human genomic polynucleotide sequence. In some cases, the guide RNA comprises a sequence complementary to a eukaryotic genomic polynucleotide sequence. In some cases, the guide RNA comprises a sequence complementary to a fungal genomic polynucleotide sequence. In some cases, the guide RNA comprises a sequence complementary to a plant genomic polynucleotide sequence. In some cases, the guide RNA comprises a sequence complementary to a mammalian genomic polynucleotide sequence. In some cases, the guide RNA comprises a sequence complementary to a human genomic polynucleotide sequence.

[0228] In some cases, the guide RNA is 30-250 nucleotides in length. In some cases, the guide RNA is 42-44 nucleotides in length. In some cases, the guide RNA is 42 nucleotides in length. In some cases, the guide RNA is 43 nucleotides in length. In some cases, the guide RNA is 44 nucleotides in length. In some cases, the guide RNA is 85-245 nucleotides in length. In some cases, the guide RNA is more than 90 nucleotides in length. In some cases, the guide RNA is less than 245 nucleotides in length.

[0229] In some cases, the endonuclease may comprise a variant having one or more nuclear localization sequences (NLSs). The NLS may be proximal to the N- or C-terminus of the endonuclease. The NLS may be appended N-terminal or C-terminal to any one of SEQ ID NOs: 3938-3953, or to a variant having at least about 20%, at least about 25%, at least about 30%, at least about 35%, at least about 40%, at least about 45%, at least about 50%, at least about 55%, at least about 60%, at least about 65%, at least about 70%, at least about 75%, at least about 80%, at least about 85%, at least about 90%, at least about 91%, at least about 92%, at least about 93%, at least about 94%, at least about 95%, at least about 96%, at least about 97%, at least about 98%, or at least about 99% identity to any one of SEQ ID NOs: 3938-3953. In some cases, the NLS may comprise a sequence substantially identical to any one of SEQ ID NOs: 3938-3953.

TABLE 1
Example NLS Sequences that may be used
with Cas Effectors according to the
disclosure.

| | | SEQ |
|---|---|---|
| | NLS amino acid | ID |
| Source | sequence | NO: |
| SV40 | PKKKRKV | 3938 |
| nuclcoplasmin | KRPAATKKAGQAKK | 3939 |
| bipartite NLS | KK | |
| c-myc NLS | PAAKRVKLD | 3940 |
| c-myc NLS | RQRRNELKRSP | 3941 |
| hRNPA1 M9NLS | NQSSNFGPMKGGNF | 3942 |
| | GGRSSGPYGGGGQY | |
| | FAKPRNQGGY | |
| Importin-alpha | RMRIZFKNKGKDTA | 3943 |
| IBB | ELRRRRVEVSVELR | |
| domain | KAKKDEQILKRRNV | |
| Myoma T protein | VSRKRPRP | 3944 |
| Myoma T protein | PPKKARED | 3945 |
| p53 | PQPKKKPL | 3946 |
| mouse c-ab1 IV | SALIKKKKKMAP | 3947 |
| influenza virus | DRLRR | 3948 |
| NS1 | | |
| influenza virus | PKQKKRK | 3949 |
| NS1 | | |
| Hepatitis virus | RKLKKKIKKL | 3950 |
| delta | | |
| antigen | | |
| mouse Mx1 protein | REKKKFLKRR | 3951 |
| human poly(ADP- | KRKGDEVDGVDEVA | 3952 |
| ribose) polymerase | KKKSKK | |
| steroid hormone | RKCLQAGMNLEARK | 3953 |
| receptors (human) | TKK | |
| glucocorticoid | | |

[0230] In some cases, the engineered nuclease system further comprises a single- or double stranded DNA repair template. In some cases, the engineered nuclease system further comprises a single-stranded DNA repair template. In some cases, the engineered nuclease system further comprises a double-stranded DNA repair template. In some cases, the single- or double-stranded DNA repair template may comprise from 5′ to 3′: a first homology arm comprising a sequence of at least 20 nucleotides 5′ to said target deoxyribonucleic acid sequence, a synthetic DNA sequence of at least 10 nucleotides, and a second homology arm comprising a sequence of at least 20 nucleotides 3′ to said target sequence.

[0231] In some cases, the first homology arm comprises a sequence of at least 40, at least 50, at least 60, at least 70, at least 80, at least 90, at least 100, at least 110, at least 120, at least 130, at least 140, at least 150, at least 175, at least 200, at least 250, at least 300, at least 400, at least 500, at least 750, or at least 1000 nucleotides. In some cases, the second homology arm comprises a sequence of at least 40, at least 50, at least 60, at least 70, at least 80, at least 90, at least 100, at least 110, at least 120, at least 130, at least 140, at least 150, at least 175, at least 200, at least 250, at least 300, at least 400, at least 500, at least 750, or at least 1000 nucleotides.

[0232] In some cases, the first and second homology arms are homologous to a genomic sequence of a prokaryote. In some cases, the first and second homology arms are homologous to a genomic sequence of a bacteria. In some cases, the first and second homology arms are homologous to a genomic sequence of a fungus. In some cases, the first and second homology arms are homologous to a genomic sequence of a eukaryote.

[0233] In some cases, the engineered nuclease system further comprises a DNA repair template. The DNA repair template may comprise a double-stranded DNA segment. The double-stranded DNA segment may be flanked by one single-stranded DNA segment. The double-stranded DNA segment may be flanked by two single-stranded DNA segments. In some cases, the single-stranded DNA segments are conjugated to the 5′ ends of the double-stranded DNA segment. In some cases, the single stranded DNA segments are conjugated to the 3′ ends of the double-stranded DNA segment.

[0234] In some cases, the single-stranded DNA segments have a length from 1 to 15 nucleotide bases. In some cases, the single-stranded DNA segments have a length from 4 to 10 nucleotide bases. In some cases, the single-stranded DNA segments have a length of 4 nucleotide bases. In some cases, the single-stranded DNA segments have a length of 5 nucleotide bases. In some cases, the single-stranded DNA segments have a length of 6 nucleotide bases. In some cases, the single-stranded DNA segments have a length of 7 nucleotide bases. In some cases, the single-stranded DNA segments have a length of 8 nucleotide bases. In some cases, the single-stranded DNA segments have a length of 9 nucleotide bases. In some cases, the single-stranded DNA segments have a length of 10 nucleotide bases.

[0235] In some cases, the single-stranded DNA segments have a nucleotide sequence complementary to a sequence within the spacer sequence. In some cases, the double-stranded DNA sequence comprises a barcode, an open reading frame, an enhancer, a promoter, a protein-coding sequence, a miRNA coding sequence, an RNA coding sequence, or a transgene.

[0236] In some cases, the engineered nuclease system further comprises a source of Mg²⁺.

[0237] In some cases, the guide RNA comprises a hairpin comprising at least 8 base-paired ribonucleotides. In some cases, the guide RNA comprises a hairpin comprising at least 9 base-paired ribonucleotides. In some cases, the guide RNA comprises a hairpin comprising at least 10 base-paired ribonucleotides. In some cases, the guide RNA comprises a hairpin comprising at least 11 base-paired ribonucleotides. In some cases, the guide RNA comprises a hairpin comprising at least 12 base-paired ribonucleotides.

[0238] In some cases, the endonuclease comprises a sequence at least 70% identical to a variant of any one of SEQ ID NOs: 141, 215, 229, 261, or 1711-1721 or a variant thereof 141, 215, 229, 261, or 1711-1721 or a variant thereof. In some cases, the endonuclease comprises a sequence at least 75% identical to a variant of any one of SEQ ID NOs: 141, 215, 229, 261, or 1711-1721 or a variant thereof. In some cases, the endonuclease comprises a sequence at least 80% identical to a variant of any one of SEQ ID NOs: 141, 215, 229, 261, or 1711-1721 or a variant thereof. In some cases, the endonuclease comprises a sequence at least 85% identical to a variant of any one of SEQ ID NOs: 141, 215, 229, 261, or 1711-1721 or a variant thereof. In some cases, the endonuclease comprises a sequence at least 90% identical to a variant of any one of SEQ ID NOs: 141, 215, 229, 261, or 1711-1721 or a variant thereof. In some cases, the endonuclease comprises a sequence at least 95% identical to a variant of any one of SEQ ID NOs: 141, 215, 229, 261, or 1711-1721 or a variant thereof.

[0239] In some cases, the guide RNA structure comprises a sequence of at least 70% identical to the first 19 nucleotides or the non-degenerate nucleotides of SEQ ID NO: 3608. In some cases, the guide RNA structure comprises a sequence of at least 75% identical to the first 19 nucleotides or the non-degenerate nucleotides of SEQ ID NO: 3608. In some cases, the guide RNA structure comprises a sequence of at least 80% identical to the first 19 nucleotides or the non-degenerate nucleotides of SEQ ID NO: 3608. In some cases, the guide RNA structure comprises a sequence of at least 85% identical to the first 19 nucleotides or the non-degenerate nucleotides of SEQ ID NO: 3608. In some cases, the guide RNA structure comprises a sequence of at least 90% identical to the first 19 nucleotides or the non-degenerate nucleotides of SEQ ID NO: 3608. In some cases, the guide RNA structure comprises a sequence of at least 95% identical to the first 19 nucleotides or the non-degenerate nucleotides of SEQ ID NO: 3608. In some cases, the endonuclease is configured to bind to a PAM comprising any one of SEQ ID NOs: 3863-3913.

[0240] In some cases, sequence may be determined by a BLASTP, CLUSTALW, MUSCLE, or MAFFT algorithm, or a CLUSTALW algorithm with the Smith-Waterman homology search algorithm parameters. The sequence identity may be determined by said BLASTP homology search algorithm using parameters of a wordlength (W) of 3, an expectation (E) of 10, and a BLOSUM62 scoring matrix setting gap costs at existence of 11, extension of 1, and using a conditional compositional score matrix adjustment.

[0241] In one aspect, the present disclosure provides an engineered guide RNA comprising (a) a DNA-targeting segment. In some cases, the DNA-targeting segment comprises a nucleotide sequence that is complementary to a target sequence. In some cases, the target sequence is in a target DNA molecule. In some cases, the engineered guide RNA comprises (b) a protein-binding segment. In some cases, the protein-binding segment comprises two complementary stretches of nucleotides. In some cases, the two complementary stretches of nucleotides hybridize to form a double-stranded RNA (dsRNA) duplex. In some cases, the two complementary stretches of nucleotides are covalently linked to one another with intervening nucleotides. In some cases, the engineered guide ribonucleic acid polynucleotide is capable of forming a complex with an endonuclease. In some cases, the endonuclease has at least about 20%, at least about 25%, at least about 30%, at least about 35%, at least about 40%, at least about 45%, at least about 50%, at least about 55%, at least about 60%, at least about 65%, at least about 70%, at least about 75%, at least about 80%, at least about 85%, at least about 90%, at least about 91%, at least about 92%, at least about 93%, at least about 94%, at least about 95%, at least about 96%, at least about 97%, at least about 98%, or at least about 99% identity to any one of SEQ ID NOs: 1-3470. In some cases, the complex targets the target sequence of the target DNA molecule.

[0242] In some cases, the DNA-targeting segment is positioned 3′ of both of the two complementary stretches of nucleotides. In some cases, the protein binding segment comprising a sequence having at least about 20%, at least about 25%, at least about 30%, at least about 35%, at least about 40%, at least about 45%, at least about 50%, at least about 55%, at least about 60%, at least about 65%, at least about 70%, at least about 75%, at least about 80%, at least about 85%, at least about 90%, at least about 91%, at least about 92%, at least about 93%, at least about 94%, at least about 95%, at least about 96%, at least about 97%, at least about 98%, or at least about 99% identity to the first 19 nucleotides or the non-degenerate nucleotides of SEQ ID NO: 3608.

[0243] In some cases, the double-stranded RNA (dsRNA) duplex comprises at least 8 ribonucleotides. In some cases, the double-stranded RNA (dsRNA) duplex comprises at least 9 ribonucleotides. In some cases, the double-stranded RNA (dsRNA) duplex comprises at least 10 ribonucleotides. In some cases, the double-stranded RNA (dsRNA) duplex comprises at least 11 ribonucleotides. In some cases, the double-stranded RNA (dsRNA) duplex comprises at least 12 ribonucleotides.

[0244] In some cases, the deoxyribonucleic acid polynucleotide encodes the engineered guide ribonucleic acid polynucleotide.

[0245] In one aspect, the present disclosure provides a nucleic acid comprising an engineered nucleic acid sequence. In some cases, the engineered nucleic acid sequence is optimized for expression in an organism. In some cases, the nucleic acid encodes an endonuclease. In some cases, the endonuclease is a Cas endonuclease. In some cases, the endonuclease is a class 2 endonuclease. In some cases, the endonuclease is a class2, type V Cas endonuclease. In some cases, the endonuclease is a class2, type V-A Cas endonuclease. In some cases, the endonuclease is derived from an uncultivated microorganism. In some cases, the organism is not the uncultivated organism.

[0246] In some cases, the endonuclease comprises a variant having at least about 20%, at least about 25%, at least about 30%, at least about 35%, at least about 40%, at least about 45%, at least about 50%, at least about 55%, at least about 60%, at least about 65%, at least about 70%, at least about 75%, at least about 80%, at least about 85%, at least about 90%, at least about 91%, at least about 92%, at least about 93%, at least about 94%, at least about 95%, at least about 96%, at least about 97%, at least about 98%, or at least about 99% sequence identity to any one of SEQ ID NOs: 1-3470.

[0247] In some cases, the endonuclease may comprise a variant having one or more nuclear localization sequences (NLSs). The NLS may be proximal to the N- or C-terminus of the endonuclease. The NLS may be appended N-terminal or C-terminal to any one of SEQ ID NOs: 3938-3953, or to a variant having at least about 20%, at least about 25%, at least about 30%, at least about 35%, at least about 40%, at least about 45%, at least about 50%, at least about 55%, at least about 60%, at least about 65%, at least about 70%, at least about 75%, at least about 80%, at least about 85%, at least about 90%, at least about 91%, at least about 92%, at least about 93%, at least about 94%, at least about 95%, at least about 96%, at least about 97%, at least about 98%, or at least about 99% sequence identity to any one of SEQ ID NOs: 3938-3953.

[0248] In some cases, the organism is prokaryotic. In some cases, the organism is bacterial. In some cases, the organism is eukaryotic. In some cases, the organism is fungal. In some cases, the organism is a plant. In some cases, the organism is mammalian. In some cases, the organism is a rodent. In some cases, the organism is human.

[0249] In one aspect, the present disclosure provides an engineered vector. In some cases, the engineered vector comprises a nucleic acid sequence encoding an endonuclease. In some cases, the endonuclease is a Cas endonuclease. In some cases, the endonuclease is a class 2 Cas endonuclease. In some cases, the endonuclease is a class 2, type V Cas endonuclease. In some cases, the endonuclease is a class2, type V-A Cas endonuclease. In some cases, the endonuclease is derived from an uncultivated microorganism.

[0250] In some cases, the engineered vector comprises a nucleic acid described herein. In some cases, the nucleic acid described herein is a deoxyribonucleic acid polynucleotide described herein. In some cases, the vector is a plasmid, a minicircle, a CELiD, an adeno-associated virus (AAV) derived virion, or a lentivirus.

[0251] In one aspect, the present disclosure provides a cell comprising a vector described herein.

[0252] In one aspect, the present disclosure provides a method of manufacturing an endonuclease. In some cases, the method comprises cultivating the cell.

[0253] In one aspect, the present disclosure provides a method for binding, cleaving, marking, or modifying a double-stranded deoxyribonucleic acid polynucleotide. The method may comprise contacting the double-stranded deoxyribonucleic acid polynucleotide with an endonuclease. In some cases, the endonuclease is a Cas endonuclease. In some cases, the endonuclease is a class 2 Cas endonuclease. In some cases, the endonuclease is a class 2, type V Cas endonuclease. In some cases, the endonuclease is a class2, type V-A Cas endonuclease. In some cases, the endonuclease is in complex with an engineered guide RNA. In some cases, the engineered guide RNA is configured to bind to the endonuclease. In some cases, the engineered guide RNA is configured to bind to the double-stranded deoxyribonucleic acid polynucleotide. In some cases, the engineered guide RNA is configured to bind to the endonuclease and to the double-stranded deoxyribonucleic acid polynucleotide. In some cases, the double-stranded deoxyribonucleic acid polynucleotide comprises a protospacer adjacent motif (PAM). In some cases, the PAM comprises a sequence comprising any one of SEQ ID NOs: 3863-3913.

[0254] In some cases, the double-stranded deoxyribonucleic acid polynucleotide comprises a first strand comprising a sequence complementary to a sequence of the engineered guide RNA and a second strand comprising the PAM. In some cases, the PAM is directly adjacent to the 5′ end of the sequence complementary to the sequence of the engineered guide RNA. In some cases, the endonuclease is not a Cpf1 endonuclease or a Cms1 endonuclease. In some cases, the endonuclease is derived from an uncultivated microorganism. In some cases, the double-stranded deoxyribonucleic acid polynucleotide is a eukaryotic, plant, fungal, mammalian, rodent, or human double-stranded deoxyribonucleic acid polynucleotide. In some cases, the PAM comprises any one of SEQ ID NOs: 3863-3913.

[0255] In one aspect, the present disclosure provides a method of modifying a target nucleic acid locus. The method may comprise delivering to the target nucleic acid locus the engineered nuclease system described herein. In some cases, the endonuclease is configured to form a complex with the engineered guide ribonucleic acid structure. In some cases, the complex is configured such that upon binding of the complex to the target nucleic acid locus, the complex modifies the target nucleic acid locus.

[0256] In some cases, modifying the target nucleic acid locus comprises binding, nicking, cleaving, or marking said target nucleic acid locus. In some cases, the target nucleic acid locus comprises deoxyribonucleic acid (DNA) or ribonucleic acid (RNA). In some cases, the target nucleic acid comprises genomic DNA, viral DNA, viral RNA, or bacterial DNA. In some cases, the target nucleic acid locus is in vitro. In some cases, the target nucleic acid locus is within a cell. In some cases, the cell is a prokaryotic cell, a bacterial cell, a eukaryotic cell, a fungal cell, a plant cell, an animal cell, a mammalian cell, a rodent cell, a primate cell, or a human cell.

[0257] In some cases, delivery of the engineered nuclease system to the target nucleic acid locus comprises delivering the nucleic acid described herein or the vector described herein. In some cases, delivery of engineered nuclease system to the target nucleic acid locus comprises delivering a nucleic acid comprising an open reading frame encoding the endonuclease. In some cases, the nucleic acid comprises a promoter. In some cases, the open reading frame encoding the endonuclease is operably linked to the promoter.

[0258] In some cases, delivery of the engineered nuclease system to the target nucleic acid locus comprises delivering a capped mRNA containing the open reading frame encoding the endonuclease. In some cases, delivery of the engineered nuclease system to the target nucleic acid locus comprises delivering a translated polypeptide. In some cases, delivery of the engineered nuclease system to the target nucleic acid locus comprises delivering a deoxyribonucleic acid (DNA) encoding the engineered guide RNA operably linked to a ribonucleic acid (RNA) pol III promoter.

[0259] In some cases, the endonuclease induces a single-stranded break or a double-stranded break at or proximal to the target locus. In some cases, the endonuclease induces a staggered single stranded break within or 3′ to said target locus.

[0260] In some cases, effector repeat motifs are used to inform guide design of MG nucleases. For example, the processed gRNA in Type V-A systems consists of the last 20-22 nucleotides of a CRISPR repeat. This sequence may be synthesized into a crRNA (along with a spacer) and tested in vitro, along with the synthesized nucleases, for cleavage on a library of possible targets. Using this method, the PAM may be determined. In some cases, Type V-A enzymes may use a “universal” gRNA. In some cases, Type V enzymes may need a unique gRNA.

[0261] Systems of the present disclosure may be used for various applications, such as, for example, nucleic acid editing (e.g., gene editing), binding to a nucleic acid molecule (e.g., sequence-specific binding). Such systems may be used, for example, for addressing (e.g., removing or replacing) a genetically inherited mutation that may cause a disease in a subject, inactivating a gene in order to ascertain its function in a cell, as a diagnostic tool to detect disease-causing genetic elements (e.g. via cleavage of reverse-transcribed viral RNA or an amplified DNA sequence encoding a disease-causing mutation), as deactivated enzymes in combination with a probe to target and detect a specific nucleotide sequence (e.g. sequence encoding antibiotic resistance int bacteria), to render viruses inactive or incapable of infecting host cells by targeting viral genomes, to add genes or amend metabolic pathways to engineer organisms to produce valuable small molecules, macromolecules, or secondary metabolites, to establish a gene drive element for evolutionary selection, to detect cell perturbations by foreign small molecules and nucleotides as a biosensor.

### EXAMPLES

### Example 1—a Method of Metagenomic Analysis for New Proteins

[0262] Metagenomic samples were collected from sediment, soil and animals. Deoxyribonucleic acid (DNA) was extracted with a Zymobiomics DNA mini-prep kit and sequenced on an Illumina HiSeq® 2500. Samples were collected with consent of property owners. Metagenomic sequence data was searched using Hidden Markov Models generated based on known Cas protein sequences including class II type V Cas effector proteins to identify new Cas effectors (see FIG. 2, which shows distribution of proteins detected in one family, MG29, identified from sample types such as high-temperature samples). Novel effector proteins identified by the search were aligned to known proteins to identify potential active sites (see e.g. FIG. 3, which shows that all MG29 family effectors identified from various samples have three catalytic residues from RuvCI, RuvCII, and RuvCIII catalytic domains and are predicted to be active). This metagenomic workflow resulted in the delineation of the MG11, MG13, MG19, MG20, MG26, MG28, MG29, MG30, MG31, MG32, MG37, MG53, MG54, MG55, MG56, MG57, MG58, MG59, MG60, MG61, MG62, MG70, MG75, MG77, MG78, MG79, MG80, MG81, MG82, MG83, MG84, MG85, MG90, and MG91 families described herein. Putative spacer sequences were identified by their location adjacent to the genomic loci encoding the effector proteins.

### Example 2—A Method of Metagenomic Analysis for New Proteins

[0263] Thirteen animal microbiome, high temperature biofilm and sediment samples were collected and stored on ice or in Zymo DNA/RNA Shield after collection. DNA was extracted from samples using either the Qiagen DNeasy PowerSoil Kit or the ZymoBIOMICS DNA Miniprep Kit. DNA sequencing libraries were constructed and sequenced on an Illumina HiSeq 4000 or on a Novaseq machine at the Vincent J. Coates Genomics Sequencing Laboratory at UC Berkeley, with paired 150 bp reads with a 400-800 bp target insert size (10 GB of sequencing was targeted per sample). Publicly available metagenomic sequencing data were downloaded from the NCBI SRA. Sequencing reads were trimmed using BBMap (Bushnell B., sourceforge.net/projects/bbmap/) and assembled with Megahit 11. Open reading frames and protein sequences were predicted with Prodigal. HMM profiles of known Type V-A CRISPR nucleases were built and searched against all predicted proteins using HMMER3 (hmmer.org) to identify potential effectors. CRISPR arrays on assembled contigs were predicted with Minced (https://github.com/ctSkennerton/minced). Taxonomy was assigned to proteins with Kaiju, and contig taxonomy was determined by finding the consensus of all encoded proteins.

[0264] Predicted and reference (e.g., LbCas12a, AsCas12a, FnCas12a) Type V effector proteins were aligned with MAFFT and a phylogenetic tree was inferred using FasTree2. Novel families were delineated by identifying clades composed of sequences recovered from this study. From within families, candidates were selected if they contained the necessary components for laboratory analysis (i.e., they were found on a well-assembled and annotated contig with a CRISPR array) in a manner that sampled as much phylogenetic diversity as possible. Priority was given to small effectors from diverse families (that is, families with representatives sharing a wider range of protein sequences). Selected representative and reference sequences were aligned using MUSCLE and Clustal W to identify catalytic and PAM interacting residues. CRISPR array repeats were searched for a motif associated with Type V-A systems, TCTAC-N-GTAGA (containing between one and eight N residues). From this analysis, families were putatively classified as V-A if representative CRISPR arrays contained one of these motif sequences. This dataset was used to identify HMM profiles associated with V-A families, which were in turn used to classify additional families (see FIG. 33-FIG. 37). Although the convention is to name novel Cas12 nucleases on the basis of the organism that encodes them, it is not possible to do so for the nucleases described herein. Therefore, in order to best adhere to the convention, the systems described herein are named with the prefix MG to indicate they are derived from assembled metagenomic fragments.

[0265] 140,867 Mbp of assembled metagenomic sequencing data was mined from diverse environments (soil, thermophilic, sediments, human and non-human microbiomes). In total, 119 genomic fragments encoded CRISPR effectors distantly related to Type V-A nucleases next to a CRISPR array (see FIG. 4B). Type V-A effectors were classified into 14 novel families sharing less than 30% average pairwise amino acid identity between each other, and with reference sequences (e.g., LbCas12a, AsCas12a, FnCas12a). Some effectors contained RuvC and alpha-helical recognition domains, as well as conserved DED nuclease catalytic residues from the RuvCI/CII/CIII domains (identified in multiple sequence alignments, see e.g. Table 1A below), suggesting that these effectors were active nucleases (FIG. 5-FIG. 7). The novel Type V-A nucleases range in size from <800 to 1,400 amino acids in length (see FIG. 5A) and their taxonomic classification spanned a diverse array of phyla (see FIG. 4A) suggesting possible horizontal transfer.

[0266] Some genomic fragments carrying a Type V-A CRISPR system also encoded a second effector, referred to here as Type V-A prime (V-A′, FIG. 7A). For example, Type V-A′ MG26-2, which shared only 16.6% amino acid identity with the Type V-A MG26-1, was encoded in the same CRISPR Cas operon, and may share the same crRNA with MG26-1 (FIG. 7B). Although no nuclease domains were predicted, MG26-2 contained three RuvC catalytic residues identified from multiple sequence alignments (FIG. 7B).

TABLE 1A
Catalytic residues of Enzymes Described
Herein Identified by Alignment

| MGID | RuvC-I (D) | RuvC-II (E) | RuvC-III (D) |
|---|---|---|---|
| MG84-16 | 238 | 337 | 413 |
| MG84-15 | 238 | 337 | 413 |
| MG84-3 | 230 | 329 | 405 |
| MG84-2 | 230 | 329 | 405 |
| MG84-1 | 230 | 329 | 405 |
| MG84-13 | 233 | 332 | 408 |
| MG84-14 | 233 | 332 | 408 |
| MG84-12 | 233 | 332 | 408 |
| MG84-11 | 233 | 332 | 408 |
| MG84-10 | 233 | 332 | 408 |
| MG84-9 | 233 | 332 | 408 |
| MG84-8 | 233 | 332 | 408 |
| MG84-7 | 233 | 332 | 408 |
| MG84-4 | 233 | 332 | 408 |
| MG84-5 | 233 | 332 | 408 |
| MG84-6 | 233 | 332 | 408 |
| MG81-18 | 296 | 399 | 497 |
| MG81-17 | 296 | 399 | 497 |
| MG81-9 | 297 | 400 | 498 |
| MG81-6 | 297 | 400 | 498 |
| MG81-11 | 297 | 400 | 498 |
| MG81-7 | 297 | 400 | 498 |
| MG81-8 | 297 | 400 | 498 |
| MG81-13 | 297 | 400 | 498 |
| MG81-5 | 300 | 403 | 501 |
| MG81-12 | 300 | 403 | 501 |
| MG81-1 | 300 | 403 | 502 |
| MG81-4 | 310 | 413 | 501 |
| MG81-3 | 310 | 413 | 511 |
| MG81-15 | 388 | 491 | 589 |
| MG81-10 | 310 | 413 | 511 |
| MG81-2 | 306 | 409 | 507 |
| MG90-2 | 388 | 548 | 661 |
| MG91-1 | 444 | 560 | 653 |
| MG91-2 | 245 | 358 | 453 |
| MG91-3 | 297 | 404 | 499 |
| MG37-1 | 763 | 1167 | 1335 |
| MG37-2 | 169 | 538 | 689 |
| MG37-3 | 745 | 1202 | 1350 |
| MG37-4 | 811 | 1230 | 1377 |
| MG37-5 | 775 | 1173 | 1319 |
| MG37-6 | 698 | 1058 | 1229 |
| MG37-7 | 752 | 1135 | 1273 |
| MG53-1 | — | 775 | 920 |
| MG54-1 | — | 612 | 722 |

### Example 3—(General Protocol) PAM Sequence Identification/Confirmation

[0267] PAM sequences that could be cleaved in vitro by a CRISPR effector were identified by incubating an effector with a crRNA and a plasmid library having 8 randomized nucleotides located adjacent to the 5′ end of a sequence complementary to the spacer of the crRNA. If the 8 randomized nucleotides formed a functional PAM sequence, the plasmid would be cleaved. Functional PAM sequences were then identified by ligating adapters to the ends of cleaved plasmids and then sequencing DNA fragments comprising the adapters. Putative endonucleases were expressed in an E. coli lysate-based expression system (myTXTL, Arbor Biosciences). An E. coli codon optimized nucleotide sequence encoding the putative nuclease was transcribed and translated in vitro from a PCR fragment under control of a T7 promoter. A second PCR fragment with a minimal CRISPR array composed of a T7 promoter followed by a repeat-spacer-repeat sequence was transcribed in the same reaction. Successful expression of the endonuclease and repeat-spacer-repeat sequence followed by CRISPR array processing provided active in vitro CRISPR nuclease complexes.

[0268] A library of target plasmids containing a spacer sequence matching that in the minimal array preceded by 8N (degenerate) bases (potential PAM sequences) was incubated with the output of the TXTL reaction. After 1-3 hours, the reaction was stopped and the DNA was recovered via a DNA clean-up kit, e.g., Zymo DCC, AMPure XP beads, QiaQuick etc. Adapter sequences were blunt-end ligated to DNA fragments with active PAM sequences that had been cleaved by the endonuclease, whereas DNA that had not been cleaved was inaccessible for ligation. DNA segments comprising active PAM sequences were then amplified by PCR with primers specific to the library and the adapter sequence. The PCR amplification products were resolved on a gel to identify amplicons that corresponded to cleavage events. The amplified segments of the cleavage reaction were also used as templates for preparation of an NGS library or as a substrate for Sanger sequencing. Sequencing this resulting library, which was a subset of the starting 8N library, revealed sequences with PAM activity compatible with the CRISPR complex. For PAM testing with a processed RNA construct, the same procedure was repeated except that an in vitro transcribed RNA was added along with the plasmid library and the minimal CRISPR array template was omitted. The following sequences were used as targets in these assays: CGTGAGCCACCACGTCGCAAGCCT (SEQ ID NO: 3860); GTCGAGGCTTGCGACGTGGTGGCT (SEQ ID NO: 3861); GTCGAGGCTTGCGACGTGGTGGCT (SEQ ID NO: 3858); and TGGAGATATCTTGAACCTTGCATC (SEQ ID NO: 3859).

### Example 4—PAM Sequence Identification/Confirmation for Endonucleases Described Herein

[0269] PAM requirements were determined via an E. coli lysate-based expression system (myTXTL, Arbor Biosciences), with modifications. Briefly, the E. coli codon optimized effector protein sequences were expressed under control of a T7 promoter at 29° C. for 16 hours. This crude protein stock was then used in an in vitro digest reaction at a concentration of 20% of the final reaction volume. The reaction was incubated for 3 hours at 37° C. with 5 nM of a plasmid library consisting of a constant target sequence preceded by 8N mixed bases, and 50 nM of in vitro transcribed crRNA derived from the same CRISPR locus as the effector linked to a sequence complementary to the target sequence in NEB buffer 2.1 (New England Biolabs; NEB buffer 2.1 was selected in order to compare candidates with commercially available proteins). Protein concentration was not normalized in PAM discovery assays (PCR amplification signal provides high sensitivity for low expression or activity). The cleavage products from the TXTL reactions were recovered via clean up with AMPure SPRI beads (Beckman Coulter). The DNA was blunted via addition of Klenow fragments and dNTPs (New England Biolabs). Blunt-end products were ligated with a 100-fold excess of double stranded adapter sequences and used as template for the preparation of an NGS library, from which PAM requirements were determined from sequence analysis.

[0270] Raw NGS reads were filtered by Phred quality score >20. The 28 bp representing the known DNA sequence from the backbone adjacent to the PAM was used as a reference to find the PAM-proximal region and the 8 bp adjacent were identified as the putative PAM. The distance between the PAM and the ligated adapter was also measured for each read. Reads that did not have an exact match to the reference sequence or adapter sequence were excluded. PAM sequences were filtered by cut site frequency such that only PAMs with the most frequent cut site ±2 bp were included in the analysis. This correction removed low levels of background cleavage that may occur at random positions due to the use of crude E. coli lysate. This filtering step can remove between 2% and 40% of the reads depending on the signal to noise ratio of the candidate protein, where less active proteins have more background signal. For reference MG29-1, 2% of reads were filtered out at this step. The filtered list of PAMs was used to generate a sequence logo using Logomaker. These sequence logo depictions of PAMs are presented in FIGS. 20-24.

### Example 5—tracrRNA Prediction and Guide Design

[0271] The crystal structure of a ternary complex of AacC2c1 (Cas12b) bound to a sgRNA and a target DNA reveals two separate repeat-anti-repeat (R-AR) motifs in the bound sgRNA, denoted R-AR duplex 1 and R-AR duplex 2 (see FIG. 8 and FIG. 9 herein and Yang, Hui, Pu Gao, Kanagalaghatta R. Rajashankar, and Dinshaw J. Patel. 2016. “PAM-Dependent Target DNA Recognition and Cleavage by C2c1 CRISPR-Cas Endonuclease.” Cell 167 (7): 1814-28.e12 and Liu, Liang, Peng Chen, Min Wang, Xueyan Li, Jiuyu Wang, Maolu Yin, and Yanli Wang. 2017. “C2c1-sgRNA Complex Structure Reveals RNA-Guided DNA Cleavage Mechanism.” Molecular Cell 65 (2): 310-22, each of which is incorporated by reference herein in its entirety). Putative tracrRNA sequences for the CRISPR effectors disclosed herein were identified by searching for anti-repeat sequences in the surrounding genomic context of native CRISPR arrays, where the R-AR duplex 2 anti-repeat sequence occurs ˜20-90 nucleotides upstream of (closer to the 5′ end of the tracrRNA than) the R-AR duplex 1 anti-repeat sequence. Following tracrRNA sequence identification, two guide sequences were designed for each enzyme. The first included both R-AR duplexes 1 & 2 (see for example SEQ ID NOs: 3636, 3640, 3644, 3648, 3652, 3656, 3660, 3671, and 3672), and the second was a shorter guide sequence with the R-AR duplex 1 region deleted (see e.g., SEQ ID NOs: 3637, 3641, 3645, 3649, 3653, 3657, and 3661), as this region may not be essential for cleavage.

### Example 6—Protocol for Predicted RNA Folding

[0272] Predicted RNA folding of RNA sequences at 37° C. was computed using the method of Andronescu 2007 (which is entirely incorporated by reference herein).

### Example 7—RNA Guide Identification

[0273] For contigs that encoded a Type V-A effector and a CRISPR array, secondary structure folding of repeats indicated that the novel Type V-A systems require a single guide crRNA (sgRNA, FIG. 10). No tracrRNA sequences could be reliably predicted. The sgRNA contained ˜19-22 nt from the 3′ end of the CRISPR repeat. A multiple sequence alignment of CRISPR repeats from six of the Type V-A candidates that were tested for in-vitro activity shows a highly conserved motif at the 3′ end of the repeat, which formed the stem-loop structure of the sgRNA (FIG. 10C). The motif, UCUAC[N3-5]GUAGAU, consisted of short palindromic repeats (the stem) separated by between three and five nucleotides (the loop).

[0274] The conservation of the sgRNA motif was used to uncover novel effectors that may not show similarity to classified Type V-A nucleases. Motifs were searched in repeats from 69,117 CRISPR arrays. The most common motif contained a 4-nucleotide loop, while 3- and 5-nucleotide loops were less common (see FIG. 12, FIG. 13, FIG. 14, FIG. 15, and FIG. 16). Inspection of the genomic context surrounding the CRISPR arrays containing the repeat motif revealed numerous effectors of varying lengths. For example, effectors of the family MG57 were the largest of the Type V-A nucleases identified (average 1400 aa), and encoded a repeat with a 4-bp loop. Another family identified from HMM analysis contained a different repeat motif, CCUGC[N₃₋₄]GCAGG (see FIGS. 5C,5D). Although differing in sequence, the structure was predicted to fold into a highly similar stem-loop structure.

### Example 8—In Vitro Cleavage Efficiency of MG CRISPR Complexes

[0275] Endonucleases are expressed as His-tagged fusion proteins from an inducible T7 promoter in a protease deficient E. coli B strain. Cells expressing the His-tagged proteins are lysed by sonication and the His-tagged proteins purified by Ni-NTA affinity chromatography on a HisTrap FF column (GE Lifescience) on an AKTA Avant FPLC (GE Lifescience). The eluate is resolved by SDS-PAGE on acrylamide gels (Bio-Rad) and stained with InstantBlue Ultrafast coomassie (Sigma-Aldrich). Purity is determined using densitometry of the protein band with ImageLab software (Bio-Rad). Purified endonucleases are dialyzed into a storage buffer composed of 50 mM Tris-HCl, 300 mM NaCl, 1 mM TCEP, 5% glycerol; pH 7.5 and stored at −80° C. Target DNAs containing spacer sequences and PAM sequences (determined for example as in either Example 3 or Example 4) are constructed by DNA synthesis. A single representative PAM is chosen for testing when the PAM has degenerate bases. The target DNAs are comprised of 2200 bp of linear DNA derived from a plasmid via PCR amplification with a PAM and spacer located 700 bp from one end. Successful cleavage results in fragments of 700 and 1500 bp. The target DNA, in vitro transcribed single RNA, and purified recombinant protein are combined in cleavage buffer (10 mM Tris, 100 mM NaCl, 10 mM MgCl₂) with an excess of protein and RNA and are incubated for 5 minutes to 3 hours, usually 1 hr. The reaction is stopped via addition of RNAse A and incubation at 60 minutes. The reaction is then resolved on a 1.2% TAE agarose gel and the fraction of cleaved target DNA is quantified in ImageLab software.

### Example 9—Testing of Genome Cleavage Activity of MG CRISPR Complexes in E. coli

[0276] E. coli lacks the capacity to efficiently repair double-stranded DNA breaks. Thus, cleavage of genomic DNA can be a lethal event. Exploiting this phenomenon, endonuclease activity is tested in E. coli by recombinantly expressing an endonuclease and a guide RNA (determined for example as in Example 6) in a target strain with spacer/target and PAM sequences integrated into its genomic DNA (determined for example as in Example 4) integrated into their genomic DNA are transformed with DNA encoding the endonuclease. Transformants are then made chemocompetent and are transformed with 50 ng of guide RNAs (e.g., crRNAs) either specific to the target sequence (“on target”), or non-specific to the target (“non target”). After heat shock, transformations were recovered in SOC for 2 hours at 37° C. Nuclease efficiency is then determined by a 5-fold dilution series grown on induction media. Colonies are quantified from the dilution series in triplicate. A reduction in the number of colonies transformed with an on-target guide RNA compared to the number of colonies transformed with an off-target guide RNA indicates specific genome cleavage by the endonuclease.

### Example 10—Generic Procedure: Testing of Genome Cleavage Activity of MG CRISPR Complexes in Mammalian Cells

[0277] Two types of mammalian expression vectors are used to detected targeting and cleavage activity in mammalian cells. In the first, the MG Cas effector is fused to a C-terminal SV40 NLS and a viral 2A consensus cleavable peptide sequence linked to a GFP tag (the 2A-GFP tag to monitor expression of the protein). In the second, the MG Cas effector is fused to two SV40 NLS sequences, one on the N-terminus and the other on the C-terminus. The NLS sequences comprise any of the NLS sequences described herein (for example SEQ ID NOs: 3938-3953). In some instances, nucleotide sequences encoding the endonucleases are codon-optimized for expression in mammalian cells.

[0278] A single guide RNA with a crRNA sequence fused to a sequence complementary to a mammalian target DNA is cloned into a second mammalian expression vector. The two plasmids are co-transfected into HEK293T cells. 72 hours after co-transfection, DNA is extracted from the transformed HEK293T cells and used for the preparation of an NGS-library. Percent NHEJ is measured by quantifying indels at the target site to demonstrate the targeting efficiency of the enzyme in mammalian cells. At least 10 different target sites are chosen to test each protein's activity.

### Example 11—Testing of Genome Cleavage Activity of MG CRISPR Complexes in Mammalian Cells

[0279] To show targeting and cleavage activity in mammalian cells, the MG Cas effector protein sequences were cloned into a mammalian expression vector with flanking N and C-terminal SV40 NLS sequences, a C-terminal His tag, and a 2A-GFP (e.g. a viral 2A consensus cleavable peptide sequence linked to a GFP) tag at the C terminus after the His tag (Backbone 1). In some instances, nucleotide sequences encoding the endonucleases were the native sequence, codon-optimized for expression in E. coli cells or codon-optimized for expression in mammalian cells.

[0280] The single guide RNA sequence (sgRNA) with a gene target of interest was also cloned into a mammalian expression vector. The two plasmids are co-transfected into HEK293T cells. 72 hours after co-transfection of the expression plasmid and a sgRNA targeting plasmid into HEK293T cells, the DNA was extracted and used for the preparation of an NGS-library. Percent NHEJ was measured via indels in the sequencing of the target site to demonstrate the targeting efficiency of the enzyme in mammalian cells. 7-12 different target sites were chosen for testing each protein's activity. An arbitrary threshold of 5% indels was used to identify active candidates. Genome editing efficiency in human cells was assessed from the NGS reads with CRISPResso using parameters: cleavage offset=−4 and window=10. All post cleavage events from the CRISPResso output were summed for ±1 bp indels/mutations, and ≥2 bp deletions, insertions, and mutations. All outcomes were normalized to total sequences aligned to the expected amplicon (see FIG. 18)

### Example 12—Characterization of MG29 Family

[0281] PAM Specificity, tracrRNA/sgRNA Validation

[0282] The targeted endonuclease activity of MG29 family endonuclease systems was confirmed using the myTXTL system described in Example 3 and Example 8. In this assay, PCR amplification of cleaved target plasmids yields a product that migrates at approximately 170 bp in the gel, as shown in FIG. 17. Amplification products were observed for MG29-1 with crRNA corresponding to SEQ ID NO: 3609 (see FIG. 17A, lane 7). Sequencing the PCR products revealed active PAM sequences for these enzymes as shown in

[0283] Table 2 below.

TABLE 2
Activity of MG29-1 at various target sites

| | | 5′ sequence | | |
|---|---|---|---|---|
| | target | including | | %NHEJ |
| target ID | sequence | PAM | locus | (mean ± std) |
| target1 | TGTCAGAAGC | AACACAGTTG | HBB | 2.185 ± 0.007 |
| | AAATGTAAGC | (SEQ ID | | |
| | AATA | NO: 3890) | | |
| | (SEQ ID | | | |
| | NO: 3914) | | | |
| target2 | CTGAAAGGTT | TACAGTTTTG | Fibrinogen | 10.5 ± 8.74 |
| | ATTGTTGTGT | (SEQ ID | | |
| | TTGT | NO: 3891) | | |
| | (SEQ ID | | | |
| | NO: 3915) | | | |
| target3 | CTAGTGAACA | TTTGAGGTTG | HBB | 2.14 ± 2.83 |
| | CAGTTGTGTC | (SEQ ID | | |
| | AGAA | NO: 3892) | | |
| | (SEQ ID | | | |
| | NO: 3916) | | | |
| target4 | TGAAGTCTTA | TTTGTATTTG | Albumin | 13.757 ± 5.46 |
| | CAAGGTTATC | (SEQ ID | | |
| | TTAT | NO: 3893) | | |
| | (SEQ ID | | | |
| | NO: 3917) | | | |
| target5 | CACTTTCCTT | AGTTACTTTG | Albumin | 17.937 ± 8.27 |
| | AGTGCGCAAA | (SEQ ID | | |
| | AGAA | NO: 3894) | | |
| | (SEQ ID | | | |
| | NO: 3918) | | | |
| target6 | GTGGTGAGGC | GATGAAGTTG | HBB | 12.545 ± 1.73 |
| | CCTGGGCAGG | (SEQ ID | | |
| | TTGG | NO: 3895) | | |
| | (SEQ ID | | | |
| | NO: 3919) | | | |
| target7 | GGAGGTCAGA | TAGCTGTTTG | VEGFA | 23.56 ± 7.04 |
| | AATAGGGGGT | (SEQ ID | | |
| | CCAG | NO: 3896) | | |
| | (SEQ ID | | | |
| | NO: 3920) | | | |
| target8 | GAAAGGGGGT | ATGGGCTTTG | VEGFA | 30.147 ± 10.17 |
| | GGGGGGAGTT | (SEQ ID | | |
| | TGCT | NO: 3897) | | |
| | (SEQ ID | | | |
| | NO: 3921) | | | |
| target9 | GTATCAAGGT | GGGCAGGTTG | HBB | 10.935 ± 1.56 |
| | TACAAGACAG | (SEQ ID | | |
| | GTTT | NO: 3898) | | |
| | (SEQ ID | | | |
| | NO: 3922) | | | |
| target10 | TGTGAGGGAG | TACATAGTTG | Apolipoprotein | 30.43 ± 1.57 |
| | CACCGTTCTC | (SEQ ID | | |
| | TAGA | NO: 3899) | | |
| | (SEQ ID | | | |
| | NO: 3923) | | | |
| target11 | GGTAGTTTTC | TACGCATTTG | Apolipoprotein | 18.173 ± 6.28 |
| | TGTGGTCCTA | (SEQ ID | | |
| | TTAT | NO: 3900) | | |
| | (SEQ ID | | | |
| | NO: 3924) | | | |
| target12 | CCAGGAAAGT | CCGCAAGTTG | Apolipoprotein | 7.47 ± 10.52 |
| | TGATGTGGTC | (SEQ ID | | |
| | TGCG | NO: 3901) | | |
| | (SEQ ID | | | |
| | NO: 3925) | | | |

### Targeted Endonuclease Activity in Mammalian Cells

[0284] MG29-1 target loci were chosen to test locations in the genome with the PAM YYn (SEQ ID NO: 3871). The spacers corresponding to the chosen target sites were cloned into the sgRNA scaffold in the mammalian vector system backbone 1 described in Example 9. The sites are listed in

[0285] Table 3 below. The activity of MG29-1 at various target sites is shown in

[0286] Table 2 and FIG. 19.

TABLE 3
5′ PAM Sequences and crRNAs for Enzymes Described Herein

| | Enzyme | 5′ | PAM | crRNA |
|---|---|---|---|---|
| Enzyme | SEQ ID NO: | PAM | SEQ ID NO: | SEQ ID NO: |
| MG29-1 | 215 | KTTG | 3870 | 3608 |

### Example 13—High-Replicate PAM Determination Via NGS

[0287] Type V endonucleases (e.g. MG28, MG29, MG30, MG31 endonucleases) were tested for cleavage activity using E coli lysate-based expression in the myTXTL kit as described in Example 3 and Example 8. Upon incubation with a crRNA and a plasmid library containing a spacer sequencing matching the crRNA preceded by 8 degenerated (“N”) bases (a 5′ PAM library), the subset of the plasmid library with a functional PAM was cleaved. Ligation to this cut site and PCR amplification provided evidence of activity, demonstrated by the bands observed in the gel at 170 bp (FIG. 17B). Gel 1 (top panel, A) lanes are as follows: 1 (ladder; darkest band corresponds to 200 bp); 2: positive control (previously verified library); 3 (n/a); 4 (n/a); 5 (MG28-1); 6 (MG29-1); 7 (MG30-1); 8 (MG31-1); 9 (MG32-1); and 10 (Ladder). Gel 2 (bottom panel, B) lanes are as follows: 1 (ladder; darkest band corresponds to 200 bp); 2 (LbCpf1 positive control); 3 (LbCpf1 positive control); 4 (negative control); 5 (n/a); 6 (n/a); 7 (MG28-1); 8 (MG29-1); 9 (MG30-1); 10 (MG31-1); 11 (MG32-1).

[0288] The PCR products were further subjected to NGS sequencing and the PAMs were collated into seqLogo (see e.g., Huber et al. Nat Methods. 2015 February; 12(2):115-21) representations (FIG. 20). The seqLogo representation shows the 8 bp which are upstream (5′) of the spacer labeled as positions 0-7. As shown in the FIG. 20, the PAMs are pyrimidine rich (C and T), with most sequence requirements 2-4 bp upstream of the spacer (positions 4-6 in the SeqLogo).

[0289] The PAMs for the MG candidates are shown in Table 4 below.

TABLE 4
5′ PAM Sequences and crRNAs for Enzymes Described Herein

| | Enzyme | 5′ | PAM | crRNA |
|---|---|---|---|---|
| Enzyme | SEQ ID NO: | PAM | SEQ ID NO: | SEQ ID NO: |
| MG28-1 | 141 | TTTn | 3868 | 3609 |
| MG29-1 | 215 | YYn | 3871 | 3609 |
| MG31-1 | 229 | YTTn | 3875 | 3609 |
| MG32-1 | 261 | TTTn | 3877 | 3609 |

[0290] In some cases, the position immediately adjacent to the spacer may have a weaker preference, e.g. for “m” or “v” instead of “n”.

### Example 14—Targeted Endonuclease Activity in Mammalian Cells with MG31 Nucleases

### Targeted Endonuclease Activity in Mammalian Cells

[0291] MG31-1 target loci were chosen to test locations in the genome with the PAM TTTR (SEQ ID NO: 3875). The spacers corresponding to the chosen target sites were cloned into the sgRNA scaffold in the mammalian vector system backbone 1 described in

[0292] Example 11. The sites are listed in Table 5 below. The activity of MG31-1 at various target sites is shown in Table 5 and FIG. 25.

TABLE 5
Activity of MG31-1 at various target sites

| target | target | | | %NHEJ |
|---|---|---|---|---|
| ID | sequence | PAM | locus | (mean ± std) |
| target1 | GTTATTA | GTTTTCT | Fibrinogen | 1.005 ± 0.516 |
| | ATTTCTT | TTA | | |
| | GCTACTT | (SEQ ID | | |
| | GTC | NO: | | |
| | (SEQ ID | 3902) | | |
| | NO: | | | |
| | 3926) | | | |
| target2 | CTGAAAG | TACAGTT | Fibrinogen | 2.417 ± 1.47 |
| | GTTATTG | TTG | | |
| | TTGTGTT | (SEQ ID | | |
| | TGT | NO: | | |
| | (SEQ ID | 3903) | | |
| | NO: | | | |
| | 3927) | | | |
| target3 | GTGTTAG | AGAACTT | Fibrinogen | 2.925 ± 0.516 |
| | TACAGTT | TTA | | |
| | TTGCTGA | (SEQ ID | | |
| | AAG | NO: | | |
| | (SEQ ID | 3904) | | |
| | NO: | | | |
| | 3928) | | | |
| target4 | TGAAGTC | TTTGTAT | Albumin | 7.053 ± 2.72 |
| | TTACAAG | TTG | | |
| | GTTATCT | (SEQ ID | | |
| | TAT | NO: | | |
| | (SEQ ID | 3905) | | |
| | NO: | | | |
| | 3929) | | | |
| target5 | CACTTTC | AGTTACT | Albumin | 0.927 ± 0.50 |
| | CTTAGTG | TTG | | |
| | CGCAAAA | (SEQ ID | | |
| | GAA | NO: | | |
| | (SEQ ID | 3906) | | |
| | NO: | | | |
| | 3930) | | | |
| target6 | CCTAGGA | TTTTTTT | Albumin | 1.125 ± 0.43 |
| | TGTTTGA | TTA | | |
| | ATTTTAT | (SEQ ID | | |
| | TAA | NO: | | |
| | (SEQ ID | 3907) | | |
| | NO: | | | |
| | 3931) | | | |
| target7 | GGAGGTC | TAGCTGT | VEGFA | 17.39 ± 8.67 |
| | AGAAATA | TTG | | |
| | GGGGGTC | (SEQ ID | | |
| | CAG | NO: | | |
| | (SEQ ID | 3908) | | |
| | NO: | | | |
| | 3932) | | | |
| target8 | GAAAGGG | ATGGGCT | VEGFA | 4.01 ± 1.29 |
| | GGTGGGG | TTG | | |
| | GGAGTTT | (SEQ ID | | |
| | GCT | NO: | | |
| | (SEQ ID | 3909) | | |
| | NO: | | | |
| | 3933) | | | |
| target9 | GCCAGAG | TCCCTCT | VEGFA | 6.72 ± 1.92 |
| | CCGGGGT | TTA | | |
| | GTGCAGA | (SEQ ID | | |
| | CGG | NO: | | |
| | (SEQ ID | 3910) | | |
| | NO: | | | |
| | 3934) | | | |
| target10 | CTTGGAC | ACAAATT | Apolipoprotein | −0.32 ± 0.75 |
| | CTTGTTT | TTA | | |
| | TGCTTAC | (SEQ ID | | |
| | TGT | NO: | | |
| | (SEQ ID | 3911) | | |
| | NO: | | | |
| | 3935) | | | |
| target11 | GGTAGTT | TACGCAT | Apolipoprotein | 2.593 ± 1.33 |
| | TTCTGTG | TTG | | |
| | GTCCTAT | (SEQ ID | | |
| | TAT | NO: | | |
| | (SEQ ID | 3912) | | |
| | NO: | | | |
| | 3936) | | | |
| target12 | ATCATAA | GAAAAAT | Apolipoprotein | 3.095 |
| | GAAGTTA | TTA | | |
| | GCTTGAC | (SEQ ID | | |
| | GCA | NO: | | |
| | (SEQ ID | 3913) | | |
| | NO: | | | |
| | 3937) | | | |

### Example 15—In Vitro Activity

[0293] Promising candidates from the bioinformatic analysis and preliminary screens were selected for further biochemical analysis as described in this example. Using the conserved 3′ sgRNA structure, a “universal” sgRNA was designed comprising the 3′ 20 nt of the CRISPR repeat and a 24 nt spacer (FIG. 10). Of the seven tested candidates, six showed activity in vitro against the 8N PAM library (FIG. 26A). The remaining inactive candidate (30-1) showed activity when tested with its predicted endogenous trimmed CRISPR repeat (SEQ ID NO: 3608, see FIG. 26B), but was not included in NGS library assays. (FIG. 26C)

[0294] The majority of identified PAMs are thymine-rich sequences of 2-3 bases (FIG. 18A). However, two enzymes, MG26-1 (PAM YYn) and MG29-1 (PAM YYn), had PAM specificity for either pyrimidine base, thymine or cytosine, allowing for broader sequence targeting. Analysis of putative PAM-interacting residues indicated that the active Type V-A nucleases contain a conserved Lysine and a GWxxxK motif, which were shown to be important in recognition and interaction with different PAMs in FnCas12a.

[0295] As our PAM detection assay required ligation to create blunt-end fragments prior to PAM enrichment, this suggested that these enzymes created a staggered double strand DNA break, similar to previously reported Type V-A nucleases. The cut site on the target strand can be identified by analysis of the NGS reads used for indel detection (FIG. 18B) and showed cleavage after the 22nd PAM-distal base

[0296] In vitro cleavage by MG29-1 was further investigated by sequencing the cleavage products. The cut position on the target strand was 22 nucleotides away from the PAM in most sequences, and 21 or 23 nucleotides less frequently (FIG. 56). The cut position on the non-target strand was 17 to 19 nucleotides from the PAM. In combination, these results indicate a 3-5 bp overhang.

### Example 16—Genome Editing

[0297] After confirmation of the PAM, novel proteins described herein were tested in HEK293T cells for gene targeting activity. All candidates showed activity of over 5% NHEJ (background corrected) on at least one of ten tested target loci. MG29-1 showed the highest overall activity in NHEJ modification outcomes (FIG. 18B) and was active on the highest number of targets. Thus, this nuclease was selected for purified ribonucleoprotein complex (RNP) testing in HEK293 cells. RNP transfection of MG29-1 holoenzyme showed higher editing levels with RNP than plasmid-based transfection on 4 out of 9 targets, in some cases over 80% editing efficiency (FIG. 18C). Analysis of editing profiles for MG29-1 indicates that this nuclease produces deletions of more than two bp more frequently than other types of edits at their target site (FIG. 18D). At some targets (5 and 8) the indel frequency for MG29-1 was twice that of AsCpf1 (FIG. 18E).

### Example 17—Discussion

[0298] Type V-A CRISPR were identified from metagenomes collected from a variety of complex environments and arranged into families. These novel Type V-A nucleases had diverse sequences and phylogenetic origins within and across families and cleaved targets with diverse PAM sites. Similar to other Type V-A nucleases (e.g. LbCas12a, AsCas12a, and FnCas12a), the effectors described herein utilized a single guide CRISPR RNA (sgRNA) to target staggered double stranded cleavage of DNA, simplifying guide design and synthesis, which will facilitate multiplexed editing. Analysis of CRISPR repeat motifs that formed the stem-loop structure of the crRNA suggested that the Type V-A effectors described herein have a 4-nt loop guide more frequently than shorter or longer loops. The sgRNA motif of LbCpf1 has a less common 5-nt, although the 4-nt loop was also observed previously for 16 Cpf1 orthologs. An unusual stem-loop CRISPR repeat motif sequence, CCUGC[N₃₋₄]GCAGG, was identified for the MG61 family of Type V-A effectors. The high degree of conservation of the sgRNA with variable loop lengths in Type V-A may afford flexible levels of activity, as shown for proteins described herein. Taken together, these effectors are not close homologs to previously studied enzymes, and greatly expand the diversity of Type V-A-like sgRNA nucleases.

[0299] Additional Type V effectors described herein could have evolved from duplications of Type V-A-like nucleases, referred to here as Type V-A prime effectors (V-A′) which may be encoded next to Cas12a nucleases. Both Type V-A and these Type V-A′ systems may share a CRISPR sgRNA but the Type V-A′ systems are divergent from Cas12a (FIG. 4). The CRISPR repeat associated with these prime effectors also folded into single guide crRNA with the UCUAC[N₃₋₅]GUAGAU motif. One report identified a Type V cms1 effector encoded next to a Type V-A nuclease, which required a single guide crRNA for cleavage activity in plant cells. Different CRISPR arrays were reported for each effector, while the Type V-A′ system described herein suggested that both Type V-A and V-A′ may require the same crRNA for DNA targeting and cleavage. As described recently in Roizmanbacterial genomes (see e.g., Chen et al. Front Microbiol. 2019 May 3; 10:928), both Type V-A and V-A′ effectors are distantly related based on sequence homology and phylogenetic analysis. Therefore, the prime effectors do not belong within the Type V-A classification, and warrant a separate Type V sub-classification

[0300] PAMs determined for active Type V-A nucleases were generally thymine-rich, similar to previously described PAMs described for other Type V-A nucleases. In contrast, MG29-1 requires a shorter YYN PAM sequence, which increases target flexibility compared to the four nucleotide TTTV PAM of LbCpf1. Additionally, RNPs containing MG29-1 had higher activity in HEK293 cells compared to sMbCas12a, which has a three-nucleotide PAM.

[0301] When testing the novel nucleases for in-vitro editing activity, MG29-1 exhibited comparable or better activity to other reported enzymes of the class. Reports of plasmid transfection editing efficiencies in mammalian cells using Cas12a orthologs indicate between 21% and 26% indel frequencies for guides with T-rich PAMs, and one out of 18 guides with CCN PAMs showed ˜10% activity in Mb3Cas12a (Moraxella bovoculi AAX11_00205 Cas12a, see e.g. Wang et al. Journal of Cell Science 2020 133: jcs240705). Notably, MG29-1 activity in plasmid transfections appears greater than that reported for Mb3Cas12a for targets with TTN and CCN PAMs (see e.g. FIG. 18). Because the target sites for plasmid transfections have the same TTG PAM on all experiments, the difference in editing efficiency may be attributed to genomic accessibility differences at different target genes. MG29-1 editing as RNP is much more efficient than via plasmid and is more efficient than AsCas12a on two of seven target loci. Therefore, MG29-1 may be a highly active and efficient gene editing nuclease. These findings increase the known diversity of single guide Type V-A CRISPR nucleases, and demonstrate the genome editing potential of novel enzymes from uncultivated microbes. Seven novel nucleases showed in-vitro activity with diverse PAM requirements, and RNP data showed editing efficiency surpassing 80% for therapeutically relevant targets in human cell lines. These novel nucleases expand the toolkit of CRISPR-associated enzymes and enable diverse genome engineering applications.

### Example 18—MG29-1 Induced Editing of TRAC Locus in T-Cells

[0302] The three exons of the T cell receptor alpha chain constant region (TRACA) were scanned for sequences matching an initial predicted 5′-TTN-3′ PAM preference of MG29-1 and single-guide RNAs with proprietary Alt-R modifications were ordered from IDT. All guide spacer sequences were 22 nt long. Guides (80 pmol) were mixed with purified MG29-1 protein (63 pmol), incubated for 15 minutes at room temperature. T cells were purified from PBMCs by negative selection using (Stemcell Technologies Human T cell Isolation Kit #17951) and activated by CD2/3/28 beads (Miltenyi T cell Activation/Expansion Kit #130-091-441). After four days of cell growth, each MG29-1/guide RNA mixture was electroporated into 200,000 T cells with a Lonza 4-D Nucleofector, using program EO-115 and P3 buffer. The cells were harvested seventy-two hours post-transfection, genomic DNA was isolated, and PCR amplified for analysis using high-throughput DNA sequencing using primers targeting the TRACA locus. The creation of insertions and deletions typical of NHEJ-based gene editing was quantified using a proprietary Python script (see FIG. 39).

TABLE 5A
Guide sequences used in Example 18

| | | SEQ |
|---|---|---|
| | | ID |
| Entity Name | Sequence | NO: |
| MG29-1 Guide 1 | ACCGATTTTGATTCTCAAACAA | 4316 |
| Target Sequence | | |
| MG29-1 Guide 2 | TGATTCTCAAACAAATGTGTCA | 4317 |
| Target Sequence | | |
| MG29-1 Guide 3 | GATTCTCAAACAAATGTGTCAC | 4318 |
| Target Sequence | | |
| MG29-1 Guide 4 | ATTCTCAAACAAATGTGTCACA | 4319 |
| Target Sequence | | |
| MG29-1 Guide 5 | TCAAACAAATGTGTCACAAAGT | 4320 |
| Target Sequence | | |
| MG29-1 Guide 6 | TGATGTGTATATCACAGACAAA | 4321 |
| Target Sequence | | |
| MG29-1 Guide 7 | AAGAGCAACAGTGCTGTGGCCT | 4322 |
| Target Sequence | | |
| MG29-1 Guide 8 | GCATGTGCAAACGCCTTCAACA | 4323 |
| Target Sequence | | |
| MG29-1 Guide 9 | CATGTGCAAACGCCTTCAACAA | 4324 |
| Target Sequence | | |
| MG29-1 Guide 10 | AACAACAGCATTATTCCAGAAG | 4325 |
| Target Sequence | | |
| MG29-1 Guide 11 | TTCCAGAAGACACCTTCTTCCC | 4326 |
| Target Sequence | | |
| MG29-1 Guide 12 | CAGAAGACACCTTCTTCCCCAG | 4327 |
| Target Sequence | | |
| MG29-1 Guide 13 | TGGAATAATGCTGTTGTTGAAG | 4328 |
| Target Sequence | | |
| MG29-1 Guide 14 | TTGAAGGCGTTTGCACATGCAA | 4329 |
| Target Sequence | | |
| MG29-1 Guide 15 | AAGGCGTTTGCACATGCAAAGT | 4330 |
| Target Sequence | | |
| MG29-1 Guide 16 | GCACATGCAAAGTCAGATTTGT | 4331 |
| Target Sequence | | |
| MG29-1 Guide 17 | CACATGCAAAGTCAGATTTGTT | 4332 |
| Target Sequence | | |
| MG29-1 Guide 18 | GTTGCTCCAGGCCACAGCACTG | 4333 |
| Target Sequence | | |
| MG29-1 Guide 19 | TTGCTCCAGGCCACAGCACTGT | 4334 |
| Target Sequence | | |
| MG29-1 Guide 20 | CTCCAGGCCACAGCACTGTTGC | 4335 |
| Target Sequence | | |
| MG29-1 Guide 21 | CTCTTGAAGTCCATAGACCTCA | 4336 |
| Target Sequence | | |
| MG29-1 Guide 22 | AAGTCCATAGACCTCATGTCTA | 4337 |
| Target Sequence | | |
| MG29-1 Guide 23 | TGTCTGTGATATACACATCAGA | 4338 |
| Target Sequence | | |
| MG29-1 Guide 24 | GTCTGTGATATACACATCAGAA | 4339 |
| Target Sequence | | |
| MG29-1 Guide 25 | TCTGTGATATACACATCAGAAT | 4340 |
| Target Sequence | | |
| MG29-1 Guide 26 | CTTTGTGACACATTTGTTTGAG | 4341 |
| Target Sequence | | |
| MG29-1 Guide 27 | GTGACACATTTGTTTGAGAATC | 4342 |
| Target Sequence | | |
| MG29-1 Guide 28 | TGACACATTTGTTTGAGAATCA | 4343 |
| Target Sequence | | |
| MG29-1 Guide 29 | GTTTGAGAATCAAAATCGGTGA | 4344 |
| Target Sequence | | |
| MG29-1 Guide 30 | TTTGAGAATCAAAATCGGTGAA | 4345 |
| Target Sequence | | |
| MG29-1 Guide 31 | GAGAATCAAAATCGGTGAATAG | 4346 |
| Target Sequence | | |
| MG29-1 Guide 32 | AGAATCAAAATCGGTGAATAGG | 4347 |
| Target Sequence | | |
| MG29-1 Guide 33 | TCACTGGATTTAGAGTCTCTCA | 4348 |
| Target Sequence | | |
| MG29-1 Guide 34 | AGAGTCTCTCAGCTGGTACACG | 4349 |
| Target Sequence | | |
| MG29-1 Guide 35 | GAGTCTCTCAGCTGGTACACGG | 4350 |
| Target Sequence | | |
| MG29-1 Guide 36 | CTGTGATGTCAAGCTGGTCGAG | 4351 |
| Target Sequence | | |
| MG29-1 Guide 37 | CAAAGCTTTTCTCGACCAGCTT | 4352 |
| Target Sequence | | |
| MG29-1 Guide 38 | AAAGCTTTTCTCGACCAGCTTG | 4353 |
| Target Sequence | | |
| MG29-1 Guide 39 | TCTCGACCAGCTTGACATCACA | 4354 |
| Target Sequence | | |
| MG29-1 Guide 40 | CTCGACCAGCTTGACATCACAG | 4355 |
| Target Sequence | | |
| MG29-1 Guide 41 | TCGACCAGCTTGACATCACAGG | 4356 |
| Target Sequence | | |
| MG29-1 Guide 42 | CAAAACCTGTCAGTGATTGGGT | 4357 |
| Target Sequence | | |
| MG29-1 Guide 43 | AAAACCTGTCAGTGATTGGGTT | 4358 |
| Target Sequence | | |
| MG29-1 Guide 44 | GGTTCCGAATCCTCCTCCTGAA | 4359 |
| Target Sequence | | |
| MG29-1 Guide 45 | CGAATCCTCCTCCTGAAAGTGG | 4360 |
| Target Sequence | | |
| MG29-1 Guide 46 | AATCTGCTCATGACGCTGCGGC | 4361 |
| Target Sequence | | |
| MG29-1 Guide 47 | ATCTGCTCATGACGCTGCGGCT | 4362 |
| Target Sequence | | |
| MG29-1 Guide 48 | AACCCGGCCACTTTCAGGAGGA | 4363 |
| Target Sequence | | |
| MG29-1 Guide 49 | CAGGAGGAGGATTCGGAACCCA | 4364 |
| Target Sequence | | |
| MG29-1 Guide 50 | AGGAGGAGGATTCGGAACCCAA | 4365 |
| Target Sequence | | |
| MG29-1 Guide 51 | GGAACCCAATCACTGACAGGTT | 4366 |
| Target Sequence | | |
| MG29-1 Guide 52 | TGAAAGTTTAGGTTCGTATCTG | 4367 |
| Target Sequence | | |
| MG29-1 Guide 53 | GAAAGTTTAGGTTCGTATCTGT | 4368 |
| Target Sequence | | |
| MG29-1 Guide 54 | AAAGTTTAGGTTCGTATCTGTA | 4369 |
| Target Sequence | | |
| MG29-1 Guide 1 | /AltR1/rUrArArUrUrUrCrUrArCrUrGrUrUrGrUrArGrArUrAr | 4370 |
| sgRNA synthesized | CrCrGrArUrUrUrUrGrArUrUrCrUrCrArArArCrArA/AltR2/ | |
| MG29-1 Guide 2 | /AHR1/rUrArArUrUrUrCrUrArCrUrGrUrUrGrUrArGrArUrUr | 4371 |
| sgRNA synthesized | GrArUrUrCrUrCrArArArCrArArArUrGrUrGrUrCrA/AltR2/ | |
| MG29-1 Guide 3 | /AltR1/rUrArArUrUrUrCrUrArCrUrGrUrUrGrUrArGrArUrGr | 4372 |
| sgRNA synthesized | ArUrUrCrUrCrArArArCrArArArUrGrUrGrUrCrArC/A1tR2/ | |
| MG29-1 Guide 4 | /AltR1/rUrArArUrUrUrCrUrArCrUrGrUrUrGrUrArGrArUrAr | 4373 |
| sgRNA synthesized | UrUrCrUrCrArArArCrArArArUrGrUrGrUrCrArCrA/AltR2/ | |
| MG29-1 Guide 5 | /AltRl/rUrArArUrUrUrCrUrArCrUrGrUrUrGrUrArGrArUrUr | 4374 |
| sgRNA synthesized | CrArArArCrArArArUrGrUrGrUrCrArCrArArArGrU/AltR2/ | |
| MG29-1 Guide 6 | /AltR1/rUrArArUrUrUrCrUrArCrUrGrUrUrGrUrArGrArUrUr | 4375 |
| sgRNA synthesized | GrArUrGrUrGrUrArUrArUrCrArCrArGrArCrArArA/AltR2/ | |
| MG29-1 Guide 7 | /AltR1/rUrArArUrUrUrCrUrArCrUrGrUrUrGrUrArGrArUrAr | 4376 |
| sgRNA synthesized | ArGrArGrCrArArCrArGrUrGrCrUrGrUrGrGrCrCrU/AltR2/ | |
| MG29-1 Guide 8 | /AltR1/rUrArArUrUrUrCrUrArCrUrGrUrUrGrUrArGrArUrGr | 4377 |
| sgRNA synthesized | CrArUrGrUrGrCrArArArCrGrCrCrUrUrCrArArCrA/AltR2/ | |
| MG29-1 Guide 9 | /AltR1/rUrArArUrUrUrCrUrArCrUrGrUrUrGrUrArGrArUrCr | 4378 |
| sgRNA synthesized | ArUrGrUrGrCrArArArCrGrCrCrUrUrCrArArCrArA/AltR2/ | |
| MG29-1 Guide 10 | /AltR1/rUrArArUrUrUrCrUrArCrUrGrUrUrGrUrArGrArUrAr | 4379 |
| sgRNA synthesized | ArCrArArCrArGrCrArUrUrArUrUrCrCrArGrArArG/AltR2/ | |
| MG29-1 Guide 11 | /AltR1/rUrArArUrUrUrCrUrArCrUrGrUrUrGrUrArGrArUrUr | 4380 |
| sgRNA synthesized | UrCrCrArGrArArGrArCrArCrCrUrUrCrUrUrCrCrC/AltR2/ | |
| MG29-1 Guide 12 | /AltR1/rUrArArUrUrUrCrUrArCrUrGrUrUrGrUrArGrArUrCr | 4381 |
| sgRNA synthesized | ArGrArArGrArCrArCrCrUrUrCrUrUrCrCrCrCrArG/AllR2/ | |
| MG29-1 Guide 13 | /AltR1/rUrArArUrUrUrCrUrArCrUrGrUrUrGrUrArGrArUrUr | 4382 |
| sgRNA synthesized | GrGrArArUrArArUrGrCrUrGrUrUrGrUrUrGrArArG/AltR2/ | |
| MG29-1 Guide 14 | /AltR1/rUrArArUrUrUrCrUrArCrUrGrUrUrGrUrArGrArUrUr | 4383 |
| sgRNA synthesized | UrGrArArGrGrCrGrUrUrUrGrCrArCrArUrGrCrArA/AltR2/ | |
| MG29-1 Guide 15 | /AltR1/rUrArArUrUrUrCrUrArCrUrGrUrUrGrUrArGrArUrAr | 4384 |
| sgRNA synthesized | ArGrGrCrGrUrUrUrGrCrArCrArUrGrCrArArArGrU/AltR2/ | |
| MG29-1 Guide 16 | /AltR1/rUrArArUrUrUrCrUrArCrUrGrUrUrGrUrArGrArUrGr | 4385 |
| sgRNA synthesized | CrArCrArUrGrCrArArArGrUrCrArGrArUrUrUrGrU/AllR2/ | |
| MG29-1 Guide 17 | /AltR1/rUrArArUrUrUrCrUrArCrUrGrUrUrGrUrArGrArUrCr | 4386 |
| sgRNA synthesized | ArCrArUrGrCrArArArGrUrCrArGrArUrUrUrGrUrU/AHR2/ | |
| MG29-1 Guide 18 | /A1tR1/rUrArArUrUrUrCrUrArCrUrGrUrUrGrUrArGrArUrGr | 4387 |
| sgRNA synthesized | UrUrGrCrUrCrCrArGrGrCrCrArCrArGrCrArCrUrG/AltR2/ | |
| MG29-1 Guide 19 | /AltR1/rUrArArUrUrUrCrUrArCrUrGrUrUrGrUrArGrArUrUr | 4388 |
| sgRNA synthesized | UrGrCrUrCrCrArGrGrCrCrArCrArGrCrArCrUrGrU/AltR2/ | |
| MG29-1 Guide 20 | /AltR1/rUrArArUrUrUrCrUrArCrUrGrUrUrGrUrArGrArUrCr | 4389 |
| sgRNA synthesized | UrCrCrArGrGrCrCrArCrArGrCrArCrUrGrUrUrGrC/AltR2/ | |
| MG29-1 Guide 21 | /AltR1/rUrArArUrUrUrCrUrArCrUrGrUrUrGrUrArGrArUrCr | 4390 |
| sgRNA synthesized | UrCrUrUrGrArArGrUrCrCrArUrArGrArCrCrUrCrA/AltR2/ | |
| MG29-1 Guide 22 | /AltR1/rUrArArUrUrUrCrUrArCrUrGrUrUrGrUrArGrArUrAr | 4391 |
| sgRNA synthesized | ArGrUrCrCrArUrArGrArCrCrUrCrArUrGrUrCrUrA/AltR2/ | |
| MG29-1 Guide 23 | /AltR1/rUrArArUrUrUrCrUrArCrUrGrUrUrGrUrArGrArUrUr | 4392 |
| sgRNA synthesized | GrUrCrUrGrUrGrArUrArUrArCrArCrArUrCrArGrA/AltR2/ | |
| MG29-1 Guide 24 | /AltR1/rUrArArUrUrUrCrUrArCrUrGrUrUrGrUrArGrArUrGr | 4393 |
| sgRNA synthesized | UrCrUrGrUrGrArUrArUrArCrArCrArUrCrArGrArA/AltR2/ | |
| MG29-1 Guide 25 | /AltR1/rUrArArUrUrUrCrUrArCrUrGrUrUrGrUrArGrArUrUr | 4394 |
| sgRNA synthesized | CrUrGrUrGrArUrArUrArCrArCrArUrCrArGrArArU/AltR2/ | |
| MG29-1 Guide 26 | /AltR1/rUrArArUrUrUrCrUrArCrUrGrUrUrGrUrArGrArUrCr | 4395 |
| sgRNA synthesized | UrUrUrGrUrGrArCrArCrArUrUrUrGrUrUrUrGrArG/AltR2/ | |
| MG29-1 Guide 27 | /AltR1/rUrArArUrUrUrCrUrArCrUrGrUrUrGrUrArGrArUrGr | 4396 |
| sgRNA synthesized | UrGrArCrArCrArUrUrUrGrUrUrUrGrArGrArArUrC/AltR2/ | |
| MG29-1 Guide 28 | /AltR1/rUrArArUrUrUrCrUrArCrUrGrUrUrGrUrArGrArUrUr | 4397 |
| sgRNA synthesized | GrArCrArCrArUrUrUrGrUrUrUrGrArGrArArUrCrA/AltR2/ | |
| MG29-1 Guide 29 | /A1tR1/rUrArArUrUrUrCrUrArCrUrGrUrUrGrUrArGrArUrGr | 4398 |
| sgRNA synthesized | UrUrUrGrArGrArArUrCrArArArArUrCrGrGrUrGrA/AltR2/ | |
| MG29-1 Guide 30 | /AltR1/rUrArArUrUrUrCrUrArCrUrGrUrUrGrUrArGrArUrUr | 4399 |
| sgRNA synthesized | UrUrGrArGrArArUrCrArArArArUrCrGrGrUrGrArA/AltR2/ | |
| MG29-1 Guide 31 | /AltR1/rUrArArUrUrUrCrUrArCrUrGrUrUrGrUrArGrArUrGr | 4400 |
| sgRNA synthesized | ArGrArArUrCrArArArArUrCrGrGrUrGrArArUrArG/AltR2/ | |
| MG29-1 Guide 32 | /AltRl/rUrArArUrUrUrCrUrArCrUrGrUrUrGrUrArGrArUrAr | 4401 |
| sgRNA synthesized | GrArArUrCrArArArArUrCrGrGrUrGrArArUrArGrG/AltR2/ | |
| MG29-1 Guide 33 | /AltR1/rUrArArUrUrUrCrUrArCrUrGrUrUrGrUrArGrArUrUr | 4402 |
| sgRNA synthesized | CrArCrUrGrGrArUrUrUrArGrArGrUrCrUrCrUrCrA/AltR2/ | |
| MG29-1 Guide 34 | /AltR1/rUrArArUrUrUrCrUrArCrUrGrUrUrGrUrArGrArUrAr | 4403 |
| sgRNA synthesized | GrArGrUrCrUrCrUrCrArGrCrUrGrGrUrArCrArCrG/AltR2/ | |
| MG29-1 Guide 35 | /AltR1/rUrArArUrUrUrCrUrArCrUrGrUrUrGrUrArGrArUrGr | 4404 |
| sgRNA synthesized | ArGrUrCrUrCrUrCrArGrCrUrGrGrUrArCrArCrGrG/AltR2/ | |
| MG29-1 Guide 36 | /AltR1/rUrArArUrUrUrCrUrArCrUrGrUrUrGrUrArGrArUrCr | 4405 |
| sgRNA synthesized | UrGrUrGrArUrGrUrCrArArGrCrUrGrGrUrCrGrArG/AltR2/ | |
| MG29-1 Guide 37 | /AltR1/rUrArArUrUrUrCrUrArCrUrGrUrUrGrUrArGrArUrCr | 4406 |
| sgRNA synthesized | ArArArGrCrUrUrUrUrCrUrCrGrArCrCrArGrCrUrU/AltR2/ | |
| MG29-1 Guide 38 | /AltR1/rUrArArUrUrUrCrUrArCrUrGrUrUrGrUrArGrArUrAr | 4407 |
| sgRNA synthesized | ArArGrCrUrUrUrUrCrUrCrGrArCrCrArGrCrUrUrG/AltR2/ | |
| MG29-1 Guide 39 | /AltR1/rUrArArUrUrUrCrUrArCrUrGrUrUrGrUrArGrArUrUr | 4408 |
| sgRNA synthesized | CrUrCrGrArCrCrArGrCrUrUrGrArCrArUrCrArCrA/AltR2/ | |
| MG29-1 Guide 40 | /AltR1/rUrArArUrUrUrCrUrArCrUrGrUrUrGrUrArGrArUrCr | 4409 |
| sgRNA synthesized | UrCrGrArCrCrArGrCrUrUrGrArCrArUrCrArCrArG/AltR2/ | |
| MG29-1 Guide 41 | /AltR1/rUrArArUrUrUrCrUrArCrUrGrUrUrGrUrArGrArUrUr | 4410 |
| sgRNA synthesized | CrGrArCrCrArGrCrUrUrGrArCrArUrCrArCrArGrG/AltR2/ | |
| MG29-1 Guide 42 | /AltR1/rUrArArUrUrUrCrUrArCrUrGrUrUrGrUrArGrArUrCr | 4411 |
| sgRNA synthesized | ArArArArCrCrUrGrUrCrArGrUrGrArUrUrGrGrGrU/AltR2/ | |
| MG29-1 Guide 43 | /AltR1/rUrArArUrUrUrCrUrArCrUrGrUrUrGrUrArGrArUrAr | 4412 |
| sgRNA synthesized | ArArArCrCrUrGrUrCrArGrUrGrArUrUrGrGrGrUrU/AltR2/ | |
| MG29-1 Guide 44 | /AltR1/rUrArArUrUrUrCrUrArCrUrGrUrUrGrUrArGrArUrGr | 4413 |
| sgRNA synthesized | GrUrUrCrCrGrArArUrCrCrUrCrCrUrCrCrUrGrArA/AltR2/ | |
| MG29-1 Guide 45 | /A1tR1/rUrArArUrUrUrCrUrArCrUrGrUrUrGrUrArGrArUrCr | 4414 |
| sgRNA synthesized | GrArArUrCrCrUrCrCrUrCrCrUrGrArArArGrUrGrG/AltR2/ | |
| MG29-1 Guide 46 | /AltR1/rUrArArUrUrUrCrUrArCrUrGrUrUrGrUrArGrArUrAr | 4415 |
| sgRNA synthesized | ArUrCrUrGrCrUrCrArUrGrArCrGrCrUrGrCrGrGrC/AltR2/ | |
| MG29-1 Guide 47 | /AltR1/rUrArArUrUrUrCrUrArCrUrGrUrUrGrUrArGrArUrAr | 4416 |
| sgRNA synthesized | UrCrUrGrCrUrCrArUrGrArCrGrCrUrGrCrGrGrCrU/AltR2/ | |
| MG29-1 Guide 48 | /AltR1/rUrArArUrUrUrCrUrArCrUrGrUrUrGrUrArGrArUrAr | 4417 |
| sgRNA synthesized | ArCrCrCrGrGrCrCrArCrUrUrUrCrArGrGrArGrGrA/AltR2/ | |
| MG29-1 Guide 49 | /AltR1/rUrArArUrUrUrCrUrArCrUrGrUrUrGrUrArGrArUrCr | 4418 |
| sgRNA synthesized | ArGrGrArGrGrArGrGrArUrUrCrGrGrArArCrCrCrA/AltR2/ | |
| MG29-1 Guide 50 | /AltR1/rUrArArUrUrUrCrUrArCrUrGrUrUrGrUrArGrArUrAr | 4419 |
| sgRNA synthesized | GrGrArGrGrArGrGrArUrUrCrGrGrArArCrCrCrArA/AltR2/ | |
| MG29-1 Guide 51 | /AltR1/rUrArArUrUrUrCrUrArCrUrGrUrUrGrUrArGrArUrGr | 4420 |
| sgRNA synthesized | GrArArCrCrCrArArUrCrArCrUrGrArCrArGrGrUrU/A1tR2/ | |
| MG29-1 Guide 52 | | 4421 |
| sgRNA synthesized | GrArArArGrUrUrUrArGrGrUrUrCrGrUrArUrCrUrG/AltR2/ | |
| MG29-1 Guide 53 | /AltR1/rUrArArUrUrUrCrUrArCrUrGrUrUrGrUrArGrArUrGr | 4422 |
| sgRNA synthesized | ArArArGrUrUrUrArGrGrUrUrCrGrUrArUrCrUrGrU/AltR2/ | |
| MG29-1 Guide 54 | /AltR1/rUrArArUrUrUrCrUrArCrUrGrUrUrGrUrArGrArUrAr | 4423 |
| sgRNA synthesized | ArArGrUrUrUrArGrGrUrUrCrGrUrArUrCrUrGrUrA/AltR2/ | |

### Example 19—Re-Testing of Lead Guides of MG29-1

[0303] An experiment retesting the lead guides for MG29-1 was performed. The three exons of the T cell receptor alpha chain constant region were scanned for sequences matching 5′-TTN-3′ and single-guide RNAs ordered from IDT using Alt-R modifications. All guide spacer sequences 22 nt long. Guides were mixed with purified MG29-1 protein (80 pmol gRNA+63 pmol MG29-1; or 160 pmol gRNA with 126 pmol MG29-1), incubated for 15 minutes at room temperature. T cells were purified from PBMCs by negative selection using (Stemcell Technologies Human T cell Isolation Kit #17951) and activated by CD2/3/28 beads (Miltenyi T cell Activation/Expansion Kit #130-091-441). After four days of cell growth, each MG29-1/guide RNA mixture was electroporated into 200,000 T cells with a Lonza 4-D Nucleofector, using program EO-115 and P3 buffer. Seventy-two hours post-transfection, genomic DNA was harvested, and PCR amplified for analysis using high-throughput DNA sequencing. The creation of insertions and deletions typical of NHEJ-based gene editing was quantified using a proprietary Python script (see FIG. 40).

### Example 20—Testing Length of Guide Spacer for MG29-1

[0304] An experiment was performed to determine the optimal guide spacer length. The three exons of the T cell receptor alpha chain constant region were scanned for sequences matching 5′-TTN-3′ and single-guide RNAs ordered from IDT using Alt-R modifications. Guides were mixed with purified MG29-1 protein (80 pmol gRNA+60 pmol effector; 160 pmol gRNA+120 pmol effector; or 320 pmol gRNA+240 pmol effector), incubated for 15 minutes at room temperature. T cells were purified from PBMCs by negative selection using (Stemcell Technologies Human T cell Isolation Kit #17951) and activated by CD2/3/28 beads (Miltenyi T cell Activation/Expansion Kit #130-091-441). After four days of cell growth, each MG29-1/guide RNA mixture was electroporated into 200,000 T cells with a Lonza 4-D Nucleofector, using program EO-115 and P3 buffer. Seventy-two hours post-transfection, genomic DNA was harvested, and PCR amplified for analysis using high-throughput DNA sequencing. The creation of insertions and deletions typical of NHEJ-based gene editing was quantified using a proprietary Python script. The results are shown in FIG. 41, which demonstrates that guide spacer lengths of 20-24 nt work well, with a dropoff at 19 nt.

### Example 21—Determination of MG29-1 Indel Generation Versus TCR Expression

[0305] Cells from FIG. 41 were analyzed for TCR expression by flow cytometry using the APC-labeled anti-human TCRα/β Ab (Biolegend #306718, clone IP26) and an Attune NxT flow cytometer (Thermo Fisher). Indel data are taken from FIG. 41.

### Example 22—Targeted CAR Integration with MG29-1

[0306] The three exons of the T cell receptor alpha chain constant region were scanned for sequences matching 5′-TTN-3′ and single-guide RNAs ordered from IDT using IDT's proprietary Alt-R modifications. Guides (80 pmol) were mixed with purified MG29-1 protein (63 pmol), incubated for 15 minutes at room temperature. T cells were purified from PBMCs by negative selection using (Stemcell Technologies Human T cell Isolation Kit #17951) and activated by CD2/3/28 beads (Miltenyi T cell Activation/Expansion Kit #130-091-441). After four days of cell growth, each MG29-1/guide RNA mixture was electroporated into 200,000 T cells with a Lonza 4-D Nucleofector, using program EO-115 and P3 buffer. 100,000 vector genomes of a serotype 6 adeno-associated virus (AAV-6) containing the coding sequence for a customized chimeric antigen receptor flanked by 5′ and 3′ homology arms (5′ arm SEQ ID NO: 4424 being about 500 nt in length and 3′ arm SEQ ID NO: 4425 being about 500 nt in length) targeting the TRAC gene were added to the cells immediately following transfection. Replicates were analyzed for TCR expression versus TRAC indels (FIG. 42), showing that indels in the TRAC gene correlated with loss of expression of TCR. Cells were also analyzed by flow cytometry simultaneously for TCR expression as in Example 21 (FIG. 42) and for binding of the target antigen to the CAR (FIG. 43, in which the plots are gated on single, live cells). The results of the flow analysis in FIG. 43 indicated that while the guide RNAs alone were effective in eliminating TCR expression (“RNP only”), addition of guide RNA plus AAV resulted in a new population of cells binding the CAR antigen (top left of plots “AAV+MG29-1-19-22” and “AAV+MG29-1-35-22”). The sgRNA 35 (SEQ ID NO: 4404) was somewhat more effective in inducing integration of the CAR than sgRNA 19 (SEQ ID NO: 4388). One possible explanation for the difference is that the predicted nuclease cut site for Guide 19 is ˜160 bp away from the end of the right homology arm.

TABLE 5B
Guide RNAs used in Example 22

| Entity Name | Sequence | SEQ ID NO: |
|---|---|---|
| MG29-1 TRAC Guide | TTGCTCCAGGCCACAGCACTGT | 4334 |
| 19 Target-binding | | |
| Sequence | | |
| MG29-1 TRAC Guide | /AltR1/rUrArArUrUrUrCrUrArCrUrGrUrUrGrUrArGrArUrUr | 4388 |
| 19 full sgRNA | UrGrCrUrCrCrArGrGrCrCrArCrArGrCrArCrUrGrU/AltR2/ | |
| synthesized | | |
| MG29-1 TRAC Guide | GAGTCTCTCAGCTGGTACACGG | 4350 |
| 35 Target-binding | | |
| Sequence | | |
| MG29-1 TRAC Guide | /AltR1/rUrArArUrUrUrCrUrArCrUrGrUrUrGrUrArGrArUrGr | 4404 |
| 35 full sgRNA | ArGrUrCrUrCrUrCrArGrCrUrGrGrUrArCrArCrGrG/AltR2/ | |
| synthesized | | |

/AltR1/ and /AltR2/ refer to IDT's proprietary Alt-R 5′ and 3′ modifications; m; 2′-O-methyl base (for example an A base with 2′-O-methyl modification is written as mA), i2F; internal 2′-flourine base (for example an internal C with 2′-flourine modification is written as /i2FC/), 52F; 2′-flourine base at the 5′ end of the sequence (for example a 5′ C with 2′-flourine modification is written as /52FC/), 32F; 2′-flourine base at the 3′ end of the sequence (for example a 3′ A base with 2′-flourine modification is written as /32FA/), r; native RNA linkage comprising the sugar ribose (for example the ribose or RNA form of the A base is written rA), d; deoxyribose sugar (DNA) linkage (for example a deoxyribose form of the A base is written dA), *; between bases in which one of the oxygen molecules in the phosphodiester bond is replaced with sulfur

### Example 23—MG29-1 TRAC Editing in HSCs

[0307] Hematopoietic stem cells were purchased from Allcells and thawed per the supplier's instructions, washed in DMEM+10% FBS, and resuspended in Stemspan II medium plus CC110 cytokines. One million cells were cultured for 72 hours in a 6-well dish in 4 mL medium. MG29-1 RNPs were made, transfected, and gene editing analyzed as in Example 18 except for use of the EO-100 nucleofection program. The results are shown in FIG. 56, which shows gene editing at TRAC in hematopoietic stem cells using the #19 (SEQ ID NO:4388) and #35 (SEQ ID NO: 4404) sgRNAs in Table 5B below. The results again indicate that the #35 sgRNA is highly effective at targeting the TRAC locus.

TABLE 5C
Guide RNAs used in Example 23

| Entity Name | Sequence | SEQ ID NO: |
|---|---|---|
| MG29-1 TRAC Guide | TTGCTCCAGGCCACAGCACTGT | 4334 |
| 19 Target-binding | | |
| Sequence | | |
| MG29-1 TRAC Guide | /AltR1/rUrArArUrUrUrCrUrArCrUrGrUrUrGrUrArGrArUrUr | 4388 |
| 19 full sgRNA | UrGrCrUrCrCrArGrGrCrCrArCrArGrCrArCrUrGrU/AltR2/ | |
| synthesized | | |
| MG29-1 TRAC Guide | GAGTCTCTCAGCTGGTACACGG | 4350 |
| 35 Target-binding | | |
| Sequence | | |
| MG29-1 TRAC Guide | /AltR1/rUrArArUrUrUrCrUrArCrUrGrUrUrGrUrArGrArUrGr | 4404 |
| 35 full sgRNA | ArGrUrCrUrCrUrCrArGrCrUrGrGrUrArCrArCrGrG/AltR2/ | |
| synthesized | | |

/AltR1/ and /AltR2/ refer to IDT's proprietary Alt-R 5′ and 3′ modifications; m; 2′-O-methyl base (for example an A base with 2′-O-methyl modification is written as mA), i2F; internal 2′-flourine base (for example an internal C with 2′-flourine modification is written as /i2FC/), 52F; 2′-flourine base at the 5′ end of the sequence (for example a 5′ C with 2′-flourine modification is written as /52FC/), 32F; 2′-flourine base at the 3′ end of the sequence (for example a 3′ A base with 2′-flourine modification is written as /32FA/), r; native RNA linkage comprising the sugar ribose (for example the ribose or RNA form of the A base is written rA), d; deoxyribose sugar (DNA) linkage (for example a deoxyribose form of the A base is written dA), *; between bases in which one of the oxygen molecules in the phosphodiester bond is replaced with sulfur

### Example 24—Further Analysis of PAM Specificity Associated with MG29-1

[0308] Further analysis was performed to determine more precisely the PAM specificity of MG29-1. Guide RNAs were designed using a 5′-NTTN-3′ PAM sequence and then sorted according to the gene editing activity observed (FIG. 45, in which the identity of the underlined base—the 5′-proximal N is shown for each bin). All of the guides with activity greater than 10% had a T at this position in the genomic DNA indicating that the MG29-1 PAM may be better described as 5′-TTTN-3′. The statistical significance of the over-representation of T at this position is shown for each bin. In FIG. 45, the various bins (High, medium, low, >1%, <1%) signify:
[0309] High: >50% indels (N=4)
[0310] Medium: 10-50% indels (N=15)
[0311] Low: 5-10% indels (N=5)
[0312] >1%: 1-5% indels (N=12)
[0313] <1% (N=82)

TABLE 6
p-values for nucleotide specificity
analysis in Example 24

| | chi\hat{ }2 p-value |
|---|---|
| high/med | 0.000005 |
| low | 0.035110 |
| >1% | 0.005416 |
| <1% | 0.126751 |

### Example 25—Determining MG29-1 Indel Induction Ability Vs Spacer Base Composition

[0314] Further analysis was conducted of gene editing activity versus the base composition of MG29-1 spacer sequences. The correlation was modest (R\hat{ }2=0.23) but there is a trend towards better activity with higher GC content (see FIG. 46, in which correlation between indels induced in cultured cells versus GC content of spacer sequences is presented as a dot plot).

### Example 26—MG29-1 Guide Chemistry Modifications

[0315] An experiment to optimize chemical modifications for targeting of the VEGF-A locus using MG29-1 was performed, using the procedure of Example 18 but with the indicated guide RNAs targeting VEGF-A (see Table 7 below). The experiment used 126 pmol MG29-1 and 160 pmol guide RNA. The results are presented in FIG. 47. Guides #4, 5, 6, 7, and 8 showed improved activity versus the unmodified guide #1, indicating that the corresponding modifications in these sequences improved the activity of these guide RNAs versus an unmodified RNA sequence.

TABLE 7
MG29-1 guide modifications

| MG29- | | |
|---|---|---|
| 1 Test | MG29-1 guide with targeting | |
| No. | sequence in bold and modifications per legend below | SEQ ID NO: |
| 1 | UAAUUUCUACUCUUGUAGAUGAAAGGGGGTGGGGGGAGTTTGCT | 3985 |
| 2 | mu*mA*mA*UUUCUACUCUUGUAGAUGAAAGGGGGTGGGGGGAGTTT*mG*mC*mT | 3986 |
| 3 | mu*mA*AUUUCUACUCUUGUAGAUGAAAGGGGGTGGGGGGAGTTT*mG*mC*mT | 3987 |
| 4 | mu*AAUUUCUACUCUUGUAGAUGAAAGGGGGTGGGGGGAGTTT*mG*mC*mT | 3988 |
| 5 | mu*AAUUUCUACUCUUGUAGAUGAAAGGGGGTGGGGGGAGTTTGC*mT | 3989 |
| 6 | mc*UAAUUUCUACUCUUGUAGAUGAAAGGGGGTGGGGGGAGTTT*mG*mC*mT | 3990 |
| 7 | mc*u*AAUUUCUACUCUUGUAGAUGAAAGGGGGTGGGGGGAGTTTG*C*mT | 3991 |
| 8 | /AltR1/UAAUUUCUACUCUUGUAGAUGAAAGGGGGTGGGGGGAGTTTGCT/AltR2/ | 3992 |

Legend: /AltR1/ and /AltR2/ refer to IDT's proprietary Alt-R 5′ and 3′ modifications; m; 2′-O-methyl base (for example a base with 2′-O-methyl modification is written as mA), i2F; internal 2′-flourine base (for example an internal C with 2′-flourine modification is written as /i2FC/), 52F; 2′-flourine base at the 5′ end of the sequence (for example a 5′ C with 2′-flourine modification is written as /52FC/), 32F; 2′-flourine base at the 3′ end of the sequence (for example a 3′ A base with 2′-flourine modification is written as /32FA/), r; native RNA linkage comprising the sugar ribose (fro example the ribose or RNA form of the A base is written rA), d; deoxyribose sugar (DNA) linkage (for example a deoxyribose form of the A base is written dA), *; between bases in which one of the oxygen molecules in the phosphodiester bond is replaced with sulfur

### Example 27—Titration of Modified MG29-1 Guides from Example 26

[0316] A further experiment was performed to determine the dose dependence of the activity of the modified guides used in Example 26 to identify possible dose-dependent toxicity effects. The experiment was performed as in Example 26 but with ¼th (B), ⅛th (C), 1/16th (D), and 1/32nd (E) of the starting dose (A, 126 pmol MG29-1 and 160 pmol guide RNA). The results are presented in FIG. 48).

### Example 28—Large Scale Synthesis of Nucleases Described Herein

### Project Overview

[0317] Production of Metagenomi's Type V-A CRISPR nuclease, MG29-1, is scaled up to an initial culture volume of 10 L. An expression screen, scaled-up expression, downstream development, a formulation study, and delivery of purified protein >=90% by SDS-PAGE are performed.

### Expression and Purification Screen

[0318] Expression of MG29-1 from the pMG450 vector depicted in FIG. 49 is tested while varying the following conditions: host strain, expression media, inducer, induction time, and temperature. Total soluble protein extracted from E. coli cell paste is analyzed by SDS-PAGE for all conditions. Immobilized metal affinity chromatography (IMAC) pull-down followed by SDS-PAGE is performed on the top three expression conditions to estimate yield and purity and to identify the optimal expression condition. A scaled-up method is developed for lysis. Critical parameters are identified for purification by IMAC and subtractive IMAC (including tobacco etch virus protease (TEV) cleavage). Column fractions are tested using SDS-PAGE. Elution pools are tested using SDS-PAGE and photometric absorbance at 280 nm (A280). A method for buffer exchange and concentration by tangential flow filtration (TFF) is developed.

[0319] An additional chromatography step is developed to achieve ≥90% purity, if necessary. One chromatography mode is tested (e.g., ceramic hydroxyapatite chromatography). Up to 8 unique conditions are tested (e.g., 2-6 resins each with 2-3 buffer systems). Column fractions are tested using SDS-PAGE. Elution pools are tested using SDS-PAGE and A280. One condition is selected, and a three-condition load study is performed. Column fractions and elution pools are analyzed as described above. A method for buffer exchange may be developed and concentration by TFF.

[0320] Transform E. coli, prepare culture in shake flasks and induce using materials and methods according to the optimal expression conditions identified during the expression screen. Harvest cell paste and verify expression by SDS-PAGE. Report results and use cell paste as starting material for purification. Cell culture volume is limited to 20 L. Purify up to 1 gram of protein using methods developed during downstream method development. Formulate into final storage buffer and perform the following QC tests: Yield and concentration by A280 and purity by SDS-PAGE.

### Formulation Study

[0321] Using purified protein, a formulation study is conducted to determine the optimal storage conditions for the purified protein. Study may explore concentration, storage buffer, storage temperature, maximum freeze/thaw cycles, storage time, or other conditions.

### Example 29—Demonstration of the Ability of Nucleases Described Herein to Edit an Intronic Region in Cultured Mouse Liver Cells

[0322] Intronic regions of expressed genes are attractive genomic targets to integrate a coding sequence of a therapeutic protein of interest with the goal of expressing that protein to treat or cure a disease. Integration of a protein coding sequence may be accomplished by creating a double strand break within the intron using a sequence specific nuclease in the presence of an exogenously supplied donor template. The donor template may be integrated into the double strand break via one of two main cellular repair pathways called homology directed repair (HDR) and non-homologous end joining (NHEJ) resulting in targeted integration of the donor template. The NHEJ pathway is dominant in non-dividing cells while the HDR pathway is primarily active only in dividing cells. The liver is a particularly attractive tissue for targeted integration of a protein coding sequence due to the availability of in vivo delivery systems and the ability of the liver to express and secrete proteins with high efficiency.

[0323] To evaluate the potential of MG29-1 to create double strand breaks at intronic regions the intron 1 of serum albumin was selected as the target locus. Single guide RNA (sgRNA) with a spacer length of 22 nt targeted to mouse albumin intron 1 were identified using the guide finding algorithm in the Geneious Prime nucleic acid analysis software (https://www.geneious.com/prime/). Using a PAM of KTTG (SEQ ID NO: 3870) located 5′ to the spacer, a total of 112 potential sgRNA were identified within mouse albumin intron 1. Guides that spanned the intron/exon boundaries were excluded. Using Geneious Prime the spacer sequences of these 112 guides were searched against the mouse genome and a specificity score was assigned by the software based on the alignment to additional sites in the genome. Spacer sequences with 4 or more contiguous bases of the same base were excluded due to concerns about specificity. A total of 12 spacers with the highest specificity scores were selected for testing. To create the sgRNA the backbone sequence of “TAATTTCTACTGTTGTAGAT” was added to the 3′ end of the spacer sequence. The sgRNA was chemically synthesized incorporating chemically modified bases known to improve the performance of sgRNA for cpf1 guides (AltR1/AltR2 chemistry available from Integrated DNA Technologies). The spacer sequences of these guides are listed in Table 8 below.

TABLE 8
Activity of MG29-1 sgRNA targeting mouse albumin intron 1 in Hepa1-6 cells
nucleofected with MG29-1/sgRNA RNP or transfected with MG29-1 mRNA and sgRNA using
Messenger Max

| | | | | | | Activity (INDEL %) | |
|---|---|---|---|---|---|---|---|
| | | | | | | in Hepal-6 cells | |
| | | SEQ | | | | | mRNA/sgRNA |
| sgRNA | Spacer (DNA | ID | | SEQ ID | Specificity | RNP | lipid |
| name | sequence, no PAM) | NO: | PAM | NO: | score | nucleofection | transfection |
| mAlb29-1-1 | GTATAGCATGGTCGAGCAG | 3993 | TTTA | 4012 | 98.5 | 86.5 | 43 |
| | GCA | | | | | | |
| mAlb29-1-2 | CCGATCGTTACAGGAAAAT | 3994 | GTTC | 4013 | 98.4 | 0 | 0 |
| | CTG | | | | | | |
| mAlb29-1-3 | AATTTATTACGGTCTCATA | 3995 | GTTG | 4014 | 98.2 | 0 | 0 |
| | GGG | | | | | | |
| mAlb29-1-4 | TTACGGTCTCATAGGGCCT | 3996 | TTTA | 4015 | 97.6 | 43.5 | 44 |
| | GCC | | | | | | |
| mAlb29-1-5 | CCTGTAACGATCGGGAACT | 3997 | TTTT | 4016 | 97.2 | 3 | 0 |
| | GGC | | | | | | |
| mAlb29-1-7 | AGTATAGCATGGTCGAGCA | 3998 | TTTT | 4017 | 96.8 | 11 | 15 |
| | GGC | | | | | | |
| mAlb29-1-8 | CTGTAACGATCGGGAACTG | 3999 | TTTC | 4018 | 95.9 | 77 | 45 |
| | GCA | | | | | | |
| mAlb29-1-9 | GATACAGTTGAATTTATTA | 4000 | GTTG | 4019 | 95.3 | 0 | 0 |
| | CGG | | | | | | |
| mAlb29-1-10 | TAGTATAGCATGGTCGAGC | 4001 | TTTT | 4020 | 95.2 | 18 | 35 |
| | AGG | | | | | | |
| mAlb29-1-11 | CATCTGAGAACCCTTAGGT | 4002 | TTTG | 4021 | 95.0 | 7 | 2 |
| | GGT | | | | | | |
| mAlb29-1-12 | AGTGTAGCAGAGAGGAACC | 4003 | TTTG | 4022 | 93.8 | NT | 47 |
| | ATT | | | | | | |
| mAlb29-1-13 | CTAGTAATGGAAGCCTGGT | 4004 | TTTT | 4023 | 92.4 | 8 | 24 |
| | ATT | | | | | | |
| mAlb29-1-14 | GGTATCTTTGATGACAATA | 4005 | TTTT | 4024 | 91.8 | 0 | 13 |
| | ATG | | | | | | |
| mAlb29-1-15 | TCTAGTAATGGAAGCCTGG | 4006 | TTTT | 4025 | 91.8 | 0 | 0 |
| | TAT | | | | | | |
| mAlb29-1-16 | TAGTAATGGAAGCCTGGTA | 4007 | TTTC | 4026 | 89.8 | 90.5 | 51 |
| | TTT | | | | | | |
| mAlb29-1-17 | GTATCTTTGATGACAATAA | 4008 | TTTG | 4027 | 87.8 | 10 | NT |
| | TGG | | | | | | |
| mAlb29-1-18 | AAGATTGATGAAGACAACT | 4009 | TTTA | 4028 | 87.4 | 76 | NT |
| | AAC | | | | | | |
| mAlb29-1-19 | CTCTCTGCTACACTCAAAG | 4010 | GTTC | 4029 | 85.7 | 0 | 0 |
| | TTA | | | | | | |
| mAlb29-1-20 | AAACCCGTTAAGTGTTTAT | 4011 | TTTA | 4030 | 87.3 | 0 | 4 |
| | ATC | | | | | | |

[0324] Hepa1-6 cells, a transformed mouse liver cell line, were cultured under standard conditions (DMEM media with 10% FBS in 5% CO2 incubator) and nucleofected with ribonuclear proteins formed by mixing the sgRNA and purified MG29-1 protein in PBS buffer. Hepa1-6 cells (1×10⁵) in suspension in complete SF nucleofection reagent (Lonza) were nucleofected using a 4D nucleofection device (Lonza) with RNP formed by mixing 50 pmol of MG29-1 protein and 100 pmol of sgRNA. After nucleofection the cells were plated in 24 well plates in DMEM plus 10% FBS and incubated in a 5% CO2 incubator for 48 to 72 h. Genomic DNA was then extracted from the cells using a column-based purification kit (Purelink genomic DNA mini kit, ThermoFisher Scientific) and quantified by absorbance at 260 nm. The albumin intron 1 region was PCR amplified from 50 ng of the genomic DNA in a reaction containing 0.5 micro molar each of the primers mAlb90F (CTCCTCTTCGTCTCCGGC) (SEQ ID NO: 4031) and mAlb1073R (CTGCCACATTGCTCAGCAC) (SEQ ID NO: 4032) and 1×Pfusion Flash PCR Master Mix.

[0325] The resulting 984 bp PCR product which spans the entire intron 1 of mouse albumin was purified using a column-based purification kit (DNA Clean and Concentrator, Zymo Research) and sequenced using primers located within 150 to 350 bp of the predicted target site for each sgRNA. A PCR product generated using primers mAlb90F (SEQ ID NO: 4031) and mAlb1073R (SEQ ID NO: 4032) from un-transfected Hepa1-6 cells was sequenced in parallel as a control. The Sanger sequencing chromatograms were analyzed using Inference of CRISPR Edits (ICE) that determines the frequency of INDELS as well as the INDEL profile (Hsiau et. al, Inference of CRISPR Edits from Sanger Trace Data. BioArxiv. 2018 https://www.biorxiv.org/content/early/2018/01/20/251082).

[0326] When a nuclease creates a double strand break (DSB) in DNA inside a living cell the DSB is repaired by the cellular DNA repair machinery. In actively dividing cells such as transformed mammalian cells in culture, and in the absence of a repair template, this repair occurs by the NHEJ pathway. The NHEJ pathway is an error prone process that introduces insertions or deletions of bases at the site of the double strand break (Lieber, M. R, Annu Rev Biochem. 2010; 79: 181-211). These insertions and deletions are therefore a hallmark of a double strand break that occurred and was subsequently repaired, is widely used as a readout of the editing or cutting efficiency of the nuclease. The profile of insertions and deletions depends on the characteristics of the nuclease that created the double strand break but also upon the sequence context at the cleavage site. Based on in vitro assays, the MG29-1 nuclease creates a staggered cut located 3′ of the PAM. Staggered cuts will often lead to larger deletions due to the trimming of the single stranded ends prior to end-joining. Table 8 lists the total INDEL frequency generated by each of the 19 sgRNA targeting mouse albumin intron 1 that were tested in Hepa1-6 cells. Eleven of the 18 sgRNA resulted in detectable INDELS at the target site with 5 sgRNA resulting in INDEL frequencies greater than 50% and 4 sgRNA resulted in indel frequencies greater than 75%. These data demonstrate that the MG29-1 nuclease can edit the genome of cultured mouse liver cells at the predicted target site for the sgRNA with efficiencies greater than 75%.

[0327] The editing efficiencies of the same set of sgRNA were evaluated by co-transfection of the sgRNA and a mRNA encoding the MG29-1 nuclease using a commercial lipid-based transfection reagent (Lipofectamine MessengerMAX, Invitrogen). The mRNA encoding MG29-1 was generated by in vitro transcription using T7 polymerase from a plasmid in which the coding sequence of MG29-1 was cloned. The MG29-1 coding sequence was codon optimized using human codon usage tables and flanked by nuclear localization signals derived from SV40 at the N-terminus and from Nucleoplasmin at the C-terminus. In addition, a UTR was included at the 3′ end of the coding sequence to improve translation. A 3′ UTR followed by an approximately 90 to 110 nucleotide poly A tract was included at the 3′ end of the coding sequence to improve mRNA stability in vivo (see e.g. SEQ ID NO: 4426 for wild-type MG29-1 and SEQ ID NO: 3327 for the S168R variant). The in vitro transcription reaction included the Clean Cap® capping reagent (Trilink BioTechnologies) and the resulting RNA was purified using the MEGAClear™ Transcription Clean-Up kit (Invitrogen) and purity was evaluated using the TapeStation (Agilent) and found to be composed of >90% full length RNA. As seen in

[0328] Table 1, the editing efficiencies after mRNA/sgRNA lipid transfection of Hepa1-6 cells were similar but not identical to those seen with nucleofection of RNP but confirm that the MG29-1 nuclease is active in cultured liver cells when delivered in the form of an mRNA.

| SEQ | | |
|---|---|---|
| ID | | |
| NO: | Description | Sequence |
| 4426 | MG29-1 WT | TAATACGACTCACTATAAGGAAAAGCCAGCTCCAGCAGGCGC |
| | mRNA | TGCTCACTCCTCCCCATCCTCTCCCTCTGTCCCTCTGTCCCTCT |
| | | GACCCTGCACTGTCCCAGCACCATGGCCCCCAAGAAGAAGCG |
| | | GAAAGTTGGCGGCGGAGGCAGCTTCAACAACTTCATCAAGAA |
| | | ATACAGCCTGCAGAAGACCCTGCGGTTCGAACTGAAGCCCGT |
| | | GGGCGAGACAGCGGACTACATCGAAGACTTCAAGAGCGAAT |
| | | ACCTGAAGGACACGGTGCTGAAGGACGAACAGCGGGCAAAA |
| | | GACTACCAGGAGATCAAAACACTGATCGACGACTACCACCGG |
| | | GAGTACATCGAAGAATGCCTGAGGGAACCCGTGGACAAAAA |
| | | GACCGGCGAGATCCTGGACTTCACACAGGACCTGGAAGACGC |
| | | ATTCAGCTACTACCAGAAACTGAAAGAAAACCCCACCGAGA |
| | | ACCGAGTGGGGTGGGAGAAAGAGCAGGAGAGCCTGAGAAAG |
| | | AAGCTGGTGACCAGCTTCGTGGGGAACGACGGCCTGTTCAAG |
| | | AAAGAGTTCATCACCCGCGACCTGCCCGAATGGCTGCAGAAA |
| | | AAGGGGCTGTGGGGCGAATACAAGGACACCGTGGAGAACTT |
| | | CAAAAAATTCACCACCTACTTCAGCGGCTTCCACGAGAACAG |
| | | GAAGAATATGTACACAGCCGAAGCCCAGAGCACAGCCATCG |
| | | CCAACAGGCTGATGAACGACAACCTGCCCAAGTTCTTCAACA |
| | | ACTACCTGGCATACCAGACCATCAAGGAGAAACACCCCGACC |
| | | TGGTGTTCCGACTGGACGACGCCCTGCTGCAGGCCGCCGGCG |
| | | TGGAGCACCTGGACGAGGCATTCCAGCCCAGATACTTCAGCA |
| | | GACTGTTCGCACAGAGCGGAATCACGGCCTTCAACGAGCTGA |
| | | TCGGAGGAAGGACCACGGAAAACGGCGAAAAGATCCAGGGC |
| | | CTGAACGAGCAGATCAACCTGTACAGACAGCAGAACCCCGA |
| | | GAAGGCCAAGGGCTTCCCAAGATTCATGCCCCTGTTCAAGCA |
| | | AATCCTGAGCGACAGGGAGACCCACAGCTTCCTGCCCGACGC |
| | | ATTCGAAAACGACAAAGAGCTGCTGCAGGCCCTGAGGGACT |
| | | ACGTGGACGCCGCCACCAGCGAAGAAGGAATGATCAGCCAA |
| | | CTGAACAAGGCCATGAACCAGTTCGTGACCGCCGACCTGAAA |
| | | AGGGTGTACATCAAAAGCGCCGCCCTGACCAGCCTGAGCCAG |
| | | GAACTGTTCCACTTCTTCGGCGTGATCAGCGACGCCATCGCGT |
| | | GGTACGCCGAGAAGAGACTGAGCCCCAAGAAAGCCCAGGAG |
| | | AGCTTCCTGAAACAGGAAGTGTACGCCATCGAAGAACTGAAC |
| | | CAGGCCGTGGTGGGCTACATCGACCAGCTGGAAGACCAGAG |
| | | CGAGCTGCAGCAGCTGCTGGTGGACCTGCCAGACCCCCAGAA |
| | | ACCAGTGAGCAGCTTCATCCTGACCCACTGGCAAAAAAGCCA |
| | | GGAGCCGCTGCAGGCCGTGATCGCGAAGGTGGAACCCCTGTT |
| | | CGAACTGGAGGAGCTGAGCAAAAACAAACGGGCCCCGAAAC |
| | | ACGACAAGGACCAGGGAGGGGAAGGCTTCCAGCAGGTGGAC |
| | | GCAATCAAGAACATGCTGGACGCATTCATGGAGGTGAGCCAC |
| | | GCCATCAAGCCCCTGTACCTGGTGAAGGGCCGGAAAGCAATC |
| | | GACATGCCGGACGTGGACACAGGATTCTACGCCGACTTCGCG |
| | | GAGGCATACAGCGCCTACGAGCAAGTGACGGTGAGCCTGTAC |
| | | AACAAGACCCGAAACCACCTGAGCAAGAAACCCTTCAGCAA |
| | | AGACAAAATCAAAATCAACTTCGACGCCCCAACACTGCTGAA |
| | | CGGCTGGGACCTGAACAAGGAAAGCGACAACAAAAGCATCA |
| | | TCCTGAGAAAAGACGGAAACTTCTACCTGGCCATCATGCACC |
| | | CCAAACACACAAAGGTGTTCGACTGCTACAGCGCCAGCGAGG |
| | | CGGCCGGGAAATGCTACGAGAAAATGAACTACAAACTGCTG |
| | | AGCGGCGCCAACAAGATGCTGCCCAAAGTGTTCTTCAGCAAG |
| | | AAGGGAATCGAAACCTTCAGCCCACCCCAGGAAATCCTGGAC |
| | | CTGTACAAGAACAACGAACACAAGAAGGGAGCCACCTTCAA |
| | | GCTGGAGAGCTGCCACAAGCTGATCGACTTCTTCAAGCGGAA |
| | | CATCCCCAAGTACAAGGTGCACCCAACCGACAACTTCGGATG |
| | | GGACGTCTTCGGATTCCACTTCAGCCCAACCAGCAGCTACGG |
| | | CGACCTGAGCGGCTTCTACCGAGAGGTGGAAGCCCAGGGGTA |
| | | CAAACTGTGGTTCAGCGACGTGAGCGAGGCATACATCAACAA |
| | | GTGCGTGGAAGAGGGCAAACTGTTCCTGTTCCAGATCTACAA |
| | | CAAGGACTTCAGCCCCAACAGCACCGGGAAGCCAAACCTGC |
| | | ACACACTGTACTGGAAAGGACTGTTCGAACCCGAGAACCTGA |
| | | AGGACGTGGTGCTGAAACTGAACGGCGAGGCCGAGATCTTCT |
| | | ACAGGAAACACAGCATCAAGCACGAGGACAAGACGATCCAC |
| | | CGGGCCAAGGACCCAATCGCCAACAAAAACGCAGACAACCC |
| | | CAAGAAGCAGAGCGTGTTCGACTACGACATCATCAAGGACA |
| | | AGCGCTACACCCAGGACAAATTCTTCTTCCACGTGCCCATCA |
| | | GCCTGAACTTCAAGAGCCAGGGAGTGGTGCGGTTCAACGACA |
| | | AGATCAACGGCCTGCTGGCCGCACGGACGACGTGCACGTGA |
| | | TCGGGATCGACCGAGGGGAACGCCACCTGCTGTACTACACCG |
| | | TGGTGAACGGCAAGGGCGAGGTGGTGGAACAGGGCAGCCTG |
| | | AACCAGGTGGCCACAGACCAGGGGTACGTGGTGGACTACCA |
| | | ACAGAAACTGCACGCCAAAGAGAAGGAGAGAGACCAGGCCA |
| | | GGAAGAACTGGAGCACCATCGAAAACATCAAGGAGCTGAAG |
| | | GCCGGGTACCTGAGCCAGGTGGTGCACAAACTGGCCCAGCTG |
| | | ATCGTGAAACACAACGCCATCGTGTGCCTGGAGGACCTGAAC |
| | | TTCGGATTCAAGAGGGGACGGTTCAAAGTGGAGAAGCAGGT |
| | | GTACCAGAAGTTCGAGAAAGCCCTGATCGACAAGCTGAACTA |
| | | CCTGGTGTTCAAGGAACGGGGGGCCACCCAGGCAGGCGGAT |
| | | ACCTGAACGCCTACCAGCTGGCCGCACCATTCGAGAGCTTCG |
| | | AAAAACTGGGCAAGCAGACCGGCATCCTGTACTACGTGCGGA |
| | | GCGACTACACCAGCAAGATCGACCCCGCCACAGGCTTCGTGG |
| | | ACTTCCTGAAGCCCAAATACGAAAGCATGGCAAAGAGCAAA |
| | | GTGTTCTTCGAGAGCTTCGAAAGAATCCAGTGGAACCAGGCC |
| | | AAAGGCTACTTCGAGTTCGAATTCGACTACAAGAAAATGTGC |
| | | CCCAGCAGGAAGTTCGGCGACTACCGCACCCGGTGGGTGGTG |
| | | TGCACATTCGGCGACACACGGTACCAGAACAGGCGCAACAA |
| | | AAGCAGCGGCCAATGGGAGACCGAGACAATCGACGTGACCG |
| | | CCCAGCTGAAGGCCCTGTTCGCGGCCTACGGCATCACCTACA |
| | | ACCAGGAGGACAACATCAAGGACGCCATCGCAGCCGTGAAG |
| | | TACACAAAATTCTACAAACAGCTGTACTGGCTGCTGAGACTG |
| | | ACGCTGAGCCTGCGGCACAGCGTGACCGGGACCGACGAGGA |
| | | CTTCATCCTGAGCCCCGTGGCCGACGAGAACGGCGTGTTCTT |
| | | CGACAGCAGGAAGGCCACGGACAAACAGCCCAAGGACGCAG |
| | | ACGCGAACGGCGCCTACCACATCGCCCTGAAGGGACTGTGGA |
| | | ACCTGCAGCAGATCAGGCAGCACGACTGGAACGTGGAAAAA |
| | | CCAAAAAAGCTGAACCTGGCCATGAAAAACGAAGAGTGGTT |
| | | CGGCTTCGCACAGAAGAAGAAATTCAGGGCCTCTGGCGGAA |
| | | AAAGACCTGCCGCCACAAAGAAAGCCGGACAGGCCAAGAAA |
| | | AAGAAGTGACCACACCCCCATTCCCCCACTCCAGATAGAACT |
| | | TCAGTTATATCTCACGTGTCTGGAGTTGGATCCAAAAAAAAA |
| | | AAAAAAAAAAAAAAAAAAAAAAAAAAAAAAAAAAAAAAAA |
| | | AAAAAAAAAAAAAAAAAAAAAAAAAAAAAAAAAAAAAAAA |
| | | AAAAAAAAAAAAAAAAAA |
| 4427 | MG29-1 S168R | TAATACGACTCACTATAAGGAAAAGCCAGCTCCAGCAGGCGC |
| | mRNA | TGCTCACTCCTCCCCATCCTCTCCCTCTGTCCCTCTGTCCCTCT |
| | | GACCCTGCACTGTCCCAGCACCATGGCCCCCAAGAAGAAGCG |
| | | GAAAGTTGGCGGCGGAGGCAGCTTCAACAACTTCATCAAGAA |
| | | ATACAGCCTGCAGAAGACCCTGCGGTTCGAACTGAAGCCCGT |
| | | GGGCGAGACAGCGGACTACATCGAAGACTTCAAGAGCGAAT |
| | | ACCTGAAGGACACGGTGCTGAAGGACGAACAGCGGGCAAAA |
| | | GACTACCAGGAGATCAAAACACTGATCGACGACTACCACCGG |
| | | GAGTACATCGAAGAATGCCTGAGGGAACCCGTGGACAAAAA |
| | | GACCGGCGAGATCCTGGACTTCACACAGGACCTGGAAGACGC |
| | | ATTCAGCTACTACCAGAAACTGAAAGAAAACCCCACCGAGA |
| | | ACCGAGTGGGGTGGGAGAAAGAGCAGGAGAGCCTGAGAAAG |
| | | AAGCTGGTGACCAGCTTCGTGGGGAACGACGGCCTGTTCAAG |
| | | AAAGAGTTCATCACCCGCGACCTGCCCGAATGGCTGCAGAAA |
| | | AAGGGGCTGTGGGGCGAATACAAGGACACCGTGGAGAACTT |
| | | CAAAAAATTCACCACCTACTTCAGGGGCTTCCACGAGAACAG |
| | | GAAGAATATGTACACAGCCGAAGCCCAGAGCACAGCCATCG |
| | | CCAACAGGCTGATGAACGACAACCTGCCCAAGTTCTTCAACA |
| | | ACTACCTGGCATACCAGACCATCAAGGAGAAACACCCCGACC |
| | | TGGTGTTCCGACTGGACGACGCCCTGCTGCAGGCCGCCGGCG |
| | | TGGAGCACCTGGACGAGGCATTCCAGCCCAGATACTTCAGCA |
| | | GACTGTTCGCACAGAGCGGAATCACGGCCTTCAACGAGCTGA |
| | | TCGGAGGAAGGACCACGGAAAACGGCGAAAAGATCCAGGGC |
| | | CTGAACGAGCAGATCAACCTGTACAGACAGCAGAACCCCGA |
| | | GAAGGCCAAGGGCTTCCCAAGATTCATGCCCCTGTTCAAGCA |
| | | AATCCTGAGCGACAGGGAGACCCACAGCTTCCTGCCCGACGC |
| | | ATTCGAAAACGACAAAGAGCTGCTGCAGGCCCTGAGGGACT |
| | | ACGTGGACGCCGCCACCAGCGAAGAAGGAATGATCAGCCAA |
| | | CTGAACAAGGCCATGAACCAGTTCGTGACCGCCGACCTGAAA |
| | | AGGGTGTACATCAAAAGCGCCGCCCTGACCAGCCTGAGCCAG |
| | | GAACTGTTCCACTTCTTCGGCGTGATCAGCGACGCCATCGCGT |
| | | GGTACGCCGAGAAGAGACTGAGCCCCAAGAAAGCCCAGGAG |
| | | AGCTTCCTGAAACAGGAAGTGTACGCCATCGAAGAACTGAAC |
| | | CAGGCCGTGGTGGGCTACATCGACCAGCTGGAAGACCAGAG |
| | | CGAGCTGCAGCAGCTGCTGGTGGACCTGCCAGACCCCCAGAA |
| | | ACCAGTGAGCAGCTTCATCCTGACCCACTGGCAAAAAAGCCA |
| | | GGAGCCGCTGCAGGCCGTGATCGCGAAGGTGGAACCCCTGTT |
| | | CGAACTGGAGGAGCTGAGCAAAAACAAACGGGCCCCGAAAC |
| | | ACGACAAGGACCAGGGAGGGGAAGGCTTCCAGCAGGTGGAC |
| | | GCAATCAAGAACATGCTGGACGCATTCATGGAGGTGAGCCAC |
| | | GCCATCAAGCCCCTGTACCTGGTGAAGGGCCGGAAAGCAATC |
| | | GACATGCCGGACGTGGACACAGGATTCTACGCCGACTTCGCG |
| | | GAGGCATACAGCGCCTACGAGCAAGTGACGGTGAGCCTGTAC |
| | | AACAAGACCCGAAACCACCTGAGCAAGAAACCCTTCAGCAA |
| | | AGACAAAATCAAAATCAACTTCGACGCCCCAACACTGCTGAA |
| | | CGGCTGGGACCTGAACAAGGAAAGCGACAACAAAAGCATCA |
| | | TCCTGAGAAAAGACGGAAACTTCTACCTGGCCATCATGCACC |
| | | CCAAACACACAAAGGTGTTCGACTGCTACAGCGCCAGCGAGG |
| | | CGGCCGGGAAATGCTACGAGAAAATGAACTACAAACTGCTG |
| | | AGCGGCGCCAACAAGATGCTGCCCAAAGTGTTCTTCAGCAAG |
| | | AAGGGAATCGAAACCTTCAGCCCACCCCAGGAAATCCTGGAC |
| | | CTGTACAAGAACAACGAACACAAGAAGGGAGCCACCTTCAA |
| | | GCTGGAGAGCTGCCACAAGCTGATCGACTTCTTCAAGCGGAA |
| | | CATCCCCAAGTACAAGGTGCACCCAACCGACAACTTCGGATG |
| | | GGACGTCTTCGGATTCCACTTCAGCCCAACCAGCAGCTACGG |
| | | CGACCTGAGCGGCTTCTACCGAGAGGTGGAAGCCCAGGGGTA |
| | | CAAACTGTGGTTCAGCGACGTGAGCGAGGCATACATCAACAA |
| | | GTGCGTGGAAGAGGGCAAACTGTTCCTGTTCCAGATCTACAA |
| | | CAAGGACTTCAGCCCCAACAGCACCGGGAAGCCAAACCTGC |
| | | ACACACTGTACTGGAAAGGACTGTTCGAACCCGAGAACCTGA |
| | | AGGACGTGGTGCTGAAACTGAACGGCGAGGCCGAGATCTTCT |
| | | ACAGGAAACACAGCATCAAGCACGAGGACAAGACGATCCAC |
| | | CGGGCCAAGGACCCAATCGCCAACAAAAACGCAGACAACCC |
| | | CAAGAAGCAGAGCGTGTTCGACTACGACATCATCAAGGACA |
| | | AGCGCTACACCCAGGACAAATTCTTCTTCCACGTGCCCATCA |
| | | GCCTGAACTTCAAGAGCCAGGGAGTGGTGCGGTTCAACGACA |
| | | AGATCAACGGCCTGCTGGCCGCACAGGACGACGTGCACGTGA |
| | | TCGGGATCGACCGAGGGGAACGCCACCTGCTGTACTACACCG |
| | | TGGTGAACGGCAAGGGCGAGGTGGTGGAACAGGGCAGCCTG |
| | | AACCAGGTGGCCACAGACCAGGGGTACGTGGTGGACTACCA |
| | | ACAGAAACTGCACGCCAAAGAGAAGGAGAGAGACCAGGCCA |
| | | GGAAGAACTGGAGCACCATCGAAAACATCAAGGAGCTGAAG |
| | | GCCGGGTACCTGAGCCAGGTGGTGCACAAACTGGCCCAGCTG |
| | | ATCGTGAAACACAACGCCATCGTGTGCCTGGAGGACCTGAAC |
| | | TTCGGATTCAAGAGGGGACGGTTCAAAGTGGAGAAGCAGGT |
| | | GTACCAGAAGTTCGAGAAAGCCCTGATCGACAAGCTGAACTA |
| | | CCTGGTGTTCAAGGAACGGGGGGCCACCCAGGCAGGCGGAT |
| | | ACCTGAACGCCTACCAGCTGGCCGCACCATTCGAGAGCTTCG |
| | | AAAAACTGGGCAAGCAGACCGGCATCCTGTACTACGTGCGGA |
| | | GCGACTACACCAGCAAGATCGACCCCGCCACAGGCTTCGTGG |
| | | ACTTCCTGAAGCCCAAATACGAAAGCATGGCAAAGAGCAAA |
| | | GTGTTCTTCGAGAGCTTCGAAAGAATCCAGTGGAACCAGGCC |
| | | AAAGGCTACTTCGAGTTCGAATTCGACTACAAGAAAATGTGC |
| | | CCCAGCAGGAAGTTCGGCGACTACCGCACCCGGTGGGTGGTG |
| | | TGCACATTCGGCGACACACGGTACCAGAACAGGCGCAACAA |
| | | AAGCAGCGGCCAATGGGAGACCGAGACAATCGACGTGACCG |
| | | CCCAGCTGAAGGCCCTGTTCGCGGCCTACGGCATCACCTACA |
| | | ACCAGGAGGACAACATCAAGGACGCCATCGCAGCCGTGAAG |
| | | TACACAAAATTCTACAAACAGCTGTACTGGCTGCTGAGACTG |
| | | ACGCTGAGCCTGCGGCACAGCGTGACCGGGACCGACGAGGA |
| | | CTTCATCCTGAGCCCCGTGGCCGACGAGAACGGCGTGTTCTT |
| | | CGACAGCAGGAAGGCCACGGACAAACAGCCCAAGGACGCAG |
| | | ACGCGAACGGCGCCTACCACATCGCCCTGAAGGGACTGTGGA |
| | | ACCTGCAGCAGATCAGGCAGCACGACTGGAACGTGGAAAAA |
| | | CCAAAAAAGCTGAACCTGGCCATGAAAAACGAAGAGTGGTT |
| | | CGGCTTCGCACAGAAGAAGAAATTCAGGGCCTCTGGCGGAA |
| | | AAAGACCTGCCGCCACAAAGAAAGCCGGACAGGCCAAGAAA |
| | | AAGAAGTGACCACACCCCCATTCCCCCACTCCAGATAGAACT |
| | | TCAGTTATATCTCACGTGTCTGGAGTTGGATCCAAAAAAAAA |
| | | AAAAAAAAAAAAAAAAAAAAAAAAAAAAAAAAAAAAAAAA |
| | | AAAAAAAAAAAAAAAAAAAAAAAAAAAAAAAAAAAAAAAA |
| | | AAAAAAAAAAAAAAAAAA |

[0329] FIG. 50 is a representative example of the indel profile of MG29-1 as determined by ICE analysis using mALb29-1-8 as the guide (SEQ ID NO: 3999) and demonstrates that deletion of 4 bases was the most frequent event (25% of total sequences) and deletions of 1, 5, 6, or 7 bases each accounting for about 10 to 15% of the sequences. Longer deletions of up to 13 bases were also detected, but insertions were undetectable. By contrast, spCas9 with a guide targeting mouse albumin intron 1 generated primarily 1 base insertions or deletions.

[0330] FIG. 51 is a representative example of the indel profile of MG29-1 and sgRNA mAlb29-1-8 as determined by next generation sequencing (NGS) of the PCR product of the mouse albumin intron 1 region. In total approximately 15,000 sequence reads were obtained. By NGS deletion of 4 bases was the most frequent indel (about 20% of total) with deletions of 1, 5, 6 and 7 bases each accounting for about 10% of the indels. Larger deletions of up to 19 bp were also detected. The profile observed by NGS analysis matches closely that measured by ICE. These results demonstrate that MG29-1 generates large deletions at the target site consistent with the staggered cleavage observed in vitro.

### Example 30—Demonstration of the Ability of a Nuclease Described Herein to Target an Intronic Region in Cultured Human Liver Cells (HepG2)

[0331] To evaluate the potential of MG29-1 to create double strand breaks at intronic regions in human cells, the intron 1 of human serum albumin was selected as the target locus. Single guide RNA (sgRNA) with a spacer length of 22 nt targeted to human albumin intron 1 were identified using the guide finding algorithm in the Geneious Prime nucleic acid analysis software (https://www.geneious.com/prime/). Using a PAM of KTTG (SEQ ID NO: 3870) located 5′ to the spacer, a total of 90 potential sgRNA were identified within human albumin intron 1. Guides that spanned the intron/exon boundaries were excluded. Using Geneious Prime the spacer sequences of these guides were searched against the mouse genome and a specificity score was assigned by the software based on the alignment to additional sites in the genome. Spacer sequences with 4 or more contiguous bases of the same base were excluded due to concerns about specificity. A total of 23 spacers with the highest specificity scores were selected for testing. To create the sgRNA the backbone sequence of “TAATTTCTACTGTTGTAGAT” was added to the 3′ end of the spacer sequence. The sgRNA was chemically synthesized incorporating chemically modified bases known to improve the performance of sgRNA for cpf1 guides (AltR1/AltR2 chemistry available from Integrated DNA Technologies). The spacer sequences of these guides are listed in

[0332] Table 9.

TABLE 9
Spacer sequences of MG29-1 sgRNA targeting human albumin
intron 1 and activity in HepG2 cells nucleofected with MG29-1/
sgRNA RNP

| | | | | | | (INDEL |
|---|---|---|---|---|---|---|
| | | SEQ | | | | %) in |
| sgRNA | Spacer (DNA sequence, | ID | | SEQ ID | Specificity | HepG2 |
| name | no PAM) | NO: | PAM | NO: | score | cells |
| hAlb_g63 | GTAAACTCTGCATCTTTAAAGA | 4033 | TTTA | 4056 | 91.25% | 0 |
| hAlb_g59 | TTTCAAAATATTGGGCTCTGAT | 4034 | TTTG | 4057 | 90.64% | 0 |
| hAlb_g58 | AGTAAACTCTGCATCTTTAAAG | 4035 | TTTT | 4058 | 90.46% | 0 |
| hAlb_g56 | AAGATGCAGAGTTTACTAAAAC | 4036 | TTTA | 4059 | 90.23% | 0 |
| hAlb_g72 | AAAATATTGGGCTCTGATTCCT | 4037 | TTTC | 4060 | 93.26% | 0 |
| hAlb_g70 | AAATAAAGCATAGTGCAATGGA | 4038 | TTTT | 4061 | 92.31% | 63 |
| hAlb_g74 | AATAAAGCATAGTGCAATGGAT | 4039 | TTTA | 4062 | 95.41% | 93 |
| hAlb_g83 | TGAGATCAACAGCACAGGTTTT | 4040 | TTTA | 4063 | 98.39% | 93 |
| hAlb_g85 | TGTAGGAATCAGAGCCCAATAT | 4041 | TTTC | 4064 | 99.20% | 55 |
| hAlb_g89 | CTGTAGGAATCAGAGCCCAATA | 4042 | TTTT | 4065 | 100.00% | 43 |
| hAlb_g88 | TCTGTAGGAATCAGAGCCCAAT | 4043 | TTTT | 4066 | 100.00% | 45 |
| hAlb_g77 | GTGACTGTAATTTTCTTTTGCG | 4044 | TTTA | 4067 | 96.77% | 0 |
| hAlb_g69 | CTTTTGCGCACTAAGGAAAGTG | 4045 | TTTT | 4068 | 92.18% | 3 |
| hAlb_g66 | TGAAGTCTTACAAGGTTATCTT | 4046 | TTTG | 4069 | 91.80% | 19 |
| hAlb_g75 | AGTGTCTATCAACAGCAACCAA | 4047 | TTTT | 4070 | 95.96% | 13 |
| hAlb_g79 | CTTAGTGCGCAAAAGAAAATTA | 4048 | TTTC | 4071 | 97.45% | 60 |
| hAlb_g82 | TAGCCTTATATTCAAACTTAGA | 4049 | TTTA | 4072 | 98.32% | 0 |
| hAlb_g80 | GGATAGTTATGAATTCAATCTT | 4050 | TTTG | 4073 | 97.46% | 23 |
| hAlb_g84 | CACTTTCCTTAGTGCGCAAAAG | 4051 | TTTG | 4074 | 98.85% | 96 |
| hAlb_g81 | GTATTTGTGAAGTCTTACAAGG | 4052 | TTTT | 4075 | 98.07% | 17 |
| hAlb_g90 | GTGTCTATCAACAGCAACCAAG | 4053 | TTTA | 4076 | 100.00% | 91 |
| hAlb_g87 | CGCACTAAGGAAAGTGCAAAGT | 4054 | TTTG | 4077 | 100.00% | 97 |
| hAlb_g86 | GCGCACTAAGGAAAGTGCAAAG | 4055 | TTTT | 4078 | 100.00% | 42 |

[0333] HepG2 cells, a transformed human liver cell line, were cultured under standard conditions (MEM media with 10% FBS in 5% CO2 incubator) and nucleofected with ribonuclear proteins formed by mixing the sgRNA and purified MG29-1 protein in PBS buffer. A total of 1 e5 HepG2 cells in suspension in complete SF nucleofection reagent (Lonza) were nucleofected using a 4D nucleofection device (Lonza) with RNP formed by mixing 80 pmol of MG29-1 protein and 160 pmol of sgRNA. After nucleofection the cells were plated in 24 well plates in DMEM plus 10% FBS and incubated in a 5% CO2 incubator for 48 to 72 h. Genomic DNA was then extracted from the cells using a column-based purification kit (Purelink genomic DNA mini kit, ThermoFisher Scientific) and quantified by absorbance at 260 nm. The albumin intron 1 region was PCR amplified from 50 ng of the genomic DNA in a reaction containing 0.5 micro molar each of the primers hAlb 11F (TCTTCTGTCAACCCCACACGCC) (SEQ ID NO: 4079) and hAlb834R (CTTGTCTGGGCAAGGGAAGA) (SEQ ID NO: 4080) and 1×Pfusion Flash PCR Master Mix. The resulting 826 bp PCR product which spans the entire intron 1 of mouse albumin was purified using a column-based purification kit (DNA Clean and Concentrator, Zymo Research) and sequenced using primers located within 150 to 350 bp of the predicted target site for the sgRNA.

[0334] The PCR product generated using primers hAlb 11F (TCTTCTGTCAACCCCACACGCC) (SEQ ID NO: 4079) and hAlb834R (CTTGTCTGGGCAAGGGAAGA) (SEQ ID NO: 4080) from un-transfected HepG2 cells was sequenced in parallel as a control. The Sanger sequencing chromatograms were analyzed using Inference of CRISPR Edits (ICE) that determines the frequency of INDELS as well as the INDEL profile. When a nuclease creates a double strand break (DSB) in DNA inside a living cell the DSB is repaired by the cellular DNA repair machinery. In actively dividing cells such as transformed mammalian cells in culture, and in the absence of a repair template, this repair occurs by the NHEJ pathway. The NHEJ pathway is an error prone process that introduces insertions or deletions of bases at the site of the double strand break (Lieber, M. R, Annu Rev Biochem. 2010; 79: 181-211).

[0335] These insertions and deletions are therefore a hallmark of a double strand break that occurred and was subsequently repaired, and is widely used as a readout of the editing or cutting efficiency of the nuclease. The profile of insertions and deletions depends on the characteristics of the nuclease that created the double strand break but also upon the sequence context at the cleavage site. Based on in vitro assays, the MG29-1 nuclease cleaves the target strand at 22 nucleotides from the PAM (less frequently at 21 nucleotides from the PAM) and cleaves the non-target strand at 18 nucleotides from the PAM which therefore creates 4 nucleotide staggered end located 3′ of the PAM. Staggered cuts will often lead to larger deletions due to the trimming of the single stranded ends prior to end-joining.

[0336] Table 9 lists the total indel frequency generated by each of the 23 sgRNA targeting human albumin intron 1 that were tested in HepG2 cells. Sixteen of the 23 sgRNA resulted in detectable indel at the target site with 8 sgRNA resulting in INDELS greater than 50% and 5 sgRNA resulted in indel frequencies than 90%. These data demonstrate that the MG29-1 nuclease can edit the genome of a cultured human liver cell line at the predicted target site for the sgRNA with efficiencies greater than 90%.

### Example 31—Demonstration of the Ability of Nucleases Described Herein to Edit Exonic Regions in Cultured Mouse Liver Cells

[0337] Sequence specific nucleases can be used to disrupt the coding sequences of genes and thereby create a functional knockout of a protein of interest. This can be of therapeutic use when the knockdown of a specific protein has a beneficial effect in a particular disease. One way to disrupt the coding sequence of a gene is to make a double strand break within the exonic regions of the gene using a sequence specific nuclease. These double strand breaks will be repaired via error prone repair pathways to generate insertions or deletions which can result in either frameshift mutations or changes to the amino acid sequence which disrupt the function of the protein.

[0338] To evaluate the potential of MG29-1 to create double strand breaks at exonic regions of a gene expressed in liver cells the gene encoding glycolate oxidase (hao-1) was selected as the target locus. Single guide RNA (sgRNA) with a spacer length of 22 nt targeted to exons 1 to 4 of mouse hao-1 were identified using the guide finding algorithm in the Geneious Prime nucleic acid analysis software (https://www.geneious.com/prime/). The first 4 exons of the hao-1 gene comprise approximately the N-terminal 50% of the hao-1 coding sequence. The first 4 exons were chosen because INDELS created towards the N-terminus of the coding sequence of a gene are more likely to create a frameshift or missense mutation that disrupts the activity of the protein. Using a PAM of KTTG (SEQ ID NO: 3870) located 5′ to the spacer, a total of 45 potential sgRNAs were identified within mouse hao-1 exons 1 through 4. Guides that spanned the intron/exon boundaries were included because such guides may create INDELS that interfere with splicing. Using Geneious Prime, the spacer sequences of these 45 guides were searched against the mouse genome and a specificity score was assigned by the software based on the alignment to additional sites in the mouse genome. Spacer sequences with 4 or more contiguous bases of the same base were excluded due to concerns about specificity. A total of 45 spacers with the highest specificity scores were selected for testing.

[0339] To create the sgRNA the backbone sequence of “TAATTTCTACTGTTGTAGAT” was added to the 3′ end of the spacer sequence. The sgRNA was chemically synthesized incorporating chemically modified bases known to improve the performance of sgRNA for cpf1 guides (AltR1/AltR2 chemistry available from Integrated DNA Technologies). The spacer sequences of these guides are listed in Table 10.

TABLE 10
Spacer sequences of MG29-1 sgRNA targeting mouse hao-1 exons 1
to 4 and activity in Hepa1-6 cells nucleofected with MG29-1/sgRNA RNP

| sgRNA | Spacer (DNA sequence, | SEQ ID | | SEQ ID | Specificity | Activity (INDEL %) |
|---|---|---|---|---|---|---|
| name | no PAM) | NO: | PAM | NO: | score | in Hepal-6 cells |
| mH29-1 | CCCCAGACCTGTAATAGTCATA | 4081 | TTTG | 4126 | 100.00% | 92.2 |
| mH29-2 | AGGACAGAGAGTCAGCATGCCA | 4082 | TTTT | 4127 | 100.00% | 0 |
| mH29-3 | GGAGACAACAGTGGACTTGCTG | 4083 | TTTT | 4128 | 100.00% | 0 |
| mH29-4 | CCCTACCCTGCCACAATGTTGC | 4084 | GTTG | 4129 | 100.00% | 0 |
| mH29-5 | CTTACCTAGAAAATGCTTGGAT | 4085 | GTTT | 4130 | 100.00% | 0 |
| mH29-6 | ACAGATCGATATCAGCAACGTT | 4086 | GTTG | 4131 | 100.00% | 0 |
| mH29-7 | CGAAGCATCCGTGGATAGAGCT | 4087 | GTTG | 4132 | 100.00% | 0 |
| mH29-8 | TTGGGCTACCTCCTCAATAGAA | 4088 | GTTC | 4133 | 100.00% | 0 |
| mH29-9 | AAGCTGCCACCACAACTCAGGT | 4089 | GTTC | 4134 | 100.00% | 0 |
| mH29-10 | TGGTGGCAGCTTGAACCTGTTC | 4090 | GTTG | 4135 | 100.00% | 0 |
| mH29-11 | CGCACGTCATCAATGCGGTTGC | 4091 | GTTC | 4136 | 100.00% | 0 |
| mH29-12 | CCCAGGTAAGGGGTGTCCACAG | 4092 | GTTG | 4137 | 100.00% | 0 |
| mH29-13 | CATCCAGCGAAGTGCCTCTGGG | 4093 | GTTG | 4138 | 100.00% | 0 |
| mH29-14 | AAATTCCAGATGGAAGCTCTAT | 4094 | TTTT | 4139 | 99.04% | 0 |
| mH29-15 | TGACTGTGGACACCCCTTACCT | 4095 | TTTG | 4140 | 99.04% | 97.5 |
| mH29-16 | ATTACAGCCTGTCAGACCATGG | 4096 | TTTC | 4141 | 99.30% | 91 |
| mH29-17 | GAGACAACAGTGGACTTGCTGA | 4097 | TTTG | 4142 | 98.37% | 27.5 |
| mH29-18 | CAACAATAGGCAGTGATGTCAA | 4098 | TTTA | 4143 | 99.22% | 85 |
| mH29-19 | CCTCGACTGGTCTGCATCAGTG | 4099 | GTTG | 4144 | 97.69% | 0 |
| mH29-20 | ATAATCACTGATGCAGACCAGT | 4100 | GTTC | 4145 | 98.07% | 0 |
| mH29-21 | TCAGCTAACGTCTCCTGATCAT | 4101 | GTTA | 4146 | 99.33% | 0 |
| mH29-22 | CTGATATCGATCTGTCAACTTC | 4102 | GTTG | 4147 | 99.22% | 0 |
| mH29-23 | TAAAGGGCATTTTGAGAGGTTT | 4103 | GTTG | 4148 | 99.22% | 0 |
| mH29-24 | AATAGCAAAGTTTCTTACCTAG | 4104 | TTTA | 4149 | 95.75% | 0 |
| mH29-25 | GGACAGAGAGTCAGCATGCCAA | 4105 | TTTA | 4150 | 95.73% | 47 |
| mH29-26 | TCCATTTCATTACAGCCTGTCA | 4106 | TTTC | 4151 | 94.08% | 79 |
| mH29-27 | AGTCTGTGAGATCATACTGACC | 4107 | TTTG | 4152 | 96.85% | 65 |
| mH29-28 | TAGATGTACAGTTGCATCCAGC | 4108 | TTTG | 4153 | 98.20% | 29 |
| mH29-29 | CCTTAGGAGAAAATGCCAAATC | 4109 | TTTC | 4154 | 96.18% | 94.5 |
| mH29-30 | CTCCTAAGGGAAATTTTGGAGA | 4110 | TTTT | 4155 | 98.06% | 0 |
| mH29-31 | GCTGATAACATCCAAGCATTTT | 4111 | GTTA | 4156 | 93.30% | 0 |
| mH29-32 | AAATAGCAAAGTTTCTTACCTA | 4112 | GTTT | 4157 | 97.31% | 0 |
| mH29-33 | TAGGACAGAGAGTCAGCATGCC | 4113 | GTTT | 4158 | 95.84% | 0 |
| mH29-34 | GGGCTACTGCCATGCAGTGCAT | 4114 | GTTG | 4159 | 97.53% | 0 |
| mH29-35 | TCTCCAAAATTTCCCTTAGGAG | 4115 | GTTG | 4160 | 96.94% | 0 |
| mH29-36 | AATTCCAGATGGAAGCTCTATC | 4116 | TTTA | 4161 | 96.74% | 0 |
| mH29-37 | TCCTAAGGGAAATTTTGGAGAC | 4117 | TTTC | 4162 | 97.59% | 53.5 |
| mH29-38 | TTACCTAGAAAATGCTTGGATG | 4118 | TTTC | 4163 | 94.99% | 21.8 |
| mH29-39 | CAAGGCCATATTTGTGACTGTG | 4119 | GTTA | 4164 | 93.57% | 0 |
| mH29-40 | CTCCATTTCATTACAGCCTGTC | 4120 | TTTT | 4165 | 93.71% | 0 |
| mH29-41 | GCATTTTCTCCTAAGGGAAATT | 4121 | TTTG | 4166 | 92.30% | 59 |
| mH29-42 | TTACCTCGCACAGTGGCCAGCT | 4122 | TTTC | 4167 | 77.16% | 32 |
| mH29-43 | TCTCTCTTTTCTTACCTCGCAC | 4123 | TTTG | 4168 | 87.70% | 0 |
| mH29-44 | CTTACCTCGCACAGTGGCCAGC | 4124 | TTTT | 4169 | 95.19% | 0 |
| mH29-45 | AAACCAATGATTTGGCATTTTC | 4125 | TTTG | 4170 | 91.09% | 0 |

[0340] Hepa1-6 cells, a transformed mouse liver cell line, were cultured under standard conditions (DMEM media with 10% FBS in 5% CO₂ incubator) and nucleofected with ribonuclear proteins formed by mixing the sgRNA and purified MG29-1 protein in PBS buffer. A total of 1 e⁵ Hepa1-6 cells in suspension in complete SF nucleofection reagent (Lonza) were nucleofected using a 4D nucleofection device (Lonza) with RNP formed by mixing 50 pmol of MG29-1 protein and 100 pmol of sgRNA. After nucleofection the cells were plated in 24 well plates in DMEM plus 10% FBS and incubated in a 5% CO2 incubator for 48 to 72 h. Genomic DNA was then extracted from the cells using a column-based purification kit (Purelink genomic DNA mini kit, ThermoFisher Scientific) and quantified by absorbance at 260 nm. Exons 1 through 4 of the mouse hao-1 gene 1 were PCR amplified from 40 ng of the genomic DNA in a reaction containing 0.5 micro molar pairs of the primers specific for each exon. The PCR primers used for exon 1 were PCR_mHE1_F+233 (GTGACCAACCCTACCCGTTT) (SEQ ID NO: 4171), PCR_mHE1_R_-553 (GCAAGCACCTACTGTCTCGT) (SEQ ID NO: 4172). The PCR primers used for exon 2 were HAO1_E2_F5721 (CAACGAAGGTTCCCTCCAGG) (SEQ ID NO: 4173), HAO1_E2_R6271 (GGAAGGGTGTTCGAGAAGGA) (SEQ ID NO: 4174). The PCR primers used for exon 3 were HAO1_E3_F23198 (TGCCCTAGACAAGCTGACAC) (SEQ ID NO: 4175), HAO1_E3_R23879 (CAGATTCTGGAAGTGGCCCA) (SEQ ID NO: 4176). The PCR primers used for exon 4 were HAO1_E4_F31087 (CCTGTAGGTGGCTGAGTACG) (SEQ ID NO: 4177), HAO1_E4_R31650 (AGGTTTGGTTCCCCTCACCT) (SEQ ID NO: 4178).

[0341] In addition to primers and genomic DNA the PCR reactions contained 1×Pfusion Flash PCR Master Mix (Thermo Fisher). The resulting PCR products comprised single bands when analyzed on agarose gels demonstrating that the PCR reaction was specific, and were purified using a column-based purification kit (DNA Clean and Concentrator, Zymo Research). For sequencing, primers complementary to sequences at least 100 nt from each cut site were used. The primer to sequence Exon 1 was Seq_mHE1_F_+139 (GTCTAGGCATACAATGTTTGCTCA) (SEQ ID NO: 4179). The primer to sequence Exon 2 was 5938F Seq_HAO1_E2 (CTATGCAAGGAAAAGATTTGGCC) (SEQ ID NO: 4180). The primers to sequence Exon 3 were HAO1_E3_F23476 (TCTTCCCCCTTGAATGAAACACT) (SEQ ID NO: 4181) and the reverse PCR primer, HAO1_E3_R23879 (CAGATTCTGGAAGTGGCCCA) (SEQ ID NO: 4182). The primer to sequence Exon 4 was the reverse PCR primer, HAO1_E4_R31650 (AGGTTTGGTTCCCCTCACCT) (SEQ ID NO: 4183).

[0342] Sequencing of the PCR products showed that they contained the expected sequences of the hao-1 exons. PCR products derived from Hepa-16 cells nucleofected with different RNP or untreated controls were sequenced using primers located within 100 to 350 bp of the predicted target site for each sgRNA. The Sanger sequencing chromatograms were analyzed using Inference of CRISPR Edits (ICE) that determines the frequency of INDELS as well as the INDEL profile (Hsiau et. al, Inference of CRISPR Edits from Sanger Trace Data. BioArxiv. 2018 https://www.biorxiv.org/content/early/2018/01/20/251082). When a nuclease creates a double strand break (DSB) in DNA inside a living cell the DSB is repaired by the cellular DNA repair machinery. In actively dividing cells such as transformed mammalian cells in culture, and in the absence of a repair template, this repair occurs by the NHEJ pathway. The NHEJ pathway is an error prone process that introduces insertions or deletions of bases at the site of the double strand break (Lieber, M. R, Annu Rev Biochem. 2010; 79: 181-211). These insertions and deletions are therefore a hallmark of a double strand break that occurred and was subsequently repaired, and is widely used in the art as a readout of the editing or cutting efficiency of the nuclease. As presented in Table 10, 14 guides demonstrated detectable editing at their predicted target sites. Four guides exhibited editing activity greater than 90%. All 14 of the active guides had PAM sequences of TTTN demonstrating that this PAM is preferred in vivo. However not all guides utilizing a TTTN PAM were active. These data demonstrate that the MG29-1 nuclease can generate RNA guided, sequence specific, double strand breaks in exonic regions in cultured liver cells with high efficiency.

### Example 32—Design of Further sgRNAs for Disruption of Hao-1 Gene

[0343] Further sgRNAs were designed to target exonic parts of the hao-1 gene. These are designed to target the first 4 exons because these comprise approximately 50% of the coding sequence and indels created towards the N-terminus of the coding sequence of a gene are more likely to create a frameshift or missense mutation that disrupts the activity of the protein. Using the more restrictive PAM of KTTG (SEQ ID NO: 3870) which was shown in Example 31 to be more active in mammalian cells, a total of 42 potential sgRNA were identified within human hao-1 exons 1 through 4 (Table 11).

TABLE 11
Spacer sequences for MG29-1 identified in exons 1 to 4 of
the human hao-1 gene

| sgRNA | Spacer (DNA sequence, | SEQ ID | | SEQ ID | Specificity |
|---|---|---|---|---|---|
| name | no PAM) | NO: | PAM | NO: | score |
| hH29-1 | GCATGTTGTTCATAATCATTGA | 4184 | TTTA | 4226 | 96.25% |
| hH29-2 | GAAGTACTGATTTAGCATGTTG | 4185 | TTTG | 4227 | 98.37% |
| hH29-3 | TATCAATGATTATGAACAACAT | 4186 | TTTG | 4228 | 87.44% |
| hH29-4 | CCCCAGACCTGTAATAGTCATA | 4187 | TTTG | 4229 | 99.04% |
| hH29-5 | TTCATCATTTGCCCCAGACCTG | 4188 | TTTC | 4230 | 95.59% |
| hH29-6 | TTACCTGGAAAATGCTGCAATA | 4189 | TTTC | 4231 | 80.36% |
| hH29-7 | CTTACCTGGAAAATGCTGCAAT | 4190 | TTTT | 4232 | 79.67% |
| hH29-8 | GCTGATAATATTGCAGCATTTT | 4191 | TTTG | 4233 | 92.20% |
| hH29-9 | AAAAATAAATTTTCTTACCTGG | 4192 | TTTA | 4234 | 58.56% |
| hH29-10 | AAAAAATAAATTTTCTTACCTG | 4193 | TTTT | 4235 | 44.93% |
| hH29-11 | ATTTTATTTTTTAATTCTAGAT | 4194 | TTTT | 4236 | 10.22% |
| hH29-12 | TTTTATTTTTTAATTCTAGATG | 4195 | TTTA | 4237 | 10.64% |
| hH29-13 | ATTTTTTAATTCTAGATGGAAG | 4196 | TTTT | 4238 | 70.62% |
| hH29-14 | TTTTTTAATTCTAGATGGAAGC | 4197 | TTTA | 4239 | 44.69% |
| hH29-15 | TTAATTCTAGATGGAAGCTGTA | 4198 | TTTT | 4240 | 99.13% |
| hH29-16 | TAATTCTAGATGGAAGCTGTAT | 4199 | TTTT | 4241 | 97.06% |
| hH29-17 | AATTCTAGATGGAAGCTGTATC | 4200 | TTTT | 4242 | 96.74% |
| hH29-18 | ATTCTAGATGGAAGCTGTATCC | 4201 | TTTA | 4243 | 98.94% |
| hH29-19 | AGCAACATTCCGGAGCATCCTT | 4202 | TTTC | 4244 | 97.81% |
| hH29-20 | AGGACAGAGGGTCAGCATGCCA | 4203 | TTTT | 4245 | 97.75% |
| hH29-21 | GGACAGAGGGTCAGCATGCCAA | 4204 | TTTA | 4246 | 100.00% |
| hH29-22 | TTTCTCAGCCTGTCAGTCCCTG | 4205 | TTTC | 4247 | 88.19% |
| hH29-23 | TCAGCCTGTCAGTCCCTGGGAA | 4206 | TTTC | 4248 | 100.00% |
| hH29-24 | TGACAGTGGACACACCTTACCT | 4207 | TTTG | 4249 | 100.00% |
| hH29-25 | AATCTGTTACGCACATCATCCA | 4208 | TTTG | 4250 | 100.00% |
| hH29-26 | ATGCATTTCTTATTTTAGGATG | 4209 | TTTT | 4251 | 80.79% |
| hH29-27 | TGCATTTCTTATTTTAGGATGA | 4210 | TTTA | 4252 | 76.81% |
| hH29-28 | TTATTTTAGGATGAAAAATTTT | 4211 | TTTC | 4253 | 52.38% |
| hH29-29 | AGGATGAAAAATTTTGAAACCA | 4212 | TTTT | 4254 | 90.56% |
| hH29-30 | GGATGAAAAATTTTGAAACCAG | 4213 | TTTA | 4255 | 89.17% |
| hH29-31 | CTCAGGAGAAAATGATAAAGTA | 4214 | TTTC | 4256 | 90.51% |
| hH29-32 | cCTCAGGAGAAAATGATAAAGT | 4215 | TTTT | 4257 | 88.16% |
| hH29-33 | GAAACCAGTACTTTATCATTTT | 4216 | TTTT | 4258 | 86.74% |
| hH29-34 | AAACCAGTACTTTATCATTTTC | 4217 | TTTG | 4259 | 91.02% |
| hH29-35 | TCATTTTCTCCTGAGGAAAATT | 4218 | TTTA | 4260 | 83.29% |
| hH29-36 | CTCCTGAGGAAAATTTTGGAGA | 4219 | TTTT | 4261 | 91.88% |
| hH29-37 | TCCTGAGGAAAATTTTGGAGAC | 4220 | TTTC | 4262 | 96.24% |
| hH29-38 | GCCACATATGCAGCAAGTCCAC | 4221 | TTTA | 4263 | 100.00% |
| hH29-39 | GGAGACGACAGTGGACTTGCTG | 4222 | TTTT | 4264 | 90.43% |
| hH29-40 | GAGACGACAGTGGACTTGCTGC | 4223 | TTTG | 4265 | 99.01% |
| hH29-41 | ATATCTTCCCAGCTGATAGATG | 4224 | TTTG | 4266 | 99.18% |
| hH29-42 | CAACAATTGGCAATGATGTCAG | 4225 | TTTG | 4267 | 95.26% |

[0344] Guides that spanned the intron/exon boundaries were included because such guides may create indels that interfere with splicing. Using Geneious Prime the spacer sequences of these 42 guides were searched against the human genome and a specificity score was assigned by the software based on the alignment to the human genome. A higher specificity score indicates a lower probability of that guide recognizing 1 or more sequences in the human genome other than the site to which the spacer was designed. The specificity scores ranged from 10% to 100% with 25 guides having a specificity score greater than 90% and 33 guides having a specificity score greater than 80%. This analysis demonstrates that guides targeting exonic regions of a human gene with high specificity scores can be readily identified and it is expected that a number of highly active guides would be identified.

### Example 33—Comparison of the Editing Potency of Nucleases Described Herein to that of spCas9 in Mouse Liver Cells

[0345] The CRISPR Cas9 nuclease from the bacterial species Streptococcus pyogenes (spCas9) is widely used for genome editing and is among the most active RNA guided nucleases identified. The relative potency of MG29-1 compared to spCas9 was evaluated by nucleofection of different doses of RNP in the mouse liver cell line Hepa1-6. sgRNA targeting intron 1 of mouse albumin were used for both nucleases. For MG29-1, the sgRNA mAlb29-1-8 identified in Example 29 was selected. Guide mAlb29-1-8 (see Example 29) was chemically synthesized incorporating chemically modifications called AltR1/AltR2 (Integrated DNA Technologies) designed to improve the potency of guides for the Type V nuclease cpf1 that has a similar sgRNA structure as MG29-1. For spCas9 a sgRNA that efficiently edited mouse albumin intron 1 was identified by testing 3 guides selected from an in-silico screen. The spCas9 protein used in these studies was obtained from a commercial supplier (Integrated DNA technologies AltR-sPCas9).

[0346] The sgRNA mAlbR1 (spacer sequence TTAGTATAGCATGGTCGAGC) was chemically synthesized and incorporated chemical modifications comprised of 2′ O methyl bases and phosphorothioate (PS) linkages on the 3 bases on both ends of the guide that improve potency in cells. The mAlbR1 sgRNA generated INDELS at a frequency of 90% when RNP comprised of 20 pmol spCas9 protein/50 pmol of guide was nucleofected into Hepa1-6 cells indicating that this is a highly active guide. RNP formed with a range of nuclease protein from 20 pmoles to 1 pmole and a constant ratio of protein to sgRNA of 1:2.5 were nucleofected into Hepa1-6 cells. INDELS at the target site in mouse albumin intron 1 were quantified using Sanger sequencing of the PCR amplified genomic DNA and ICE analysis. The results shown in FIG. 52 demonstrate that MG29-1 generated a higher percentage of INDELS than spCas9 at lower RNP doses when the editing was not saturating. These data indicate that MG29-1 is at least as active and potentially more active than spCas9 in liver-derived mammalian cells.

### Example 34—Engineering Sequence Variants of Nucleases Described Herein and Evaluation in Mouse Liver Cells

[0347] In order to improve the editing efficiency of MG29-1 a set of mutations substituting one or two amino acids was introduced in the MG29-1 coding region. The set of amino acid substitutions was determined by alignment to Acidaminococcus sp. Cas12a (AsCas12a). Structured-guide engineering (Kleinstiver, et al, Nat Biotechnol. 2019, 37 276-282) substituted different amino acid in AsCas12a with the goal of altering or improving PAM binding. Four amino acid substitutions in AsCas12a: 5170R, E174R, N577R and K583R, showed higher editing efficiencies with canonical and non-canonical PAMs. Sites matching these substitutions were identified in MG29-1 by multiple alignment and correspond to: S168R, E172R, N577R and K583R in MG29-1.

[0348] In order to test the single amino acid substitutions a 2-plasmid delivery system was used. Expression plasmids encoding MG29-1 with single amino acid substitutions were constructed using standard molecular cloning techniques. One plasmid encoded for MG29-1 under CMV promoter, the second plasmid contained the mAlb29-1-8 sgRNA (see Table 8), which has high editing efficiency in Hepa 1-6 cells. Transcription of the guide was driven by a human U6 promoter. Confirmation of initial results from single amino acid substitutions using the 2-plasmid system and testing of double amino acid substitutions was done using in vitro transcribed (IVT) mRNA encoding MG29-1 (see Example 33 for details of how the IVT mRNA was made) and chemically synthesized guides incorporating the AltR1/AltR2 chemical modifications that had been optimized by Integrated DNA Technologies for Cpf1 (synthesized at Integrated DNA technologies). For delivery of the 2-plasmid system 100 ng of plasmid encoding MG29-1 and 400 ng of plasmid encoding the guide were mixed with Lipofectamine 3000, added to Hepa1-6 cells and incubated for 3 days prior to genomic DNA isolation.

[0349] For delivery of IVT mRNA and synthetic guides, 300 ng of mRNA and 120 ng of synthetic guide were mixed with Lipofectamine Messenger Max, added to cells and incubated for 2 days prior to genomic DNA isolation. Synthetic guides screened using IVT mRNA correspond to guides detailed in Table 8 but for simplicity the names of the guides in FIG. 53 have been shortened so that guide “mAlb29-1-1” is represented as g1-1, “mAlb29-1-8” is represented as g1-8 and so on. One guide targeting the human T cell receptor locus (TRAC) was also tested (35 TRAC on FIG. 53D). Guide 35 TRAC spacer is: GAGTCTCTCAGCTGGTACACGG (SEQ ID NO: 4268) with a TTTG PAM. Guide 35 TRAC was ordered with the same modifications as mentioned before. Genomic DNA and PCR amplification was performed as described in the previous example for MG29-1 editing of mouse albumin intron 1. For guide 35 TRAC, the human TRAC locus was amplified with Primer F: TGCTTTGCTGGGCCTTTTTC (SEQ ID NO: 4269), Primer R: ACAGTCTGAGCAAAGGCAGG (SEQ ID NO: 4270). The resulting 957 bp PCR product was purified as described previously. Editing was assessed by Sanger sequencing using primer ATCACGAGCAGCTGGTTTCT (SEQ ID NO: 4271).

[0350] Editing efficiency for mouse albumin intron 1 and human TRAC locus was quantified using Sanger sequencing of the PCR products followed by Inference of CRISPR Edits (ICE). Data representing up to 4 biological replicates are plotted in FIG. 53. The single amino acid substitution S168R demonstrated improved editing efficiency when using guide mAlb29-1-8 in the 2-plasmid system (FIG. 53A). Mutation E172R did not provide a major improvement with guide mAlb29-1-8 while the mutation K583R completely prevented editing with the mAlb29-1-8 guide. Transfection with MG29-1 mRNA and synthetic guide mAlb29-1-8 confirmed the results from plasmid transfection (FIG. 53B). The single amino acid substitution S168R conferred higher editing efficiency across the different concentrations of mRNA tested with guide mAlb29-1-8 (FIG. 53B). The double amino acid substitutions of S168R with E172R (substitution that did not impair activity alone as seen in FIG. 53A), or N577R (a substitution not tested in MG29-1 plasmid transfection but conferred higher editing efficiency of cpf1) and Y170R (which it was hypothesized might improve editing efficiency based on the predicted MG29-1 protein structure) were tested and compared to the single S168R mutant.

[0351] None of the double mutations conferred improved editing efficiencies under the conditions tested (FIG. 53C). The editing efficiencies of the S168R variant of MG29-1 and MG29-1 WT were compared in parallel with 12 guides targeting mouse albumin intron 1 and 1 guide targeting the human T cell receptor locus (TRAC). The S168R variant of MG29-1 exhibited improved editing efficiency with all 13 guides with some guides benefiting more than others (FIG. 4d). Importantly S168R did not impair mammalian editing efficiency for any of the guides tested. These results demonstrate that the S168R (serine at amino acid position 168 changed to arginine) variant of MG29-1 has improved editing activity and which is advantageous in identifying highly active guides for therapeutic use.

### Example 35—Identification of Chemical Modifications of the sgRNA of Nucleases Described Herein that Improve Guide Stability and Improve Editing Efficiency in Mammalian Cells

[0352] RNA molecules are inherently unstable in biological systems due to their sensitivity to cleavage by nucleases. Modification of the native chemical structure of RNA has been widely used to improve the stability RNA molecules used for RNA interference (RNAi) in the context for therapeutic drug development (Corey, J Clin Invest. 2007 Dec. 3; 117(12): 3615-3622, J. B. Bramsen, J. Kjems Frontiers in Genetics, 3 (2012), p. 154). The introduction of chemical modifications to the nucleobases or the phosphodiester backbone of RNA have been pivotal in improving the stability and thus the potency of short RNA molecules in vivo. A wide range of chemical modifications with different properties in terms of stability against nucleases and affinity to complementary DNA or RNA have been developed.

[0353] Similar chemical modifications have been applied to the guide RNA for CRISPR Cas9 nucleases (Hendel et al, Nat Biotechnol. 2015 September; 33(9): 985-989, Ryan et al Nucleic Acids Res 2018 Jan. 25; 46(2):792-803., Mir et al Nature Communications volume 9, Article number: 2641 (2018), 0′ Reilly et al Nucleic Acids Res 2019 47, 546-558, Yin et al Nature Biotechnology volume 35, pages 1179-1187(2017), each of which is incorporated by reference herein in its entirety).

[0354] The MG29-1 nuclease is a novel nuclease with limited amino acid sequence similarity to known Type V CRISPR enzymes such as cpf1. While the sequence of the structural (backbone) component of the guide RNA identified for MG29-1 is similar to that of cpf1 it was not known what chemical modifications to the MG29-1 guide will enable improved stability while retaining activity. A series of chemical modifications of the MG29-1 sgRNA were designed in order to evaluate their impact on sgRNA activity in mammalian cells and stability in the presence of mammalian cell protein extracts.

[0355] We selected the sgRNA mAlb29-1-8 which was highly active in the mouse liver cell line Hepa1-6 when the guide contained a set of proprietary chemical modifications developed by IDT known as AltR1/AltR2 that were designed to improve the activity of the guide RNA for cpf1 and are available commercially (IDT). We selected to test 2 chemical modifications of the nucleobase; 2′-O-Methyl in which the 2′ hydroxyl group is replaced with a methyl group, and 2′-fluoro in which the 2′ hydroxyl group is replaced with a fluorine. Both 2′-O-Methyl and 2′-fluoro modifications improve resistance to nucleases. The 2′-O-methyl modification is a naturally occurring post-transcriptional modification of RNA and improves the binding affinity of RNA:RNA duplexes but has little impact on RNA:DNA stability. 2′-fluoro modified bases have reduced immunostimulatory effects and increase the binding affinity of both RNA:RNA and RNA:DNA hybrids (Pallan et al Nucleic Acids Res 2011 April; 39(8):3482-95, Chen et al Scientific Reports volume 9, Article number: 6078 (2019), Kawasaki, A. M. et al. J Med Chem 36, 831-841 (1993)).

[0356] The inclusion of phosphorothioate (PS) linkages in place of phosphodiester linkages between the bases was also evaluated. PS linkages improve resistance to nucleases (Monia et al Nucleic Acids, Protein Synthesis, and Molecular Genetics|Volume 271, ISSUE 24, P14533-14540, Jun. 14, 1996).

[0357] The predicted secondary structure of the MG29-1 sgRNA with the spacer targeting mouse albumin intron 1 (mAlb29-1-8) is shown in FIG. 54. The stem-loop in the backbone portion of the guide was presumed to be critical for interaction with the MG29-1 protein based on what is known about other CRISPR-cas systems. Based on the secondary structure a series of chemical modifications was designed in different structural and functional regions of the guide. A modular approach was taken that allowed initial testing of guides with fewer chemical modifications that would inform which structural and functional regions of the guide could tolerate different chemical modifications without significant loss of activity. The structural and functional regions were defined as follows. The 3′ end and 5′ end of the guide are targets for exonucleases and can be protected by various chemical modifications including 2′-O-methyl and PS linkages, an approach that has been used to improve the stability of guides for spCas9 (Hendel et al, Nat Biotechnol. 2015 September; 33(9): 985-989).

[0358] The sequences comprising both halves of the stem and the loop in the backbone region of the guide were selected for modification. The spacer was divided into the seed region (first 6 nucleotides closest to the PAM) and the remaining 16 nucleotides of the spacer (referred as the non-seed region). In total 43 guides were designed and 39 were synthesized. All 43 guides contain the same nucleotide sequence but with different chemical modifications. The editing activity of 39 of the guides was evaluated in Hepa1-6 cells by nucleofection of RNP or by co-transfection of mRNA encoding MG29-1 and guide or by both methods. These two methods of transfection may impact the observed activity of the guide due to differences in the delivery to the cell.

[0359] When nucleofection of a RNP is used the guide and the MG29-1 protein are pre-complexed in a tube and then delivered to the cell using nucleofection in which an electric current is applied to the cells' suspension in the presence of the RNP. The electric current transiently opens pores in the cell membrane (and possibly the nuclear membrane as well) enabling cellular entry of the RNP driven by the charge on the RNP. Whether the RNP enters the nucleus via pores created by the electric current or via the nuclear localization signals engineered in the protein component of the RNP, or a combination of the two is unclear.

[0360] When co-transfection of mRNA and guide with a lipid transfection reagent such as Messenger MAX is used, the mixture of the two RNA forms a complex with the positively charged lipid and the complex enters the cells via endocytosis and eventually reaches the cytoplasm. In the cytoplasm the mRNA is translated into protein. In the case of an RNA guided nucleases such as MG29-1 the resulting MG29-1 protein will presumably form a complex with the guide RNA in the cytoplasm before entering the nucleus in a process mediated by the nuclear localization signals that were engineered into the MG29-1 protein.

[0361] Because translation of the mRNA into sufficient amounts of MG29-1 protein followed by the binding of the MG29-1 protein to the guide RNA takes a finite amount of time, the guide RNA may need to remain intact in the cytoplasm for longer than is the case when pre-formed RNP is delivered by nucleofection. Thus lipid-based mRNA/sgRNA co-transfection may require a more stable guide than is the case for RNP nucleofection which may result in some guide chemistries being active as RNP but inactive when co transfected with mRNA using cationic lipid reagents.

[0362] Guides mAlb298-1 to mAlb298-5 contain chemical modifications only on the 5′ and 3′ ends of the sequence using a mixture of 2′-O-methyl and 2′ fluoro bases plus PS linkages. In comparison to the sgRNA without chemical modifications these guides were 7 to 11-fold more active when delivered via RNP demonstrating that end modifications to the guide improved guide activity, presumably through improved resistance to exonucleases. sgRNA mAlb298-1 to mAlb298-5 exhibited 64 to 114% of the editing activity of the guide containing the commercial chemical modifications (AltR1/AltR2). Guide 4, which contains the largest number of chemical modifications, was the least active of the end modified guides but was still 7-fold more active than the un-modified guide. Guide mALB298-30 contains three 2′-O methyl bases and 2 PS linkages at the 5′ end and 4 2′-O methyl bases and 3 PS linkages at the 5′ end and also exhibited activity about 10-fold higher than the unmodified guide and similar or slightly improved in the case of RNA co-transfection compared to mAlb298-1. These data demonstrate that 2′O-methyl combined with PS linkages on both ends of the MG29-1 guide significantly enhanced guide activity compared to an unmodified guide.

[0363] A combination of 2′-fluoro bases and PS linkages were also tolerated at the 3′ end of the guide. Guide mALb298-28 contains three 2′-fluoro bases and 2 PS linkages on the 5′ end and four 2′-fluoro bases and three PS linkages on the 3′ end. This end modified guide retained good editing activity similar to the guides with 2′-O methyl and PS modifications on both ends demonstrating that 2′-fluoro can be used in place of 2′-O methyl to improve guide stability and retain editing activity.

[0364] The sgRNAs mALb298-6, mALb298-7, and mALb298-8 contain the same minimal chemical modifications on the both 5′ and 3′ ends present in mAlb298-1 plus PS linkages in different regions of the stem. PS linkages in the 3′ stem (mALb298-6) and the 5′ stem (mALb298-7) reduced activity by about 30% compared to mAlb298-1 in the RNP nucleofection assay, indicating that these modifications could be tolerated. Larger reductions in activity were observed by lipid-based transfection.

[0365] Introducing PS linkages in both the 3′ and 5′ stems (mALb298-8) reduced activity by about 80% compared to mAlb298-1 in the RNP nucleofection assay and by more than 95% in the lipid transfection assay, indicating that the combination of two PS linkage modifications significantly impaired the function of the guide.

[0366] The sgRNA mAlb298-9 contains the same minimal chemical modifications on the both 5′ and 3′ ends present in mAlb298-1 plus PS linkages in the loop and exhibited similar activity as mAlb298-1 indicating that PS linkages in the loop were well tolerated.

[0367] The sgRNAs mAlb298-10, mAlb298-11, and mAlb298-12 contain the same minimal chemical modifications on the both 5′ and 3′ ends present in mAlb298-1 plus 2′-O methyl bases in different regions of the stem. Including 2′-O methyl bases in either the 3′ stem (mAlb298-11) or the 5′ stem (mAlb298-12) or both halves of the stem (mAlb298-10) was generally well tolerated with only small reductions in activity compared to mAlb298-1 with guide mAlb298-12 (5′ stem modified) being the most active.

[0368] Guide mAlb298-14 contains the same minimal chemical modifications on the both 5′ and 3′ ends present in mAlb298-1 plus a combination of 2′-O-methyl bases and PS linkages in both halves of the stem and had no editing activity by RNP nucleofection or by lipid-based RNA co-transfection. This confirms and extends the result with mAlb298-8 that contained only PS linkages in both stems had retained low levels of activity and shows that extensive chemical modification of both halves of the stem makes the guide inactive.

[0369] The sgRNA mAlb298-13 contains the same minimal chemical modifications on the both 5′ and 3′ ends present in mAlb298-1 plus PS linkages spaced every other base throughout the remainder of the backbone and spacer except for in the seed region of the spacer. These modifications resulted in a dramatic loss of editing activity to close to background levels. While the purity of this guide was only about 50% compared to >75% for most of the guides, this alone could not have caused the complete loss of editing activity. Thus, distributing PS linkages in an essentially random fashion throughout the guide is not an effective approach to improve guide stability while retaining editing activity.

[0370] Guides mALb298-15 and mALb298-16 contain the same minimal chemical modifications on the both 5′ and 3′ ends present in mAlb298-1 plus extensive PS linkages in the backbone. While both guides retained about 35% of the activity of mAlb298-1 by RNP nucleofection they retained only 3% of the activity of mAlb298-1 by lipid-based RNA co-transfection indicating that extensive PS modification of the backbone significantly reduced editing activity. Combining the PS linkages in the backbone with PS linkages in the spacer region as in mAlb298-17 and mAlb298-18 resulted in further loss of activity consistent with the observation the random inclusion of PS linkages is blocks the ability of the guide to direct editing by MG29-1.

[0371] Guide mAlb298-19 contains the same chemical modifications in the spacer as mALb298-1 but in the backbone region the 5′ end has additional 4 2′O-methyl bases and an additional 14 PS linkages. The activity of mAlb298-19 was about 40% of that of mAlb298-1 by RNP nucleofection but only 22% by RNA co-transfection demonstrating again that extensive chemical modifications in the backbone region of the guide are not well tolerated.

[0372] Guides mAlb298-20, mAlb298-21, mAlb298-22, and mAlb298-23 have identical chemical modifications in the backbone region comprised of a single 2′-O methyl and 2 PS linkages at the 5′ end which are the same 5′ end modifications as in mAlb298-1. The spacer regions of Guides mAlb298-20, mAlb298-21, mAlb298-22, and mAlb298-23 contain combinations of 2′-O-methyl and 2′-fluoro bases as well as PS linkages. The most active of these 4 guides was mAlb298-2 in which 2′-fluoro modifications were made on all bases in the spacer except for the 7 bases closest to the PAM (seed region) and the last base at the 3′ end which was modified with a 2′-O-methyl and 2 PS linkages. This demonstrates that including 2′-fluoro modifications on most of the spacer except for the seed region did not significantly reduce activity and thus represents a good strategy to enhance guide stability.

[0373] Guides mAlb298-24, mAlb298-25, mAlb298-26, and mAlb298-8 have identical chemical modifications in the backbone. mAlb298-8 which has PS linkages in both halves on the stem had significantly reduced editing activity with only 24% and 2% of guide mAlb298-1 demonstrating that these PS linkages impaired activity. Interestingly, while mALb298-24 and mALb298-25 also had low editing activity the activity of mALb298-26 was improved compared to mAlb298-8 indicating that the additional modifications in mALb298-26 which comprise 2′-fluoro bases in 14 of the bases in the spacer (excluding the seed region) could rescue the reduced editing activity caused by the PS linkages in the stem. This provides additional evidence of the beneficial impact of 2′-fluoro bases in the spacer upon editing activity.

[0374] Guides mAlb298-27 and mAlb298-29 contain extensive base and PS modifications throughout the backbone and spacer regions had no activity again indicating that not all chemical modifications of the guide retain editing activity.

[0375] Based on the structure activity relationships obtained from the analysis of guides mALb298-1 to mALb298-30, an additional set of seven guides were designed and tested by RNP nucleofection and lipid-based RNA co-transfection of Hepa1-6 cells. These guides combined chemical modifications that were observed to retain good editing activity in guides mALb298-1 to mALb298-30. Guides mALb298-31 to mALb298-37 all contain end modifications comprised of at least one 2′-O methyl and 2 PS linkages at the 5′ end and one 2′-O methyl and 1 PS linkage at the 5′ end. In addition to the end modifications, combining 2′-O methyl bases in both halves of the stem with 2′fluoro bases in 14 bases of the spacer (excluding the seed region) as in mAlb298-31 resulted in editing activity that was slightly improved or similar to end modifications alone and 10-fold improved compared to the unmodified guide. Combining 2′-O methyl bases in just the 5′ stem with 2′fluoro bases in 14 bases of the spacer (excluding the seed region) as in mALb298-32 resulted in a guide that was among the most active tested.

[0376] Similarly, combining PS linkages in just the loop with 2′fluoro bases in 14 bases of the spacer (excluding the seed region) as in mALb298-33 resulted in potent activity up to 15-fold higher than the unmodified guide. Guide mAlb298-37 combines more extensive 3′ end modifications with 2′-O methyl bases in the 5′ stem, PS linkages in the loop and 14 2′fluoro bases and 3 PS linkages in the spacer (excluding the seed region) and still retained editing activity similar to that of the AltR1/R2 modifications and significantly improved compared to the unmodified guide. mALb298-37 thus represents a heavily modified MG29-1 guide that retains potent editing activity in mammalian cells. Guide mALb298-38 exhibited potent editing activity when delivered as a RNP but was completely inactive when delivered to cells by lipid-based RNA co-transfection suggesting that thus guide may have some unexpected sensitivity to nucleases. Guide mALb298-39 which is identical to guide mAlb298-37 except that it has 11 fewer 2′-fluoro bases and 1 less PS linkage in the spacer had the highest editing activity when considering both RNP and mRNA transfection methods but has fewer chemical modifications than some of the other guide designs which might be detrimental in terms of performance in vivo.

[0377] Additional combinations of chemical modifications were designed to create mAlb298-40 to mALb298-43 that might also retain good editing activity while having more extensive chemical modifications. For example, in mAlb298-41 which also incorporates some DNA bases only 6 of the bases are un-modified ribonucleotides. Similarly, mAlb298-42 contains 2′-fluoro groups throughout the entire spacer and has 5 un-modified ribonucleotides. We envisage that testing of these and other guide chemical modifications will lead to one or more optimized designs. Nevertheless, within the set of guides mALb298-1 to mALb298-39 and particularly among the set of guides mALb298-31 to mALb298-39 we have identified guides with extensive chemical modifications that retain editing activity similar or superior to that of unmodified guides or guides with just end modifications.

[0378] In order to test the stability of the chemically modified guides compared to the guide with no chemical modification (native RNA), a stability assay using cell crude extracts was used. Crude cell extracts from mammalian cells were selected because they should contain the mixture of nucleases that a guide RNA will be exposed to when delivered to mammalian cells in vitro or in vivo. Hepa 1-6 cells were collected by adding 3 ml of cold PBS per 15 cm dish of confluent cells and releasing the cells from the surface of the dish using a cell scraper. The cells were pelleted at 200 g for 10 min and frozen at −80° C. for future use. For the stability assays, cells were resuspended in 4 volumes of cold PBS (e.g. for a 100 mg pellet cells were resuspended in 400 μl of cold PBS). Triton X-100 was added to a final concentration of 0.2% (v/v), cells were vortexed for 10 seconds, put on ice for 10 minutes and vortexed again for 10 seconds. Triton X-100 is a mild non-ionic detergent that disrupts cell membranes but does not inactivate or denature proteins at the concentration used.

[0379] Stability reactions were set up on ice and consisted of 20 μl of cell crude extract with 100 fmoles of each guide (1 μl of a 100 nM stock). Six reactions were set up per guide consisting of: input, 15 min, 30 min, 60 min, 240 min and 540 min (The time in minutes referring to the length of time each sample was incubated). Samples were incubated at 37° C. from 15 minutes up to 540 min while the input control was left on ice for 5 minutes. After each incubation period the reaction was stopped by adding 300 μl of a mixture of phenol and guanidine thiocyanate (Tri reagent, Zymo Research) which immediately denatures all proteins and efficiently inhibits ribonucleases and facilitates the subsequent recovery of RNA. After adding Tri Reagent the samples were vortexed for 15 seconds and stored at −20° C. RNA was extracted from the samples using Direct-zol RNA miniprep kit (Zymo Research) and eluted in 100 μl of nuclease-free water. Detection of the modified guide was performed using Taqman RT-qPCR using the Taqman miRNA Assay technology (Thermo Fisher) and primers and probes designed to specifically detect the sequence in the mAlb298 sgRNA which is the same for all of the guides. Data was plotted as a function of percentage of sgRNA remaining in relation to the input sample. The guide with no chemical modifications was the most rapidly eliminated when incubated with the cell extract (FIG. 55) with more than 90% of the guide degraded within 30 minutes. The guide with the AltR1/AltR2 (AltR in FIG. 55) chemical modifications was slightly more stable in the presence of cell extract than the un-modified guide with about 80% of the guide degraded in 30 minutes. Guide mALb298-31 that contains chemical modifications at both ends as well as 2′ O-methyl bases in both stems and 2′-fluoro bases at all positions of the spacer except for the seed region was significantly more stable than either unmodified guide or the AltR guide.

[0380] Guide mAlb298-34 exhibited improved stability compared to guide mALb298-31. Guide mALb298-34 differs to guide mALb298-31 only in the chemical modifications within the spacer. mALb298-34 has 9 fewer 2′-Fluoro bases in the spacer than mALb298-31 but contains 4 PS linkages in the spacer compared to 2 PS linkages in mALb298-31. Because 2′-fluoro bases improve the stability of RNA this suggests that the additional PS linkages in the spacer were responsible for the improved stability of mALb298-34 compared to mALb298-31.

[0381] Guide mALb298-37 was the most stable of all the guides tested and was significantly more stable than mALb298-34 with 80% of the guide remaining after 240 min (4 h) compared to 30% for mALb298-34. The chemical modifications of mALb298-37 differ from guide mALb298-34 in both the spacer and backbone regions. mALb298-37 has an additional two 2′-O-methyl groups and 2 additional PS linkages at the 5′ end. In addition, the loop region of mALb298-37 contains PS linkages and does not contain the 2′-O-methyl groups present in the second half of the stem in mALb298-34. In addition, the spacer of mALb298-37 contains 9 more 2′-fluoro bases but the same number of PS linkages as mALb298-34 albeit in different locations.

[0382] Overall, these data suggest that additional PS linkages at the 5′ end of the spacer and in the loop of the backbone region significantly improve stability of the guide RNA. Guide mALb298-37 which exhibited the greatest stability in the cell extracts among the guides tested also exhibited potent editing activity in Hepa1-6 cells that was similar or improved compared to the AltR1/Altr2 modifications and improved compared to chemical modifications of the 5′ and 3′ ends only.

TABLE 12
Impact of chemical modifications of the MG29-1 sgRNA sequence
upon editing activity in mammalian cells

| | | | Editing | |
|---|---|---|---|---|
| | | | activity | |
| | | | (% of | |
| | | | AltR1/AltR2 | |
| | | SEQ ID | control) | |
| sgRNA name | sgRNA sequence | NO: | RNP | mRNA |
| mAlb298-1_ | /AltR1/rCrUrUrArArUrUrUrCrUrArCrUr | N/4272 | 100 | 100 |
| AltR1/R2 | GrUrUrGrUrArGrArUrCrUrGrUrArArCrGr | | | |
| | ArUrCrGrGrGrArArCrUrGrGrCrA/AltR2/ | | | |
| mAlb298-0 | rCrUrUrArArUrUrUrCrUrArCrUrGrUrUrG | 4272 | 13.5 | NT |
| | rUrArGrArUrCrUrGrUrArArCrGrArUrCrG | | | |
| | rGrGrArArCrUrGrGrCrA | | | |
| mAlb298-1 | mC*rU*rUrArArUrUrUrCrUrArCrUrGrUrU | 4273 | 114.7 | 76.2 |
| | rGrUrArGrArUrCrUrGrUrArArCrGrArUrC | | | |
| | rGrGrGrArArCrUrGrG*rC*mA | | | |
| mAlb298-2 | mC*rU*rU*rArArUrUrUrCrUrArCrUrGrUr | 4274 | 111.7 | 70.2 |
| | UrGrUrArGrArUrCrUrGrUrArArCrGrArUr | | | |
| | CrGrGrGrArArCrUrG*rG*rC*mA | | | |
| mAlb298-3 | mC*mU*rU*rArArUrUrUrCrUrArCrUrGrUr | 4275 | 100.2 | 63.7 |
| | UrGrUrArGrArUrCrUrGrUrArArCrGrArUr | | | |
| | CrGrGrGrArArCrUrG*rG*mC*mA | | | |
| mAlb298-4 | mC*mU*mU*rArArUrUrUrCrUrArCrUrGrUr | 4276 | 72.5 | 69.6 |
| | UrGrUrArGrArUrCrUrGrUrArArCrGrArUr | | | |
| | CrGrGrGrArArCrUrG*mG*mC*mA | | | |
| mAlb298-5 | mC*rU*rUrArArUrUrUrCrUrArCrUrGrUrU | 4277 | 76.9 | 87.5 |
| | rGrUrArGrArUrCrUrGrUrArArCrGrArUrC | | | |
| | rGrGrGrArArCrUrG*/i2FG//i2FC/*/32F | | | |
| | A/ | | | |
| mAlb298-6 | mC*rU*rUrArArUrUrUrCrUrArCrUrGrUrU | 4278 | 89.4 | 40.4 |
| | rG*rU*rA*rG*rArUrCrUrGrUrArArCrGrA | | | |
| | rUrCrGrGrGrArArCrUrGrG*rC*mA | | | |
| mAlb298-7 | mC*rU*rUrArArUrU*rU*rC*rU*rArCrUrG | 4279 | 83.2 | 24.5 |
| | rUrUrGrUrArGrArUrCrUrGrUrArArCrGrA | | | |
| | rUrCrGrGrGrArArCrUrGrG*rC*mA | | | |
| mAlb298-8 # | mC*rU*rUrArArUrU*rU*rC*rU*rArCrUrG | 4280 | 28.4 | 2.6 |
| | rUrUrG*rU*rA*rG*rArUrCrUrGrUrArArC | | | |
| | rGrArUrCrGrGrGrArArCrUrGrG*rC*mA | | | |
| mAlb298-9 | mC*rU*rUrArArUrUrUrCrUrArCrU*rG*rU | 4281 | 110.9 | 87.5 |
| | *rU*rGrUrArGrArUrCrUrGrUrArArCrGrA | | | |
| | rUrCrGrGrGrArArCrUrGrG*rC*mA | | | |
| mAlb298-10 | mC*rU*rUrArArUrUmUmCmUmArCrUrGrUrU | 4282 | 87.5 | 61.6 |
| | rGmUmAmGmArUrCrUrGrUrArArCrGrArUrC | | | |
| | rGrGrGrArArCrUrGrG*rC*mA | | | |
| mAlb298-11 | mC*rU*rUrArArUrUrUrCrUrArCrUrGrUrU | 4283 | 94.5 | 63.5 |
| | rGmUmAmGmArUrCrUrGrUrArArCrGrArUrC | | | |
| | rGrGrGrArArCrUrGrG*rC*mA | | | |
| mAlb298-12 | mC*rU*rUrArArUrUmUmCmUmArCrUrGrUrU | 4284 | 121.8 | 84.0 |
| | rGrUrArGrArUrCrUrGrUrArArCrGrArUrC | | | |
| | rGrGrGrArArCrUrGrG*rC*mA | | | |
| mAlb298-13 # | mC*rU*rU*rArA*rUrU*rUrC*rUrA*rCrU* | 4285 | 1.0 | 0.0 |
| | rGrU*rUrG*rUrA*rGrA*rUrCrUrGrUrArA | | | |
| | *rCrG*rArU*rCrG*rGrG*rArA*rCrU*rGr | | | |
| | G*mC*mA | | | |
| mAlb298-14 | mC*rU*rUrArArUrU*mU*mC*mU*mArCrUrG | 4286 | 0.0 | 0.0 |
| | rUrUrG*mU*mA*mG*mArUrCrUrGrUrArArC | | | |
| | rGrArUrCrGrGrGrArArCrUrGrG*rC*mA | | | |
| mAlb298-15 # | mC*rU*rU*rArArU*rU*rU*rC*rU*rA*rC* | 4287 | 39.3 | 2.4 |
| | rU*rG*rU*rU*rG*rU*rA*rG*rA*rUrCrUr | | | |
| | GrUrArArCrGrArUrCrGrGrGrArArCrUrGr | | | |
| | G*rC*mA | | | |
| mAlb298-16 | mC*rU*rU*rArArU*rU*rU*rC*rUrArCrU* | 4288 | 41.6 | 17 |
| | rG*rU*rU*rG*rU*rA*rG*rA*rUrCrUrGrU | | | |
| | rArArCrGrArUrCrGrGrGrArArCrUrGrG*r | | | |
| | C*mA | | | |
| mAlb298-17 # | mC*rU*rU*rArArU*rU*rU*rC*rUrArCrU* | 4289 | 0.0 | 1.2 |
| | rG*rU*rU*rG*rU*rA*rG*rA*rUrCrUrGrU | | | |
| | rArA*rCrG*rArU*rCrG*rGrG*rArA*rCrU | | | |
| | *rGrG*mC*mA | | | |
| mAlb298-18 | mC*rU*rU*rA*rA*rU*rU*rU*rC*rU*rA*r | 4290 | 5.2 | 1.2 |
| | C*rU*rG*rU*rU*rG*rU*rA*rG*rA*rUrCr | | | |
| | UrGrUrArA*rCrG*rArU*rCrG*rGrG*rArA | | | |
| | *rCrU*rGrG*mC*mA | | | |
| mAlb298-19 | mG*mU*mA*mG*mC*rU*rU*TATA*rUrU*rUr | 4291 | 50.1 | 17.4 |
| | C*rUrA*rCrU*rGrU*rUrG*rUrA*rGrA*rU | | | |
| | rCrUrGrUrArArCrGrArUrCrGrGrGrArArC | | | |
| | rUrGrG*rC*mA | | | |
| mAlb298-20 | mC*rU*rUrArArUrUrUrCrUrArCrUrGrUrU | 4292 | 316 | 86.3 |
| | rGrUrArGrArUrCrUrGrUrArArCrGrArUrC | | | |
| | rGrGrGrArArC*/i2FU//i2FG/*/i2FG//i | | | |
| | 2FC/*/32FA/ | | | |
| mAlb298-21 | mC*rU*rUrArArUrUrUrCrUrArCrUrGrUrU | 4293 | 119.0 | 80.6 |
| | rGrUrArGrArUrCrUrGrUrArArC/i2FG//i | | | |
| | 2FA//i2FU//i2FC//i2FG//i2FG//i2FG/ | | | |
| | /i2FA//i2FA//i2FC//i2FU//i2FG//i2F | | | |
| | G/*/i2FC/*mA | | | |
| mAlb298-22 | mC*rU*rUrArArUrUrUrCrUrArCrUrGrUrU | 4294 | 25.1 | 98.8 |
| | rGrUrArGrArUrCrUrGrUrArArCrGrArUrC | | | |
| | rGrGrGrA*rA/i2FC/*/i2FU//i2FG/*/i2 | | | |
| | FG//i2FC/*mA | | | |
| mAlb298-23 | mC*rU*rUrArArUrUrUrCrUrArCrUrGrUrU | 4295 | 22.6 | 61.9 |
| | rGrUrArGrArUrCrUrGrUrArArCrGrArUrC | | | |
| | rGrGrGrA/i2FA//i2FC//i2FU//i2FG//i | | | |
| | 2FG/*mC*mA | | | |
| mAlb298-24 | mC*rU*rUrArArUrU*rU*rC*rU*rArCrUrG | 4296 | 7.4 | 12.2 |
| | rUrUrG*rU*rA*rG*rArUrCrUrGrUrArArC | | | |
| | rGrArUrCrGrGrGrArArC*/i2FU//i2FG/* | | | |
| | /i2FG//i2FC/*/32FA/ | | | |
| mAlb298-25 | mC*rU*rUrArArUrU*rU*rC*rU*rArCrUrG | 4297 | 0.0 | 0.0 |
| | rUrUrG*rU*rA*rG*rArUrCrUrGrUrArArC | | | |
| | rGrArUrCrGrG/i2FG//i2FA/*/i2FA//i2 | | | |
| | FC/*/i2FU//i2FG/*rGrC*mA | | | |
| mAlb298-26 | mC*rU*rUrArArUrU*rU*rC*rU*rArCrUrG | 4298 | 55.5 | 29.8 |
| | rUrUrG*rU*rA*rG*rArUrCrUrGrUrArArC | | | |
| | /i2FG//i2FA//i2FU//i2FC//i2FG//i2F | | | |
| | G//i2FG//i2FA//i2FA//i2FC//i2FU//i | | | |
| | 2FG//i2FG/*/i2FC/*mA | | | |
| mAlb298-27 | /52FC/*/i2FU/*/i2FU/*rUrUrArArU/i2 | 4299 | NT | 0 |
| | FU//i2FU/rC*rU/i2FA/*/i2FC/rU/i2FG | | | |
| | /*/i2FU//i2FU/rG/i2FU//i2FA//i2FG/ | | | |
| | /i2FA/rU/i2FC/rUrG*rUrA/i2FA/rC/i2 | | | |
| | FG/*/i2FA/*/i2FU/*/i2FC/*/i2FG/rG* | | | |
| | rGrA*rA/i2FC/*rU*/i2FG//i2FG/*/i2F | | | |
| | C/*/32FA | | | |
| mAlb298-28 | /52FC/*/i2FU/*/i2F/rUrUrUrArArUrUr | 4300 | NT | 84.8 |
| | UrCrUrArCrUrGrUrUrGrUrArGrArUrCrUr | | | |
| | GrUrArArCrGrArUrCrGrGrGrArArCrU*/i | | | |
| | 2FG//i2FG/*/i2FC/*/52FA/ | | | |
| mAlb298-29 | mC*mU*mU*rUrUrArArUmUmUrC*rUmA*mCr | 4301 | 0.0 | 0.0 |
| | UmG*mUmUrGmUmAmGmArUmCrUrG*rUrAmAr | | | |
| | CmG*mA*mU*mC*mGrG*rGrA*rAmC*rU*mGm | | | |
| | G*mC*mA | | | |
| mAlb298-30 | mC*mU*mUrUrUrArArUrUrUrCrUrArCrUrG | 4302 | 101.1 | 1054 |
| | rUrUrGrUrArGrArUrCrUrGrUrArArCrGrA | | | |
| | rUrCrGrGrGrArArCrU*mGmG*mC*mA | | | |
| mAlb298-31 | mC*rU*rUrArArUrUmUmCmUmArCrUrGrUrU | 4303 | 140.5 | 744 |
| | rGmUmAmGmArUrCrUrGrUrArArC/i2FG//i | | | |
| | 2FA//i2F0//i2FC//i2FG//i2FG//i2FG/ | | | |
| | /i2FA//i2FA//i2FC//i2FU//i2FG//i2F | | | |
| | G/*/i2FC/*mA | | | |
| mAlb298-32 | mC*rU*rUrArArUrUmUmCmUmArCrUrGrUrU | 4304 | 1703 | 911 |
| | rGrUrArGrArUrCrUrGrUrArArC/i2FG//i | | | |
| | 2FA//i2FU//i2FC//i2FG//i2FG//i2FG/ | | | |
| | /i2FA//i2FA//i2FC//i2FU//i2FG//i2F | | | |
| | G*/i2FC/*mA | | | |
| mAlb298-33 | mC*rU*rUrArArUrUrUrCrUrArCrU*rG*rU | 4305 | 202.7 | 644 |
| | *rU*rGrUrArGrArUrCrUrGrUrArArC/i2F | | | |
| | G//i2FA//i2FU//i2FC//i2FG//i2FG//i | | | |
| | 2FG//i2FA//i2FA//i2FC//i2FU//i2FG/ | | | |
| | /i2FG/*/i2FC/*mA | | | |
| mAlb298-34 | mC*rU*rUrArArUrUmUmCmUmArCrUrGrUrU | 4306 | 818 | 107.0 |
| | rGmUmAmGmArUrCrUrGrUrArArCrGrArUrC | | | |
| | rGrGrGrA*rA/i2FC/*/i2FU//i2FG/*/i2 | | | |
| | FG//i2FC/*mA | | | |
| mAlb298-35 | mC*rU*rUrArArUrUrUrCrUrArCrU*rG*rU | 4307 | 24.3 | 67.9 |
| | *rU*rGrUrArGrArUrCrUrGrUrArArCrGrA | | | |
| | rUrCrGrGrGrA*rA/i2FC/*/i2FU//i2FG/ | | | |
| | */i2FG//i2FC/*mA | | | |
| mAlb298-36 | mC*rU*rUrArArUrUmUmCmUmArCrUrGrUrU | 4308 | 412 | 116.2 |
| | rGrUrArGrArUrCrUrGrUrArArCrGrArUrC | | | |
| | rGrGrGrA*rA/i2FC/*/i2FU//i2FG/*/i2 | | | |
| | FG//i2FC/*mA | | | |
| mAlb298-37 | mC*mU*mU*U*rUrArArUrUmUmCmUmArCrU* | 4309 | 164.9 | 84.5 |
| | rG*rU*rU*rGrUrArGrArUrCrUrGrUrArAr | | | |
| | C/i2FG//i2FA//i2FU//i2FC//i2FG//i2 | | | |
| | FG//i2FG//i2FA//i2FA//i2FC/*/i2FU/ | | | |
| | */i2FG//i2FG/*/i2FC/*mA | | | |
| mAlb298-38 | mC*mU*mU*rU*rUrArArUrUmUmCmUmArCrU | 4310 | 140.5 | 0.0 |
| | *rG*rU*rU*rGmUmAmGmArUrCrUrGrUrArA | | | |
| | rC/i2FG//i2FA//i2FU//i2FC//i2FG//i | | | |
| | 2FG//i2FG//i2FA//i2FA//i2FC/*/i2FU | | | |
| | /*/i2FG//i2FG/*/i2FC/*mA | | | |
| mAlb298-39 | mC*mU*mU*rU*rUrArArUrUmUmCmUmArCrU | 4311 | 135.1 | 114.0 |
| | *rG*rU*rU*rGrUrArGrArUrCrUrGrUrArA | | | |
| | rCrGrArUrCrGrGrGrArArCrU*/i2FG//i2 | | | |
| | FG/*/i2FC/*mA | | | |
| mAlb298-40 | mC*mU*mU*U*UAAUUmUmCmUmACU*G*U*U*G | 4312 | NT | NT |
| | UAGAU/i2FC//i2FU//i2FG//i2FU//i2FA | | | |
| | //i2FA//i2FC//i2FG//i2FA//i2FU//i2 | | | |
| | Fc//i2FG//i2FG//i2FG//i2FA//i2FA// | | | |
| | i2FC/*/i2FU/*/i2FG//i2FG/*/i2FC/*m | | | |
| | A | | | |
| mAlb298-41 | mC*mU*mU*U*UAAUUmUmCmUmACU*G*U*U*d | 4313 | NT | NT |
| | GdTdAdGdAdT/i2FC//i2FU//i2FG//i2FU | | | |
| | //i2FA//i2FA//i2FC//i2FG//i2FA//i2 | | | |
| | Fu//i2Fc//i2FG//i2FG//i2FG//i2FA// | | | |
| | i2FA//i2FC/*/i2FU/*/i2FG//i2FG/*/i | | | |
| | 2FC/*mA | | | |
| mAlb298-42 | mC*mU*mU*U*UAAUUmUmCmUmACU*G*U*U*/ | 4314 | NT | NT |
| | i2FG//i2FU//i2FA//i2FG//i2FA//i2FU | | | |
| | //i2FC//i2FU//i2FG//i2FU//i2FA//i2 | | | |
| | FA//i2Fc//i2FG//i2FA//i2Fu//i2Fc// | | | |
| | i2FG//i2FG//i2FG//i2FA//i2FA//i2Fc | | | |
| | /*/i2FU/*/i2FG//i2FG/*/i2FC/*mA | | | |
| mAlb298-43 | mC*mU*mU*U*UAAUUmUmCmUmAmCU*G*U*U* | 4315 | NT | NT |
| | GUAGAU/i2FC//i2FU//i2FG//i2FU//i2F | | | |
| | A//i2FA//i2FC//i2FG//i2FA//i2FU//i | | | |
| | 2Fc//i2FG//i2FG//i2FG//i2FA//i2FA/ | | | |
| | /i2FC/*/i2FU/*/i2FG//i2FG/*/i2FC/* | | | |
| | mA | | | |

#: these guides had less than 75% purity based on analytical HPLC with purity ranging from 54 to 64%. All other guides exceeded 75% purity
NT: not tested
Nomenclature of chemical modifications: a “/” is used to separate bases with 2′-flourine modifications, m; 2′-O-methyl base (for example a A base with 2′-O-methyl modification is written as mA), i2F; internal 2′-flourine base (for example an internal C with 2′-flourine modification is written as /i2FC/), 52F; 2′-flourine base at the 5′ end of the sequence (for example a 5′ C with 2′-flourine modification is written as /52FC/), 32F; 2′-flourine base at the 3′ end of the sequence (for example a 3′ A base with 2′-flourine modification is written as /32FA/), r; native RNA linkage comprising the sugar ribose (fro example the ribose or RNA form of the A base is written rA), d; deoxyribose sugar (DNA) linkage (for example a deoxyribose form of the A base is written dA), *; between bases in which one of the oxygen molecules in the phosphodiester bond is replaced with sulfur; AltR1 and AltR2 refer to IDT technologies′ proprietary 5′ and 3′ AltR modifications

### Example 36—Therapeutic Gene Editing in Mice Using Nucleases Described Herein

[0383] Gene editing platforms described herein have the potential to effect reparative alterations in vivo. Liver tissue is an example of a tissue that can be advantageously targeted using the gene editing compositions and systems described herein for in vivo gene editing, for example by introduction of indels that function to knock down expression of deleterious genes and/or that are used to replace defective genes. For example, several inherited diseases arise from defects in proteins expressed primarily in the liver, and in vivo delivery to the liver has been proven safe and effective in clinical trials of adeno-associated virus (AAV) vectors. Lipid nanoparticles have also been shown to deliver nucleic acids and approved drugs for RNAi strategies. Liver tissue also includes appropriate cellular machinery for efficient secretion of proteins into the systemic circulation.

[0384] Subjects having a condition in Table 13 or Table 14 are selected for gene editing therapy. For example, a human or mouse model subject having hemophilia A is identified for treatment with gene replacement therapy using a gene editing platform.

TABLE 13
Some Indications for Subject Selection in
Therapeutic Gene Replacement

| | | | 1 in |
|---|---|---|---|
| Hemophilia A | Factor VIII | | 5,000 males |
| Hemophilia A | Factor VIII | Secreted | 1 in |
| | | | 5,000 |
| | | | males |
| Hemophilia B | Factor IX | Secreted | 1 in |
| | | | 20,000 |
| Hereditary | C1 inhibitor | Secreted | 1 in |
| Angioedema | protein | | 25,000 |
| Argininosuccinate | Argininosuccinate | Intracellular | 1 in |
| Lyase deficiency | Lyase | | 70,000 |
| Mucopolysaccharidosis | Arylsulfatase B | Intracellular | 1 in |
| type IV (MPS IV), | | | 200,000 |
| Progressive familial | ATP binding | Intracellular | 1 in |
| intrahepatic | cassette | | 50,000 |
| cholestasis type 2 | family B | | |
| Classical | Galactose-1- | Intracellular | 1 in |
| galactosemia | phosphate | | 50,000 |
| | uridyltransferase | | |

TABLE 14
Some Indications for Subject Selection
in Therapeutic Gene Knockdown

| Indication | Target Gene | Prevalence |
|---|---|---|
| Primary Hyperoxluria | Glyoxylate | Est 1 in 100,000, up to |
| type 1 | oxidase | 5,000 patient in US + EU |
| | (HAO1) | |
| Familial ATTR | Transthyretin | 1 in 100,000 in US, more |
| Amyloidoisis | | frequent in Japan, Sweden |
| Acute Hepatic | Aminolevulinic | 1 in 50,000 |
| Porphoryia | Acid Synthase | |
| | (ALASI) | |
| Cardiovascular | PCSK9 | High (1 in 3 |
| disease without | | deaths in US |
| adequate LDL lowering | | due to CVD) |
| by statins | | |
| Rare Hyperlipidemias | Angiopoietin | Various, approx 1 in |
| | like 3 | 500,000 |
| Homozygous Familial | ApoB100 | 1 in 1 million |
| Hypercholersterolemia | | |
| Hereditary Angioedema | Kallikrein | 1 in 25,000 |

[0385] A gene editing platform comprising a lipid nanoparticle (LNP) encapsulating an sgRNA and an mRNA encoding an MG nuclease described herein and an AAV (e.g., AAV serotype 8) comprising a donor template nucleic acid encoding a therapeutic gene are introduced into the liver intravenously to the subject. The LNP is targeted to hepatocytes via surface functionalization of the LNPs.

[0386] For example, the subject having hemophilia A is treated with a gene replacement platform comprising LNPs containing mRNA encoding a MG29-1 nuclease described herein (SEQ ID NO: 214). LNPs also contain sgRNA specific for albumin I, which is highly expressed in the liver (e.g., albumin can be expressed at about 5 g/dL in the liver, whereas factor VIII can be expressed at about 10 μg/dL in the liver, or 1 million times less than albumin). In addition to the LNPs, AAV8 (AAV serotype 8) viral particles comprising plasmids, which encode replacement template DNA encoding a replacement factor VIII nucleotide sequence, are delivered to the subject as well. Once inside the cell, the mRNA, sgRNA, and template DNA are transiently expressed. The MG29-1 nuclease targets the target locus of the host hepatocyte DNA using the sgRNA and then cleaves the host DNA. The donor template DNA transcribed from the plasmid delivered to the host hepatocyte in the AAV8 is spliced into the cell and stably integrated into the host DNA at the target site of the albumin I gene, and the inserted factor VIII DNA is expressed under the albumin promoter.

[0387] The gene editing platform is also used in subjects selected for gene knockdown therapy. For instance, a subject presenting with familial ATTR amyloidosis is treated with LNPs containing mRNA encoding an MG29-1 nuclease described herein (SEQ ID NO: 214) and a sgRNA specific to a target site in the transthyretin gene. The MG29-1 nuclease and sgRNA are delivered to and expressed in hepatocytes of the subject. In some embodiments, the sgRNA is targeted to a stop codon of the transthyretin gene, and the MG29-1 nuclease's activity removes the endogenous stop codon, effectively knocking down the expression of the gene. In some embodiments, the gene knockdown platform comprises an AAV8 containing a plasmid encoding a polynucleotide comprising a stop codon. When the AAV8 is delivered to the same cell that is expressing the nuclease and sgRNA, an exogenous stop codon is spliced into the tranthyretin gene, leading to knockdown of the gene's expression as a result of premature truncation of proteins translated from RNA produced from the edited DNA.

[0388] While preferred embodiments of the present invention have been shown and described herein, it will be obvious to those skilled in the art that such embodiments are provided by way of example only. It is not intended that the invention be limited by the specific examples provided within the specification. While the invention has been described with reference to the aforementioned specification, the descriptions and illustrations of the embodiments herein are not meant to be construed in a limiting sense. Numerous variations, changes, and substitutions will now occur to those skilled in the art without departing from the invention. Furthermore, it shall be understood that all aspects of the invention are not limited to the specific depictions, configurations or relative proportions set forth herein which depend upon a variety of conditions and variables. It should be understood that various alternatives to the embodiments of the invention described herein may be employed in practicing the invention. It is therefore contemplated that the invention shall also cover any such alternatives, modifications, variations or equivalents. It is intended that the following claims define the scope of the invention and that methods and structures within the scope of these claims and their equivalents be covered thereby.

What is claimed is:

1. An engineered nuclease system comprising:
a. an endonuclease configured to be selective for a protospacer adjacent motif (PAM) sequence comprising 5′-YYn-3′ (SEQ ID NO:3871), wherein said endonuclease is a class 2, type V Cas endonuclease, wherein said endonuclease comprises WED II and PAM-interacting domains having at least 90% sequence identity to WED II and PAM-interacting domains of SEQ ID NO: 215 or a variant thereof; and
b. an engineered guide RNA, wherein said engineered guide RNA is configured to form a complex with said endonuclease and said engineered guide RNA comprises a spacer sequence configured to hybridize to a target nucleic acid sequence.

2. The engineered nuclease system of claim 1, wherein said WEDII and PAM-interacting domains comprise a sequence having at least 80% sequence identity to residues 575-645 of SEQ ID NO: 215 or a variant thereof.

3. The engineered nuclease system of claim 1, wherein said guide RNA comprises a sequence with at least 80% sequence identity to the non-degenerate nucleotides of SEQ ID NO: 3609.

4. The engineered nuclease system of claim 1, wherein said endonuclease comprises a RuvC domain comprising sequences having at least 80% sequence identity to the RuvCI, RuvCII and RuvCIIII domains of SEQ ID NO: 215, wherein said endonuclease comprises the catalytic residues in FIG. 6A.

5. The engineered nuclease system of claim 1, wherein said endonuclease comprises a sequence having at least 80% sequence identity to SEQ ID NO: 215, wherein said endonuclease comprises the catalytic residues in FIGS. 6A and 6B.

6. The engineered nuclease system of claim 1, wherein said guide RNA comprises a sequence complementary to a eukaryotic, fungal, plant, mammalian, or human genomic polynucleotide sequence.

7. The engineered nuclease system of claim 1, wherein said guide RNA is 30-250 nucleotides in length.

8. The engineered nuclease system of claim 1, wherein said endonuclease comprises one or more nuclear localization sequences (NLSs) proximal to an N- or C-terminus of said endonuclease.

9. The engineered nuclease system of claim 1, wherein said endonuclease comprises at least one of the following mutations: S168R, E172R, N577R, or Y170R when a sequence of said endonuclease is optimally aligned to SEQ ID NO: 215.

10. The engineered nuclease system of claim 1, wherein said endonuclease comprises the mutations S168R and E172R when a sequence of said endonuclease is optimally aligned to SEQ ID NO: 215.

11. The engineered nuclease system of claim 1, wherein said endonuclease comprises the mutations N577R or Y170R when a sequence of said endonuclease is optimally aligned to SEQ ID NO: 215.

12. The engineered nuclease system claim 1, wherein said endonuclease comprises the mutation S168R when a sequence of said endonuclease is optimally aligned to SEQ ID NO: 215.

13. The engineered nuclease system of claim 12, wherein said endonuclease does not comprise a mutation of E172, N577, or Y170.

14. The engineered nuclease system of claim 1, further comprising a single- or double-stranded DNA repair template comprising from 5′ to 3′: a first homology arm comprising a sequence of at least 20 nucleotides 5′ to said target deoxyribonucleic acid sequence, a synthetic DNA sequence of at least 10 nucleotides, and a second homology arm comprising a sequence of at least 20 nucleotides 3′ to said target sequence.

15. The engineered nuclease system of claim 14, wherein said first or second homology arm comprises a sequence of at least 40 nucleotides.

16. The engineered nuclease system of claim 14, wherein said first and second homology arms are homologous to a genomic sequence of a eukaryote.

17. The engineered nuclease system of claim 14, wherein said single- or double-stranded DNA repair template comprises a transgene donor.

18. The engineered nuclease system of claim 1, further comprising a DNA repair template comprising a double-stranded DNA segment flanked by one or two single-stranded DNA segments.

19. The engineered nuclease system of claim 18, wherein single-stranded DNA segments are conjugated to the 5′ ends of said double-stranded DNA segment.

20. The engineered nuclease system of claim 18, wherein said single stranded DNA segments are conjugated to the 3′ ends of said double-stranded DNA segment.

21. The engineered nuclease system of claim 18, wherein said single-stranded DNA segments have a length from 4 to 10 nucleotide bases.

22. The engineered nuclease system of claim 18, wherein said single-stranded DNA segments have a nucleotide sequence complementary to a sequence within said spacer sequence.

23. The engineered nuclease system of claim 18, wherein said double-stranded DNA sequence comprises a barcode, an open reading frame, an enhancer, a promoter, a protein-coding sequence, a miRNA coding sequence, an RNA coding sequence, or a transgene.

24. The engineered nuclease system of claim 18, wherein said double-stranded DNA sequence is flanked by a nuclease cut site.

25. The engineered nuclease system of claim 1, wherein said sequence identity is determined by a BLASTP, CLUSTALW, MUSCLE, MAFFT algorithm, or a CLUSTALW algorithm with the Smith-Waterman homology search algorithm parameters.

26. The engineered nuclease system of claim 25, wherein said sequence identity is determined by said BLASTP homology search algorithm using parameters of a wordlength (W) of 3, an expectation (E) of 10, and a BLOSUM62 scoring matrix setting gap costs at existence of 11, extension of 1, and using a conditional compositional score matrix adjustment.

27. A nucleic acid comprising an engineered nucleic acid sequence optimized for expression in an organism, wherein said nucleic acid encodes a class 2, type V Cas endonuclease configured to be selective for a protospacer adjacent motif (PAM) sequence comprising 5′-YYn-3′ (SEQ ID NO:3871), wherein said endonuclease is a class 2, type V Cas endonuclease, wherein said endonuclease comprises WEDII and PAM-interacting domains having at least 80% sequence identity to WEDII and PAM-interacting domains of SEQ ID NO: 215.

28. The nucleic acid of claim 27, wherein said endonuclease comprises a conservatively substituted variant having at least 80% sequence identity to SEQ ID NO: 215.

The application's sequence listing, which the Patent Office published only in electronic form, follows.

SEQUENCE LISTING (4425 sequences)

SEQ ID NO: 1 - protein, 1235 aa, Unknown
  Description of Unknown: uncultivated organism sequence
  Category: MG11 effectors
  Description: MG11-1 effector
MLDKFASLYPVTKTLRFRLLPQGRTEENMQAAKVLENDLERSEAAAVVKGLIKKYHLQFISDTLSGSTLSWQALTETLDKFKADHTATAELDSALAAYRCKLAELFTKSPKYKVMATPVSIIKEILKTETDPENIAALNKLNGYTYIIFDYVSTRMLTYSADAKATSLAYRLVDENYLRFYQDISAAAEISAVLEEAGLDNAEVEAFIRTDYNTCLTSEGIASFNAAAGSINQFVNQLLQQNPVLQSEPALRRHLQPLYKMLLDEAESKIIKFEDYGQLRDAVENFRRNFQYLPQSLIDIFAGRYDYSKIYVGYKYLNEASSQIAGGYNWKLLENALEDFYSKPYLVNGKMPVKYKTVVNKKMNQLAYSFTELQEALDAGESGSSITDLFGKYAELHAAYAAADGNVFYKEYDRKSIASLKNYLDAVNAIARFIKIFAVPEVYVKDEGFYGIVDGAADKLRDFDLLYNMVRNYITKKPYKKSKVALTFNSSSFGRGWDENKIYDELTTIFTYNGKYYLGVINKNDKPDLAAAVSKDEGGYKRMVYKTFDIVKQLPRLSFTKAVKAHFEESDEDYIFDGPKFAKPLRVPKEIYLQSFTDNGDKLVDSAKKYTKAYLDMSGDYKGYYEAIVKRIDYTKEFLSAYKSTSIYDLAFLKPADQYEQWSNFTDDVQTALYKIRWDNIPAAAVDEMVESGKLYLFEIYSADLYKNPAEGRKIDTQAQIFKEIFSENGQKVIKLLGNCEVYFRPASLPAVVTHPKGSILVNKQLVNGKTLPDEVYREIYRYLNKKSENLSPLAKQLLDKELVKYRVAQEDIIKDKRFTENQYSFHLPVTLNYKVKQQFYINMEVMNMLRSRKDINILGINRGTRNLLYVTVINQQGEILYSRSLNEFNGVDYRDKLLVKERGIKDAAMNWQAADSIKNIKEGYLSRALGEIVRLMVKFNAICVVENLSSNFRNAGGGIFAYGNFYKGFETNLIKKLNCLIIKNAEKDKAGSVLRSLQMTRSFESFEKAGRQSGWLFMLDPAYISAVDPLTGFVNLFSFRNLKTIRQKAEFLQKFKSINYVPETKAFDFVFDYKDFGVAVCGPVSCWVATSDVERIVKTTENGKVKFESVLPSMQLAKLFTDKDIDFTDGHNLISEITADSRLVTETLSIFMNIMRLYNYDIDRNNDYVSSPVMGRFDTRYDKKLHNPDELAAYNMARKGLMIIKRAQASEKDSKVDLFIKNADWFSFLQTGNI

SEQ ID NO: 2 - protein, 1223 aa, Unknown
  Description of Unknown: uncultivated organism sequence
  Category: MG11 effectors
  Description: MG11-2 effector
MSINSFISNTKVFTGQPVSKTITAKLVPVGKTRENIDKMNILEMDKQREEAFVQVKKYIDRIHKDFIEDCLTSQDMGLGIAIHSYEFNKLYELRVNLKNLTGKERKDVQKQIKLEENRLRVLISKYFEFNPKYKKLFNIELFKELLPAYCSEEEMKDVNLFDGYTSYFKRFNDTREMLYSSEEIHNAVAYRIINENYPVFVDNKLSLEYISTYFHELFDFSENGQKLFHEFADFCDSSYGMSSKYIAKYNSFISGTFDEEGKQITRGLNQLINEYIQKNKDAHVSYFKPLYKNIMSDKKPLFSVSCFESTAEIKDAVISYNESICKPHERFISYITKSFPADFWCVDKKNLNRLSHIICSNPFTLDNLVSASNKFSKKKPDIYCASDFKELLSENILEETEFHFDFLKYKDYLVQFNPNDFYSKIPFDKINDLQYDKKQSLELKEYLQAALDYYNMLRILHIDTEDERIISKEISYDEQYYAELSLILDAMEPIVKLYNKVRNFVTKSVKQEKKIKLNFNCSQFLGGWSESQEKVKNGLIFHDEEEDKYYLGIYNQNMKKPDINYTSDSSFKKMVLNTIPEPYKMLPKVFFSKKGLETYKPCEEIIEGYKNELHKKSNSNFDINFCHKLIDYYKVCIKQRKEWDCFTFDFKPTEEYQDTSGFFDDVSKGGYSLVMKGIDKENLMNAVEEGSIFLFEIYNKYLAKKGHGKDTYTQLLRTALCGKESNIQFCAGAQVYYRPALLEKEVTHEKGSVIVNKITREGFTINSEVYENIYSYFNYQTPLSSEAKTLLDSGSVIYKTADRDLIKDRRYTEESFSFHCPVIINWKGKEINPFTFNKKVLEVIRNDESLNILSVNRGENNLVYVVLMNRNGKVLLDKSFNLIQTGKQNINYKNKLIEKSKERANSRTNWQEINGIKDLKSGYLSFIVAEITRLMIDNNAVLVLESLSSDFKSGRQFIESNIYQQFEEALLTKLACVILKEREAGTPGSLEHPYQLVPKFESFEKIYLQFGFVFFVNPSYISKIDPANGVFNFFNFNVLTNNEKRTEFFKKFESITEENGKLVFEYCPGNFNKDFKEIDRTFRVVASGSRNVWNPKTKTFESIDLELEGHAVYENLYQVNYRNIAELFKDKCNASCLPHPAATERLLRVFIAAVSFRTFVLDDWKYVSPLGIDNEFTGKSMDYIAAYNLANKFRTILELSSDSEYLINIKTAEYVNKINSANP

SEQ ID NO: 3 - protein, 1264 aa, Unknown
  Description of Unknown: uncultivated organism sequence
  Category: MG11 effectors
  Description: MG11-3 effector
MEQFTNLYQLQKTLRFDIIPTEETLEILKEKGVKKSDKKLLEADKKRDSDFHDAQKVIDRYHRYFINSTLDAIKNDSEIIDKLRNCSNERGKDELRKIISDYFQKDSQFNRLFGKELFAKKNEKKDVEDSPLFTYAKTKNEKNALESFVNFTVFFKRYNENRKNMYVDKKQTTAIAYRIANVNLPKFEENNNCFLEIKKTKLMEILNKNRQLKKLLKGKKCEEVFRLDYYINVWKQTEIDEYNEIVGIINTNIKQYNDTLSGKKKSELPLMKKLHKQILGFKEEDKNKWEYRGFDSDKEMLTAVREFYSTYELKIKEKLRQLLETINDFDLSGIHVHQKSLRTISSFMFDDGYAIARFLIPQKSDETYEDYKDRIKKGNKSFTIKGINKKANTDLCQYFSKHSFIKVNEDDEKREEKEIFETINIAYENAKEIIDNANNYTEKNLAGSGDEQKLRTLLDNLKALQHFVQPLLGKGDEKKRDCSFYNKFMELWEDLLPLNILYDKVRSHMTKKPFSKEKIKVIFDVKKDFLNGWTDNMTKSDNGTQYGGFLFRKKNSIGEYDYFLGICKKAWILRKREGVSGDYERLDYYQINSRTFYKYYYYGENGFEEDKNSLMKAIKAYLEITAQDEDDRDLLEDVKAKDTPIAMITIIQERSQSKLSELLNDKCFADINKTVIENLRKSILSLSRIPEAQDYKDKEYYLFSDIQQDIEELCRTKRIFDYFYVCNEEIRDAQNNKESPLLLFKISNKDLSYADTSSEGKRKSRGTENLHTMYFKALMEGKQNVFDLGSGQIFFRESSLKRKVTHPAGIPIDNKNELVCKQRPTRILNYDLIKDKRYTIDKYLFHLSVKINYPQKELPKPENKKSVNDFIADFNKKTIEYLRQNKQDINIIGIDRGERNLIYVSLINAKGEHVTSDFPRSYNLINNFDYQKKLKQVAKNRDEERKNWTIPEKITDIKKGYLSQVVHEIASLAVRHHAIIVMENLSRGFKHGRFPIEHQVYQLFENMLIEKLSYFAFKKDWPSKEYGNIKNGVQLAVPMNKEDWVNQNGWLFYVPAGFTSKIDPATGFVNLFNMSKPLDNLKEFFGAFDEIAFRNGLFYFKFNYSKETFHKIRKDFTNEWTLTSHGERIEKKRPEDLTSKFKSFFAKTDVNIPLENVSVESVCSLSEDNLKELWGLFKLMLKMRNSSDDQDFIISPVASETPFVTGPENYMQIANADANGAYNIALKGLYWLYYNFPTDEKGYLKYIKDEDWFRFIQTKPYCNK

SEQ ID NO: 4 - protein, 1275 aa, Unknown
  Description of Unknown: uncultivated organism sequence
  Category: MG11 effectors
  Description: MG11-4 effector
MKDLKQFIGRYGVEKTLRFELEPVGKTEEWMNLANDKERADKYAFVKELIDRYHKVCIRESLAECDFDWRPLAECLETCRKSRNKDNLDALNNAQKELRSKIAQKFHLFKDFAQLTASTPDKLLKNILPNCVRSKSQPEFSDIESIDNAIKSMSMFDGFASYFEGYQNSRKNLYAANIISSSVAHRVVHENFPKFLSNIKVFENIRVVCPEVIERCAAELGQYLNGLQLDEVFSVDYYNKVLTQGGIDLYNTIIGGVSEKEGESKHQGINELVNLFLQSHEMGGSQKNALTMVPLFKQILSDKKSYSYITEEIKEENELISVIQGYHSHISSFYFNGKAINILEELQHLLDNLCSYNLEGIYVENKKLNTISNKLYGNWSELRFRLTDHLTSQGMKKATIEKFFKKETFSLAELNLSSRDILKLFADLKQCTKGINRFWKDFEERNKKSMPKKYKESNKGIEIVRMLLESYKKFISICSLLDVENEGDSDTNFYGIFTPLITEMQDIDTLYNKARNFLSQKPSDKSKYLLKFDNCICANGWDAPQTKSVLIFRRQGMFLLGVVDNNHRSCLNGISHHQPVSVDDQIEYLVYRQGGHMDQNLQTLMVRDGKTVMVKGKRDENGENQELERQLKELLPPDIYRIRKSQSYINNSDNFCKEDLTLFIDYYKQRAKEYYAQFEFEFKESCDYASFKEFAEEINSKAYRIAFLPTSYKSLASLVNAGELYLFTIKNKDYEPGAHGKKNLHTLYWEQLFNQENLHNLVIKLNAKSTLFCRPQVIKAPTSHKKGSMLLNRKDKDGMPIPEPIYQQLYKYVNGKIREDGLSDDAKAYLDKIIAKEAQYTIIKDKRYTKQKYFIHISTTLNANATNATGINEDVWDYLRDNPDVNIIGIDRGERNLLYLTLINQKGEILLQKSLNVINGFDYHAKLEQREKERDEARKSWQTVGNITDLKEGYLSAAIHEITTMMIENNAIIVLEDLNRKGFMPKRFKFEKQVYQLFEKKLIEKLNYLCSKDIAPTESGGVLRGYQLTEKFVSFEKMTKQNGFLFYVRPDYTSAIDPVTGFVSHFGFKDIRNTKSRKDFFEKMESIIFTNGHVEFVFDYSAFKPKEKDYQNRWTISSVGRRIVWDKQSKLYSDYYPTNIIVGAFADRGIALEEGTDIKALLAGIDDSAHNAEFYNILFEAFKRTVQLRNSNSETGEDYILSPALHDGKQYSSLEERKKWDEGAEMSQLPIDADANGAYHIALKGLYLIMNPQEKKVDNEKWFRFVVEKPFMDKF

SEQ ID NO: 5 - protein, 1284 aa, Unknown
  Description of Unknown: uncultivated organism sequence
  Category: MG11 effectors
  Description: MG11-5 effector
MKDLNKFIGKYKVEKTLRFRLEPIGKTEAWMESKGVIANDKRRADNYAIVKNLIDRYHKVCIRESLTGCNLNWTKLSEAVETYRRCQDTESRKALQKCQDEYRKKIAENFLSFRGFAELTAPSPSVLIKDTLPYNITSKVHPEFSDIGDVDSAKQALLLFEGFAMYFESYQKNRSNLYTAKNIASSVAHRIVHDNFSKFLANIKVFENLRVIYPEILEQCSTELKQHLKGKQLEEVFCVEFFNNVLTQEGIDFYNTVIGGVSGQEGERKCQGINELVNLSLQKENQGRGKRTALTMVPLFKQILSDRNSYSYIPERINDEEELISAIRAFHAHIESFYLNGREVNVMEELLKIVENINCFDPNGIFIDAEKLNGVSKKLYNDLFELRARMTSHLEEQNLTKKNIEKFFQKDAFSITDLCLDKKHSLAKYFSGLKGVNKAIDQKWKQFETRNNKDGQKKYKDSHAGIELVRILLDGYKEFFAVCSILDVDSDNNLDNNFYGVYTPLFTELRGIIPLYNQVRNFLSQKPSDDKKYLLKFDNSKCSNGWDSPQTKSLLIFRRQDRFLLGVVDSENRSCLNDLTTYTPVSPDDRIDFLDYSQGGHMGQNLLTLVVRDGKTVMVKGHKENGENPELERQLKDLLPPDIYRIRKSQSYKNESPNFSKEDLLLFVGYYKQRAKEYYSHFNFTFKDSCDYASFTELVEDIDEKAYQIKFVPTSYKTLQRLINEGKLYLFDIKSKDYEPGAHGKKNLHTLYWEQLFSQENIENLAIKLNAKSTLFCRPQVVTNPMTHKKGSMLLNRKDKNGQPIPEPIYQQLYKYVNGKMAESKLSDEAKGYLGKIVAKEAQYAITKDNRYTKQKYFIHFSTTLNANAPKTADINEDVLNYINDNPDVNIIGIDRGERNLLYVTLINQKGEILDQKSLNVINGFDYHTKLEQREKERDDARKSWQTVGNITDLKEGYLSAAIHEITTMMIENNAIIVLEDLNRKGFMPKRFKFEKQVYQSFEKKLIEKLNYLCSKDIKPTANGGVLRGYQLTEKFVSFEKMTKQNGFLFYVRPDYTSAIDPVTGFVSHFNFKDITNTQGRKDFFEKMESIIVRNGHIEFSFDYRKYKPKDKDFKNIWTVCSSGKRILWNRDSKEYADYNPTAAIIEAFASKGVTLEEGTDIKSLLSEIDGSTANAEFYRIMIEAFKRTVQLRNSNSVTGEDYILSPVIHDGKQYSSLDVLKEWKNAGGHSIPSLPKDADANGAYHIALKGLYLMMNPQTKQIGNEKWFKFVVEKPFKEEKSIG

SEQ ID NO: 6 - protein, 1282 aa, Unknown
  Description of Unknown: uncultivated organism sequence
  Category: MG11 effectors
  Description: MG11-6 effector
MKDLNQFIGKYKVEKTLRFELAPIGKTEAWMESKGVIANDKRRADNYTIVKSLIDRYHKVCIRESLTGCDLNWTRLSEAVETYRRCQDTESRKALLKCQDEYRTEIAKRFLSFEDFAELTAPSPSVLIKEILPYHVTNKVHSEFSGIDDVDNAKQALSLFEGFAMYFESYQKNRSNLYTAKNIASSVAHRIVHDNFSKFLANIKVFENLRVIYPEIIEQCTNELRQLLKGEQLEEVFRVESFNNVLTEEGIDFYNTIIGGVSVQEGEKKFQGINELVNITLHKENQGRGKRTALTMVPLFKQILSDRNTYSYIPERINDEEELISVLRAFHSHLASFYLNGKEVNVMEELLKIVENINHFDPNGIFVDAKKLNGISQKLYDDLFELRAKLTSRLEEQKQTKKNIEKFFQKDAFSITELSLDKKHSLVKYFTGLKDVLKAIDQKWKQFETRNNKDGQKKYKDCHTGIELVRILLDGYKEFFAVCSVLDVDGENDLDNNFYGIFTPLLTELRGIIPIYNQVRNFLSQKPSDEKKYLLKFDNSKCSDGWDAPQTKSVRIFRGQGKFLLGVVDSENRSCLNDLSSYTPISSDDQIDFLDYSQGGHMGQNILTLVVRDGKTVMVKGRKENGKNSGLERQLKELLPPDIYRIRKSQSYKNESPNFSKEDLLLFVDYYKQRAKEYYSHFSFTFKDSCDYASFTELVEDIDEKAYQIKFVPTSYKNLLRLVNEGKLYLFDIKNKDYEPGAHGKKNLHTLYWEQLFCQENLENLTIKLNAKSTLFCRPQVVANPKTHKKGSMLLNRKDKNGQPIPESIYQQLYKYVNGKIAEAKMSDEAKGYLDKIAVKEAQYAITKDKRYTKQKYFIHFSATLNANAPKTADINKDVLDYIKDNPDVNIIGIDRGERNLLYVTLINQKGEILDQKSLNIINGFDYHAKLEQREKERDEAQRSWQTIGNITDLKEGYLSAAIHEITTMMIENNAIIVLEDLNRGFKRGRFKFEKQVYQMFEKKLIEKLNYLCSKDYSPTADGGVLRGYQLTEKFVSFEKMTKQNGILFYVRPDYTSAIDPVTGFVSHFNFRDITNTKGRKDFFEKMESITYKNGYFEFTFDYRKYKPKVKDFKNIWTVCSSGKRVLWSKETKEYTDYYPTTAISGAFASRGITLDEGADVKALLSGIDDSISNADFYRILFEAFKRIVQLRNTNSNTGEDYIHSPAIQDGKQYCSLDELKKWKDNGESSIPSLPIDADANGAYHIALKGLYLMLNPQAKQIENEKWFRFVVEKPFKEEKVM

SEQ ID NO: 7 - protein, 1320 aa, Unknown
  Description of Unknown: uncultivated organism sequence
  Category: MG11 effectors
  Description: MG11-7 effector
MKNLKQFTEIYPVDRTLRFELKPELLEGQTIDDFWSNYLDENKKDSFYNKDKKRNDDYPIVKLILDQFHKNFISLALSSFLPESAPKCPTWNDLFDAYCKDRKSKDFANLQDKMRESISNHFKKHEWWQYISSYSKLIGSLLKQLVENDDDFVESIQERDSSLTREKMLEALETFNRFSVYFGNYADNRSNMYKKEAQGTSIANRIVNENLPKFFDNISVYRKLKATCPIDLESIQDNLKDTLKGMSLDEIFTPCYFNECLTQDGIEKYNWILGGNPNEDVLGINSVGNEYLQHHPESKLKLKDLVMTQLYKQILSDRVQPSFLPQQYKSEEDLMDSVFSFLSAVEKQGLLESVKRIMETLYDNDTDLSKVYVLGSNLTKLSHLLYGDWNLLGEKLREKLVTSNTKKAQQERDKEIEKWLDNKCFSLLQIKEIEDELLEQTQHPLSTEELFTTLNIWKKENETSLWQKVSLIEQCKTAYIVQFATLRKSFKDGKSISTDESKQILKEVLDKYMELYHIVELLRLGNKSAYLEKDSFYVDYERLFESSDEDTLSLSYIIPLYNKVRSFLTRKLSNEGKMLLKFDSPTLADGWDANKEDANNATILKHSDKYYLMLINPLNKPRLEDGICENGSYRKIVYHQIADASKDLPNLMMIDGKTVRKTGRKSQDGFNHILEDLKNKYLPDEINRIRKCGSYLKTSDSFNKEDSQAYLKYYMQRLLDYKKDEMVFHFKEPNEYESYADFLNDVAMQKYSISFVSFSKDKIDEWRKENKVMLFQVSNKDFKEGACGTENIHTLYWKELFSSRNMDNTIFKLNGGAELFYRSKLSSKPFMHKKGSILVNKTLSDGTPISDEMYKHFVDHFNGKGIVLTDEEVRLLPQVRTNRAKLDIIKDKRYYEHKFFMHVPITINFKAPKITQQQFNERTLELLRQNKKQLNIIGIDRGERNLIYVSVINQRGENIIPPKHFNLIETKTYDEVTRKYNYLEKLKQTEQNRDEARKNWTTIERIKDLKSGYLSQVVHEIAKMVVKYNAIVVLEDLNFGFKRGRFNVERQVYQNFEKMLIQKLNYLAFKKDAPSPDYGNVWNGLQLTAPFTSFKDLGKQSGWLFYVPAGYTSKIDPATGFVNLFNMNKPAKDFKTFFGSFTQICYKDDMFYFTFDYSNEKFNTVRTDYTNVWTLSTHGERIVREKDELREIQLIQKFKKFFSDDGVNIPLSEVSVERIKLLEEVKLKELFGLFKLLLKMRNTNGQEDYIISPVAGENPFKTGSNNYMGLTDADANGAYNIALKGLYWVHNGFPVEDKYLKYIKDTDWFEFIQTKPYLND

SEQ ID NO: 8 - protein, 1169 aa, Unknown
  Description of Unknown: uncultivated organism sequence
  Category: MG11 effectors
  Description: MG11-8 effector
MKVTEKYAGKELSYPVSKTLTFQLVPVGKTRQFIEEKNILESDLDKLEKSKKVKGYLDRIHRSFIQDILAKNILDVTELERLFTELQKETDAAKKAGIRKLIRTEEDKKRNEISSWFHKEKDFKELFGAAVFKNKIKDFTTENELKDVEVFNRFTQYFVSYNEGREHIYSKDDTHDTIAFRIVNENFRIYFENLHKLNDAVPGTDALRSFPLTDAQIADYNQVISGNPAEGRKGYNQTANELEEKIPLLKKLYKNILSESTPLFSVEKFASTNDVIESIKDFVVSVKETFVEFELLARYKKNPDGIYVSRKRLANFSLLTTGKPLLLSQVVKTELKEVPEYVSVGKLKEMFFKQLEENPKFEGEEFNPEKYFAMTALVEKTRETLSALDFGKITDLQHDKAQVLPLKVFLDSALELYHHVLTVHVDEEEFTDKKDEGFYNILGSIEEYLSPVTIIYNKTRNFVTKKLSKEEKIPLNFDSPTLLSGWDINKESTSNSMLFHDESEDKYYLAVMDVKDRPKIIEKSDSSFKKMYYKLLPQPNKMLPHVFFSKSGIETYCPSEEILNGYKEGKHIKGENFDIGFCHKLIDFFKDCIARYDGWKVFDFRFSPTSSYEDISGFYREVSEQGYKIQLRGVDKDDVFRMAESGRIYLFLITNRHLSGKSKSFCTMTESLKKALSENSKIQLNGGANIYYRPKLIEAKVTHPKGSWLVNKITKSGFAVPKELYKNIYAHLNFQEKLSPESELLFKSGEVVYKKADFDLIKDRRYSKEDFKFHVTVKHNYKSRDCMLKAFNMSVLEDFRNNEDMNILSVTRGEKNLLYCVLINKKGEVLFEKNFNIMHSANAEINFKHKLEEIEKIRMRERKEWQEIDKIRDAKDGFLGLALHEICDLMIKYNAVLVTENLDSVFKDSRMKIESNVYKVFESNLAKKLSCLILKNNVEAGSVDCPYQLVPSLDLLKKSGTQFGWMFFVNPYCISKISPDNGCVTSFNFSEITNFEGRKKFLSKFSCISFTDETLVLEYECSDFSKNFSGKKRMFITGKRTLWNKVEKKYSEYDLDSVVKAAFAMLGIDGSFSGDIRKNIGELKFSLANNNALELLIECIRAASEMKTLSGDSYVFINPSDPHDRYNGKDIDFISCLNLAKKALLMIESGEEGIRQVKADEYVASLSKV

SEQ ID NO: 9 - protein, 1235 aa, Unknown
  Description of Unknown: uncultivated organism sequence
  Category: MG11 effectors
  Description: MG11-9 effector
MLDKFASLYPVTKTLRFRLLPQGRTEENMQAAKVLENDLERSEAAAVVKGLIKKYHLQFISDTLSGSTLSWQALTETLDKFKADHTATAELDGALAAYRCKLAELFTKSPKYKVMATPVSIIKEILKTETDPENIAALNKLNGYTYIIFDYVSTRMLTYSANAKATSLAYRLVDENYLRFYQDISAAAEISAVLEEAGFDNAEVEAFIRTDYNTCLTSEGIASFNAAAGSINQFVNVLLQQNPVLQSEPALRRHLQPLYKMLLDEAESKIIKFEDYGQLRDAVENFRRNFQDLPQSLIDIFAGRYDYSKIYVGYKYLNEASSQIAGGYNWKLLENALEDFYSKPYLVNGKMPVKYKTVVNKKMNQLAYSFTELQEALDAGESGSSITDLFGKYAELHAAYAAADSNIFYKEYDRKSIASLKNYLDAVNAIARFIKIFAVPEVYVKDEGFYGIVDGAADKLRDFDLLYNMVRNYITKKPYKKSKVALTFNSSSFGRGWDENKIYDELTTIFTYNGKYYLGVINKNDKPDLAAAVSKDEGGYKRMVYKTFDIVKQLPRLSFTKAVKAHFEESDEDYIFDGPKFAKPLRVPKEIYLQSFTDNGDKLADSAKKYTKAYLDMSGDYKGYYEAIVKRIDYTKEFLSAYKSTSIYDLAFLKPADQYEQWSNFTDDVQTALYKIRWDNIPAAAIDEMVESGKLYLFEIYSADLYKNPAEGRKIDTQAQIFKEIFSENGQKVIKLLGNCEVYFRPASLPAVVTHPKGSILVNKQLVNGKTLPDEVYREIYRYLNKKSENLSPLAKQLLDKELVKYRVAQEDIIKDKRFTENQYSFHLPVTLNYKVKQQFYINMEVMNMLRSRKDINILGINRGTRNLLYVTVINQQGEILYSRSLNEFNGVDYRDKLLVKERGIKDAAMNWQAADSIKNIKEGYLSRALGEIVRLMVKFNAICVVENLSSNFRNAGGGIFAYGNFYKGFETNLIKKLNCLIIKDAEKDKAGSVLRSLQMTRSFESFEKAGRQSGWLFMLDPAYISAVDPLTGFVNLFSFRNLKTIRQKAEFLQKFKSINYVPETKAFDFVFDYKDFGLTACGPVSCWVVTSDVERIVKTTENGKVKFESVLPSMQLAKLFTDKDIDFTDGHNLISEITADSRLVTETLSIFMNIMRLYNYDIDRNNDYVSSPVMGRFDTRYDKKLHNPDELAAYNMARKGLMIIKRAQASEKDSKVDLFIKNADWFSFLQTGSI

SEQ ID NO: 10 - protein, 1235 aa, Unknown
  Description of Unknown: uncultivated organism sequence
  Category: MG11 effectors
  Description: MG11-10 effector
MLDKFASLYPVTKTLRFRLLPQGRTEENMQAAKVLENDLERSEAAAVVKGLIKKYHLQFISDTLSGSTLSWQALTETLDKFKADHTATAELDSALAAYRCKLAELFTKSPKYKVMATPVSIIKEILKTETDPENIAALNKLNGYTYIIFDYVSTRMLTYSADAKATSLAYRLVDENYLRFYQDISAAAEISAVLEEAGFDNAEVEAFIRTDYNTCLTSEGIASFNAAAGSINQFVNVLLQQNPVLQSEPALRRHLQPLYKMLLDEAESKIIKFEDYGQLRDAVENFRRNFQDLPQSLIDIFAGRYDYSKIYVGYKYLNEASSQIAGGYNWKLLENALEDFYSKPYLVNGKLPVKYKTVVNKKMNQLAYSFTELQEALDAGDSGSSITDLFGKYAELHAAYAAADGNVFYKEYDRKSIASLKNYLDAVNAIARFIKIFAVPEVYVKDEGFYGIVDGAADKLRDFDLLYNMVRNYITKKPYKKSKVALTFNSSSFGRGWDENKIYDELTTIFTYNGKYYLGVINKNDKPDLAAAVSKDEGGYKRMVYKTFDIVKQLPRLSFTKAVKAHFAESDEDFIFDGPKFAKPLRVPKEIYLQSFTDNGDKLPDSAKKYTKAYLDMSGDYKGYYEAIVKRIDYTKEFLSAYKSTSIYDLAFLKPADQYEQWSNFTDDVQTALYKIRWDNIPAAAVDEMVESGKLYLFEIYSADLYKNPAEGRKIDTQAQIFKEIFSENGQKVIKLLGNCEVYFRPASLPAVVTHPKGSILVNKQLVNGKTLPDEVYREIYRYLNKKSENLSPLAKQLLDKELVKYRVAQEDIIKDKRFTENQYSFHLPVTLNYKVKQQFYINMEVMNMLRSRKDINILGINRGTRNLLYVTVINQQGEILYSRSLNEFNGVDYRDKLLVKERGIKDAAMNWQAADSIKNIKEGYLSRALGEIVRLMVKFNAICVVENLSSNFRNAGGGIFAYGNFYKGFETNLIKKLNCLIIKDAEKDKAGSVLRSLQMTRSFESFEKAGRQSGWLFMLDPAYISAVDPLTGFVNLFSFRNLKTIRQKAEFLQKFKSINYVPETKAFDFVFDYKDFGVTACGPVSCWVATSDVERIVKTTENGKVKFESVLPSMQLAKLFTDKDIDFTDGHNLISEITADSRLVTETLSIFMNIMRLYNYDIDRNNDYVSSPVMGRFDTRYDKKLHNPDELAAYNMARKGLMIIKRAQASEKDSKVDLFIKNADWFSFLQTGSI

SEQ ID NO: 11 - protein, 1235 aa, Unknown
  Description of Unknown: uncultivated organism sequence
  Category: MG11 effectors
  Description: MG11-11 effector
MLDKFASLYPVTKTLRFRLLPQGRTEENMQAAKVLENDLERSEAAAVVKGLIKKYHLQFISDTLSGSTLSWQALTETLDKFKADHTATAELDSALAAYRCKLAELFTKSPKYKVMATPVSIIKEILKTETDPENIAALNKLNGYTYIIFDYVSTRMLTYSADAKATSLAYRLVDENYLRFYQDISAAAEISAVLEEAGFDNAEVEAFIRTDYNTCLTSEGIASFNAAAGSINQFVNVLLQQNPVLQSEPALRRHLQPLYKMLLDEAESKIIKFEDYGQLRDAVENFRRNFQDLPQSLIDIFAGRYDYSKIYVGYKYLNEASSQIAGGYNWKLLENALEDFYSKPYLVNGKLPVKYKTVVNKKMNQLAYSFTELQEALDAGDSGSSITDLFGKYAELHAAYAVADSNVFYKEYDRKSIASLKNYLDAVNAIARFIKIFAVPEVYVKDEGFYGIVDGAADKLRDFDLLYNMVRNYITKKPYKKSKVALTFNSSSFGRGWDENKIYDELTTIFTYNGKYYLGVINKNDKPDLAAAVSKDEGGYKRMVYKTFDIVKQLPRLSFTKAVKAHFAESDEDFIFDGPKFAKPLRVPKEIYLQSFTDNGDKLPDSAKKYTKAYLDMSGDYKGYYEAIVKRIDYTKEFLSAYKSTSIYDLAFLKPADQYEQWSNFTDDVQTALYKIRWDTIPVAAIDEMVESGKLYLFEIYSADLYKNPAEGRKIDTQAQIFKEIFSENGQKVIKLLGNCEVYFRPASLPAVVTHPKGSILVNKQLVNGKTLPDEVYREIYRYLNKKSENLSPLAKQLLDKELVKYRVAQEDIIKDKRFTENQYSFHLPVTLNYKVKQQFYINMEVMNMLRSRKDINILGINRGTRNLLYVTVINQQGEILYSRSLNEFNGVDYRDKLLVKERGIKDAAMNWQAADSIKNIKEGYLSRALGEIVRLMVKFNAICVVENLSSNFRNAGGGIFAYGNFYKGFETNLIKKLNCLIIKDAEKDKAGSVLRSLQMTRSFESFEKAGRQSGWLFMLDPAYISAVDPLTGFVNLFSFRNLKTIRQKAEFLQKFKSINYVPETKAFDFVFDYKDFGVAVCGPVSCWVATSDVERIVKTTENGKVKFESVLPSMQLAKLFSDKDIDFTDGHNLISEITADSRLVTETLSIFMNIMRLYNYDIDRNNDYVSSPVMGRFDTRYDKKLHNPDELAAYNMARKGLMIIKRAQASEKDSKVDLFIKNADWFSFLQTGSI

SEQ ID NO: 12 - protein, 1235 aa, Unknown
  Description of Unknown: uncultivated organism sequence
  Category: MG11 effectors
  Description: MG11-12 effector
MLDKFASLYPVTKTLRFRLLPQGRTEENMQAAKVLENDLERSEAAAVVKGLIKKYHLQFISDTLSGSTLSWQALTETLDKFKADHTATAELDSTLAAYRCKLAELFTKSPKYKVMATPVSIIKEILKTETDPENIAALNKLNGYTYIIFDYVSTRMLTYSADAKATSLAYRLVDENYLRFYQDISAAAEISAVLEEAGLDNAEVEAFIRTDYNTCLTSEGIASFNAAAGSINQFVNVLLQQNPVLQSEPALRRHLQPLYKMLLDEAESKIIKFEDYGQLRDAVENFRRNFQDLPQSLIDIFAGRYDYSKIYVGYKYLNEASSQIAGGYNWKLLENALEDFYSKPYLVNGKMPVKYKTVVNKKMNQLAYSFTELQEALDAGESGSSITDLFGKYAELHAAYAAADGNVFYKEYDRKSIASLKNYLDAVNAIARFIKIFAVPEVYAKDEGFYGIVDGAADKLRDFDLLYNMVRNYITKKPYKKTKVALTFNSSSFGRGWDENKIYDELTTIFTYNGKYYLGVINKNDKPDLAAAVSKDEGGYKRMVYKTFDIVKQLPRLSFTKAVKAHFAESDEDFIFDGPKFAKPLRVPKEIYLQSFTDNGDKLPDSAKKYTKAYLDMSGDYKGYYEAIVKRIDYTKEFLSAYKSTSIYDLAFLKPADQYEQWSNFTDDVQTALYKIRWDNIPAAAIDEMVESGKLYLFEIYSADLYKNPAEGRKIDTQAQIFKEIFSENGQKVIKLLGNCEVYFRPASLPAVVTHPKGSILVNKQLVNGKTLPDEVYREIYRYLNKKSENLSPLAKQLLDKELVKYRVAQEDIIKDKRFTENQYSFHLPVTLNYKVKQQFYINMEVMNMLRSRKDINILGINRGTRNLLYVTVINQQGEILYSRSLNEFNGVDYRDKLLVKERGIKDAAMNWQAADSIKNIKEGYLSRALGEIVRLMVKFNAICVVENLSSNFRNAGGGIFAYGNFYKGFETNLIKKLNCLIIKDAEKDKAGSVLRSLQMTRSFESFEKAGRQSGWLFMLDPAYISAVDPLTGFVNLFSFRNLKTIRQKAEFLQKFKSINYVPETKAFDFVFDYKDFGVTACGPVSCWVATSDVERIVKTTENGKVKFESVLPSMQLAKLFTDKDIDFTDGHNLISEITADSRLVTETLSIFMNIMRLYNYDIDRNNDYVSSPVMGRFDTRYDKKLHNPDELAAYNMARKGLMIIKRAQASEKDSKVDLFIKNADWFSFLQTGSI

SEQ ID NO: 13 - protein, 1309 aa, Unknown
  Description of Unknown: uncultivated organism sequence
  Category: MG11 effectors
  Description: MG11-13 effector
MNNLKQFTGIFPVSKTLRFELNPVLLEGQTLNDFWQVYLDGPEGNDLHKLYKNDKERNVNYPIMKAILDQFHKKFIASALEQFVVGDTGVTWESLALAYQEDKKSKAYQKLQGEMRGKMRKAFMGHNWWPYISSYSQLISTLMKKMVEEDDDFVESIQESNPKMNLDRNKMLEAIKAFNNFSVYFGNYQDNRDNMYSEKDQTTSVANRIVNENYPKFLDNIVVYHRLKETCPDELKAIEENLAAVLNGLMLDDIFTPRYYNKCLTQDGIEKYNWLLGGNPNEGVLGINSVGNEYLHQHPDSQLKLRSLEMAQLHKQILSDRVRISFLPEQFNSDEELMQSVSAFFEGFDSFNLFEHIQETMNILKDSTTDLNRVYVQGKNLSRLSTLLYGKWDVLGEKLRSVMVTGNAKKAQKEKDKEIEAWLENKCFSLAQIQSVENELMELSAHPLSLIELLTDLTMWKYDSENKIWSKKSLLKLCMDARITEFSVLMNKYKQGMSIKTDTAKEILKSVLDQYMELLHVLELLRLGTKAQYIEKDDFYNSYELLFESTDDAVSVSHIVPLYMKVQSYLTRKLADKGKMLLKFDSPTLADGWDANKESANNATILLRDGKFFLMIVNPYNKPNISEGICEKGSYLKIVYHQIADASTDIPNLMVENGVTVRKTGRKDPDGINRRLEAEKDRLLPLDINMIRKKGSYLKSSSTFNTADSQTYLAYYMQRIIEYKGREIDFHFKRPDEYECYQDFIDDVSKQKYSLSLVPFSEYMLETWRQQGKAFLFEITNKDFREKSSGMANLHTLYWKELFSAQNLKDSVFKLNGEAELFFREKADSVSFIHKKGSVLVNKTFSNGTPIDTVFYKKLLRHFNGLDVDLTPEEVSLLPLVKTKNAQFDLVKDKRYHEHKFFLHVPITINYKVSGTTQKQFNERTLDIFRNNKKELNIIGIDRGERNLIYVAVINQKGENLIPPRHYNLIGNYDYLAKLKQTEKNRDEARKNWTTQERIKDLKSGYLSQVVHEIAKLVVRYNAVIVLEDLSFGFKRGRFNVERQVYQNFEKMLIQKLNYLAFKRDAPSLEFGTIRTGLQLTAPFTSFKELGKQSGWLFYVPAGYTSKIDPSTGFVNLFNMTKPASSLREFFGAFNEISYRNGLFYFTFDYSKEKFNTVKTDYTNRWTLASHGLRIVGKEKELKNLTSEFANFFEKAKLALGEVSVKTVSALDEGMLKELWGLFKILLKMRNSNDDKDFIISPVASDTPFLTGPDNSMQIADADANGAYNIALKGLFWLYYNFPTDEKGYLKYIKDEEWFRFIQTKPYRD

SEQ ID NO: 14 - protein, 1309 aa, Unknown
  Description of Unknown: uncultivated organism sequence
  Category: MG11 effectors
  Description: MG11-14 effector
MNNLKQFTGIFPVSKTLRFELNPVLLEGQTLNDFWQVYLDGPEGNDLHKLYKNDKERNVNYPIMKAILDQFHKKFIASALEQFVVGDTGVTWESLALAYQEDKKSKAYQKLQGEMRGKMRKAFMGHNWWPYISSYSQLISTLMKKMVEEDDDFVESIQESNPKMNLDRNKMLEAIKAFNNFSVYFGNYQDNRDNMYSEKDQTTSVANRIVNENYPKFLDNIVVYHRLKETCPDELKAIEENLAAVLNGLMLDDIFTPRYYNKCLTQDGIEKYNWLLGGNPNEGVLGINSVGNEYLHQHPDSQLKLRSLEMAQLHKQILSDRVRISFLPEQFNSDEELMQSVSAFFEGFDSFNLFEHIQETMNILKDSTTDLNRVYVQGKNLSRLSTLLYGKWDVLGEKLRSVMVTGNAKKAQKEKDKEIEAWLENKCFSLAQIQSVENELMELSAHPLSLIELLTDLTMWKYDSENKIWSKKSLLKLCMDARITEFSVLMNKYKQGMSIKTDTAKEILKSVLDQYMELLHVLELLRLGTKAQYIEKDDFYNSYELLFESTDDAVSVSHIVPLYMKVQSYLTRKLADKGKMLLKFDSPTLADGWDANKESANNATILLRDGKFFLMIVNPYNKPNISEGICEKGSYLKIVYHQIADASTDIPNLMVENGVTVRKTGRKDPDGINRRLEAEKDRLLPLDINMIRKKGSYLKSSSTFNTADSQTYLAYYMQRIIEYKGREIDFHFKRPDEYECYQDFIDDVSKQKYSLSLVPFSEYMLETWRQQGKAFLFEITNKDFREKSSGMANLHTLYWKELFSAQNLKDSVFKLNGEAELFFREKADSVSFIHKKGSVLVNKTFSNGTPIDTVFYKKLLRHFNGLDVDLTPEEVSLLPLVKTKKAQFDLVKDKRYHEHKFFLHVPITINYKASGTTQKQFNERTLDIFRNNKKELNIIGIDRGERNLIYVAVINQKGENLIPPRHYNLIGNYDYLAKLKQTEKNRDEARKNWTTQERIKDLKSGYLSQVVHEIAKLVVRYNAVIVLEDLSFGFKRGRFNVERQVYQNFEKMLIQKLNYLAFKRDAPSLEFGTIRTGLQLTAPFTSFKELGKQSGWLFYVPAGYTSKIDPSTGFVNLFNMTKPASSLREFFGAFNEISYRNGLFYFTFDYSKEKFNTVKTDYTNRWTLASHGLRIVGKEKELKNLTSEFANFFEKAKLALGEVSVKTVSALDEGMLKELWGLFKILLKMRNSNDDKDFIISPVASDTPFLTGPDNSMQIADADANGAYNIALKGLFWLYYNFPTDEKGYLKYIKDEEWFRFIQTKPYRD

SEQ ID NO: 15 - protein, 1314 aa, Unknown
  Description of Unknown: uncultivated organism sequence
  Category: MG11 effectors
  Description: MG11-15 effector
MNNLKQFTGIYPVSKTLRFELKPVLLEGQTINDFWNIYLNGSNDNVLHKLYLHDKKRNDNYPIMKVILDQFHKKFIASALEQFEVGDKGVTWESLALSYQEDKKSKTFQKLQEEMRGKIHKAFTEHKWWPYISSYSKLIGTLMRQMVEDDDDFVESIQESNPKMSLDRNKMLQAIETFNKFSVYFGNYQDNRDNMYSEKDQATSVANRIVNENYPKFLDNIVVYNRLKDTCNNELKAIEGNLNAVLNGLSLDDVFTPKYYNRCLTQNGIETYNWMLGGSPNEGVLGINSVGNEYLHHHPDSQLKLRSLKMTQLHKQILSDRVRISFLPEQFNSDEELMQNVSAFFEEFESSNLFVRIQETLSILKDSDTDLNKIYVLGKNLSRLSTLLYGKWDVLGEKLRSVMVTGNTKKAQKDKDQEIEAWLENKCFSLAQIKAVENELMELSSRPLSLMELLTDLTLWKYDSENRTWSKNSLLKLCKDARITEFNALTDEYRQGKLTIKTDAAKEVLKSVLDLYMELFHVIELLRLGKKSPFLEKDDFYISYEQLFESTDNTVLVSHIVPLYMKVQSYLTRKLADQGKMLLKFDSPTRANGWNDCSIAIKDGKYYLLLYLESLTNEEIAALYSGDSADLVIYQQQKTDYRNAPRLFINSKGDNQAPAVSKYHLPIEMVESLYKERKALKTQSAKREFDERHPDYLEKLINYYKIGFLRHEDFQPFQRTFENMWKDSLEYNSVQEFFEHTQELCYLLTFKPIDFDSLLNLQKSKKLLLFSITNKDYKEKAKGTPNMHTLYWEELFSKDNLSNVVYKLSGQGIEIFHREAISPELSFVHKKGSILVNKTFSDGTPIDAELYKKLLRHFNGLDVDLKPEEVNLLPLVRTKKAQFDLMKDKRYYEHKFFLHVPITINFKASAISQKQFNERTLNILRNNKESLNIIGIDRGERNLIYVSVINQRGENLIAPRHFNLIETKTFDGKERKFDYLTKLKQTEKNRDEARKNWTTQERIKDLKSGYLSQVVHEIAKLVVQYNAVIVLEDLNFGFKRGRFNVERQVYQNFEKMLIQKLNYLAFKKDAPSEEYGTIQSGLQLTAPFTSFKELGKQSGWLFYVPAGYTSKIDPSTGFINLFNMNKPANSLREFFEAFDDITYRDGLFYFTFDYSKDVFNKVKRDYTNHWTLASHGSRIVGKGKELKDLTAEFVKFFEKEAKIPLEKVSVKSISVLDESKLQTLWGLFKLLLKMRNSNDDIDYVISPVAGDSPFITGEGNSMQIVDADANGAYNIALKGLYWLYNDFPMEQGYLKYIKDEDWFRFIQTKPYRQD

SEQ ID NO: 16 - protein, 1314 aa, Unknown
  Description of Unknown: uncultivated organism sequence
  Category: MG11 effectors
  Description: MG11-16 effector
MNNLKQFTGMYPVSKTLRFELKPVLLEGQTVNDFWNIYLNGSIDNDLHKLYLHDKERNDYYPIMKAILDQFHKKFIALSLEQFEVGDKGVTWESLALAYQEDKKSKTFQKLQGEMRGKIRKAFTEHGWWLYIASYSQLIGSFTKKMVEDDDDFVKSIQESNPKMGLDRDMMIQAIETFKNFSVYFGNYKANRDNMYSEKDQTTSVANRIVNENYPKFLDNIVVYNRLKDTCYSELNAIEDNLSAILNGLSLDDVFTPKYYNKCLTQDGIEKYNWVLGGNPNEGVLGINSVGNEYLHQHPESRLNLRSLKMTQLHKQILSDRVRISFLPEQFDSDEELMQSVSAFIEGFESSNLFAHIKDTLNILKDSDTDLDKVYVQGKNLSRLSTLLYGKWDVLGEKLRSVMVTGNTKKAQKDKEKEIEAWLENKCFSLAQIKAVENELMELSAHPLSLMELLTDLTVWKYDSENKTWSKKSLQKLCKDASITEFNVLMDKYKQGEFSIKTDAAKEVLKSVLESYMELFHVIELLRLGKKSPYLEKDNFYIPYELLFESTDDDVLVPHIVPLYMKVQSYLTRKLANQGKMLLKFDSPTRANGWKDCSIAIKDGKYYLLLYLENLTNEEITALYSRDSADLVIYQQQKTDFRNAPRLFINSKGDNQAPAVSKYHLPIEMVESLYKERKSLKTQSAKREFDERHPDYIERLIDYYKIGFLRHEDFRPFQYTFESMWKDSSEYSSVQEFFDHTKEMCYMLTFRPIDFDFLYNLQKGKKLVLFSITNKDYKKEAKGTPNMHTLYWEELFSQDNLANIVYKLSGQGIELFHREAISPKLAFVHKKGSILVNKTFSDGTPIDAEFYKKLIRHFNGVKVELTPEEVNLLPLVRTKKAQFDLMKDKRYHEHKFFLHVPITINFKASGTSQKQFNERTLNILRDNKEGLNIIGIDRGERNLIYVSVINQKGENLIAPRHFNLIETETYNGIVRKFDYLTKLKQTEKNRDEARKNWTTQEKIKDLKSGYLSQVVHEIAKLVVRYNAIIVLEDLNFGFKRGRFNVERQVYQNFEKMLIQKLNYLVFKKDAPSKEYGTIQSGLQLTAPFTSFKELGKQSGWLFYVPAGYTSKIDPVTGFVNLFNMNKPANSLREFFGAFDDITYRDGLFYFTFNYSKDVFNKVKADYTNHWTLASHGLRIVGKDKEPKDLTKEFELFFKEAYLPLDEVSVQTISSLDESKLQKLWGVFKLLLKMRNSNDEQDYIISPVASNKPFITGPDNPMQIADADANGAYNIALKGLYWLYYDFPTDENGYLKYIKDENWFRFIQTKPYLND

SEQ ID NO: 17 - protein, 1226 aa, Unknown
  Description of Unknown: uncultivated organism sequence
  Category: MG11 effectors
  Description: MG11-17 effector
MRAIDNFISNTKEFAGLPVSKTITAKLVPVGKTRDNIDKMNILESDKQREEAFVRVKKYIDRVHKYFIEECLKQQDSGKGVYVPENEFNKLYTLRVNLKNLTGKERKNAQKEIQAEENKLRKLISEIFKAHPNYKNLSGVNLFTELLPSYCNEEEMKDVNLFKGFYSYFTKFNKLREQLYVSDDIHTAVAHRIINDNYPVYIDNKLILERIRSEYKELYDLSENGRQLFHELNQTYTMAYGMSSSYISMYNSTISGTFDEDGNQTCRGLNQLINEYRQKNKECRIPYFKPLYKNLMSDKKPLFSVSYFESTAEIKDAVITFNESIRKPYERFISYITKSFPVDSWCVEKKNLNRLSHIICSNPFTLDNLVSASKKFSKNQPDIYSASDFKELLSENILEETEFHFDFLKYKDYLLQFRPQDFFSKIPFDKITDIQYDKKQALELKEYLQSVLDYYNMLRILVIDPEDERIVSSEITYDEEYYTELELIIDALNPIVKLYNKVRNFVTKSLKQEKEIKLNFDCSSLLDGWAESQEKVKNGLIFHDESEDKYYLGIYNQNMKKPDFEYVSDSTFKKMVLNTIPEPYKMLPKVFFSKKGLETYKPSEEIIEGYKNELHKKSSGKFDLSFCHKLIDYYKDSIGQRDEWKCFNFNFRPTEEYQDTFEFFKEVSEGGYSLEMVGINKDILMKAVDEGSIFLFEIYNKYLANKAHGKDTYTQIIRSALSGKKSNVQFCGGAQIYYRPALIKEEATHKKGSVIVNKISKEGFTINSDVYKNICSHFNHNTALSSEAKTLLDSGSVIYKTADRDLYKDRRYMYESFSFHCPVKINWQAKDINPLTFNKAVLDAIRSDDDVKILSVNRGENNLVYAVLMDKKGKVLLDKSFNLIQSGKQNVNYKNKLIEKSKDRANSRTNWQEIDKIKDLKSGYLSFVIAEITRLIIENNAVLVLESLSNDFKSGRQFIESNIYQQFEMALVTKLSCIILKENEYGTPGSLEHPYQLVPKFTSFDNIFLQFGFVFFINPAYISKIDPESGIINFFNFNALTNNEKRTEFFKNFDNITVENDKLVFLYHPGNFNKDFKSIDLFKVIAAGKRNIWNPKTKKFEIIDLELEGKAVYENLLSYDYTNIAELFKDKCCNGVLPHPAATERLLRIFMAAVSSRTFVLDDWQYISPMGNENEFTGKSFDFIAAYNLANKFKTILERSKDGEYLSNIKTVEYVSSLIWNRVANL

SEQ ID NO: 18 - protein, 1235 aa, Unknown; identical to SEQ ID NO: 12
  Description of Unknown: uncultivated organism sequence
  Category: MG11 effectors
  Description: MG11-20 effector

SEQ ID NO: 19 - protein, 1226 aa, Unknown
  Description of Unknown: uncultivated organism sequence
  Category: MG11 effectors
  Description: MG11-21 effector
MKEHTFNQFVKAGPITKAFNFEIIPEGKTRETIENLGLLDDDAHFRECTKAATPYIDAVVRNIADKALSKLDYDFNKLAIVKDDKKKREKEEIVLEKAIARCVKENLPTDMKSTKDIMSAAFLSTVLPAEVKKVPTLTTEEKDKAGVLFEELKGKTQLLTKFLQTRVIALNTWLPQRVIENFYRYTDNFDTINNIISEKLPVENIEELPSMLLPSYYSQFVTQEGINAYNLHISGIYTEDKVVMQGLNEIINIHNQVAKKNGKTQIAKMKPLYKQILMPSEKSFTIEALNSDKDCVDVVRRALAQVDNAESLVNHIAKARTESMVVRGSRLHGLSYIGLGSHAELPNSILEIKTEEFLAEHKKLTKKGERELNGIAAKVRSSTYSLDYIEKVAPGITASYKEEVSDTMKLLKELAVSTERVISDPSNISTSKTALKTIKDFFDTFTELRTMIGIVGRSDNKMGENDFYNRYDELNACLTVTWKAENLFRNYVTRKPVDAHAKTETVLGTALRKTSLWWKKGDLLKVPSQLMTCEDGKYYYYLPLPVSIGGRNIDPQGKDDNCMLMSQIKVQDAVKWIPAQTFTKAKKYFSENQSKDTYTIEEKVHEPVTITREVSEIYERKLHTKGALQNGEETEEEYRKNLLAVLNVIDTFARNYVLYDSFEIKTKPIEEYEDAKQYYDELNLCLTPVIEWVTGNKRLLDEGVANGSLLKFLIHSRNLYAPAEYTEARKTSYTKMLSFILSPANKGQITLNSRPVLMYRPAVISEERIVKHKKGSILVSKNTTRGEHIPDEIYNELKLYFNQNKPLSDEGAQYFNAHKNEISHHKAETTIIKDKRYTMEKFFLNMSYKKNADTIESKTLSYDLNKKMKAYAAAGCNVLSVIRSRNDLVYVSVVDQNNNVLEERSLNVIDGVDFAGRIKEAAQIKQKDKAENWKYDRKIKDLKTGFISRAISEIVSLAVKYEAVICIEYLSQNFKDKYSALDDTVYKSFETALVSRLSDLWFKNIDEGKAGSMSNPLQLATNNGNSFQDGILFYTGQKYIKKTDPETGYADLFDTRFITTITNKKSFFSKFSSIRYNAETKKIDMEFDYGNFRTFALTSKTKWKISIGGEGTIYQREQKCNVYEPQVSKILVLAMEQSGVALTSDLSDLARNGELPNNVTNALWDVFTVTRTGIVKAHNNKSAVFISPVTGKKYLASHVAALNLAKKFRIELSEGRKEEWIDYVQV

SEQ ID NO: 20 - protein, 1211 aa, Unknown
  Description of Unknown: uncultivated organism sequence
  Category: MG11 effectors
  Description: MG11-22 effector
MNGLNLKELTKRNKVVKSCTFELVPQGATSKTIEQSKFLNTDADWKQLISEIAPYIDAFIRNIVSCALSRVELDCSKDEMDEVKLASEINLAINSALNEKYGIYVKQIKSAKFINSVLPDFVDTLDLDENESIAVHNVLEELRGKTELVNEFLTSRVTALNTSVARRVCENFERYQENVKVFEKLQASSLWDTIVALYPNAGDFANVDSYNECITQEQIDTYNDMINGISDENGIIVKGIRGLINEYRMLEKNEKLPSPKELYKQILIPGKKAFSIICIDNDDELYDVISEASEHAVAAGKRFCDLIDNASAYDIVVQYKNLHTISHIVTGEHRTIPDAVKDVMYAAINQQIEAATTAKKRLALQKKVDDIEKALKKCDWTMDELEKISNLGIFSAYKTSAKNAYLLASGTVGTIPALTKDIRNNDAQREELKSIFNVWTEFRDLVRLVKRQTLDKGYHAFYDALDEIIFELSYMAKAETLTIAYVTRKPKDVSKKALASMGYQARMGAAWLQPDKKLSICDMTILKRDGKYYLYMLAPGVKPVNITTDKSDEYVFVQKKGQDASKALPKVTFYTASKFFEENPDAEEFVITNNVTEPVTISRELFDMKENGLFKTDAVKKGLITQEEYEKNLFEILSFYRHFMDVYTEYSKFDVQTKSDLHDYKDSGEFFTDVNAANVSSEWLPADTKKMDEMVDKGEALMFLITNRNMYSQFGKKTAYAELFLTAMSDSNMGVFLNSSPKMYFRAKSITKPIVHKKGSILVHKHDTNGNKIPKAIYDEIYKYYNNKLFATDLSQEARDYIDRGLVGKKKADTDIVKDNRYTEDKWMIQFSYTKNRTVIPASTKLNDIIRQNAANMNVLSIIRSETDLAYYMVTAPDGTVLEKQSLNIIDGRDYWSELSTISAKRKDEKSQSWNYSRQVKDQRDPYIVRAISVIARKVIEYNAIVVIERIRPEIKNRFDAMDNTVFKKFEGMLISRLADLYFSDVPAGEPGSVMNPYQLCENSGNDYQDGIVFFVSNAYTGNVDNQTGFVNIFDLGNVGTVSAKRLFLSKFDSIVYDPAQNRFVFDFDYDNFVTKTCMKKTKWSILAGGEALIFNRKFKYNTYYPETASMITKIMAEKNVSLSDNLAKLAATGELPGDVTTALFDAFRRAISGVISKHEDMPKRYISPVTGEAVIYNDNAAENLTRRFRFNMAELEKDKTAREEWIDNIA

SEQ ID NO: 21 - protein, 1250 aa, Unknown
  Description of Unknown: uncultivated organism sequence
  Category: MG11 effectors
  Description: MG11-23 effector
MAQNRTDAFGAMRNLYPVSKTVALRGIPIAETLKYMTEREIMQKGNTLSENRKLVKQAGDRYIKDFINMSLMHASLKIHSDGSKDSIEELNALLKEKPSKKGDNDERRSKEKEIQAIATKLKNQLAASFKDTAFLKKLGSEAFFKEVLAGADLNEKEAKALEAIKKNTTYMADYQKRRLSLFDPKFTGYSIMTRSIDDNLPIHLRNCEVFRKVAPIIREDLAPIFKEVRLNTSAESLDEVFTPAMFNVLLAQCDIETYNTIIGGKTLSERKMIHGVNACIERYNKTAAQDQKLPSMKKLKKQILSDREPVSWLPEEFKNDNEVVEAVDMLIKNFHMLCKDTPVEAAVREPDTDGIFVNAKNLNSFSNIAYGRFFLAKNAVIDELKHQFPKRPRKSIEKYEKEIEAKFKKQDHFSVAFLDRCIAAYNPTLGRSSADAFGDIIKNKADVETKIADYLQERGTEEVEKIDEALKQKIRLLLNEMMKFHHSVERFLLKDMPTAYDVTFYELVEENEANAESLIKTFNMIRNRMTKKPYNTSKVRLYFDNPTLGAGWAVTKEYTNRILLFKDMENGEDKIYFGIVPTECKNLTRNSKGELKEDILAGDGKQLEKVEITIIPDAAKMLSAMFFSANWARTGSVKASDYVLEIHDKVKASGSAKDLSPEEKVAMIDYYKKCIATVEHWKRFNLKYRPSDEYESVKEFCDSVTEQAVNVSSRPVSEEKVFAAVARGDLYLFQLDNQDMHKKHHGTVGNPTVWLREAISCDPAAAVRLCGNVAVYYRKASLNRKVTHPAGVPMENKNPDNPRKTRTLTYDLIKDKRYTEDNFSFHIPLEVNFRADNRNNKSIVINDLVNRAVKANPDMPVLGINRGERHLIAYAVTAPDGKILEQGNFNVINGYNYRELLATRERERSTNKQNWENIKDIANLKDGYLSLVIGEIARLVQKYNCVVAIENLDDDFINTRQKFERNVYSRFETALEQKFTLLTDKTTSRRSSESLQLAATNKSGSFEVQNGILFRTMPWMISRTDPSTGFISFLKLFHKNNESSQKYLSSFDSFRYNQKEDLFELSFDYKALRVDLQAGERTKWTVCTYGERTECHLDKEHMKLMVTDVHDLTKEMKTLLDGQGIKYASGKDILKDVAEAKNGGFYRDFFTIISRTVCGSSWYEDKKEYRFIGCTRNSEGRFYDTRTCRPDQPCDVDTLAAWNLSRRVHRILDNIRSFDPENPPLDEDGKKLKSPKKGLSRAEWLKIAQK

SEQ ID NO: 22 - protein, 1166 aa, Unknown
  Description of Unknown: uncultivated organism sequence
  Category: MG11 effectors
  Description: MG11-24 effector
MKSIDKYCGEKFGYSVNKTFMFELKPVRETLEYIKQRKIIENDKVRTDKAVLVKDYIDRLHRKFIQNVLTAHCTELKTDDLGKLYSMLQNENSDKSKIKKSIKEIEAAKRKQVSEWFKKDDGYKKLFGKTLFDELIATAETEEERNSINHFKGYLQYFLNYNQVREYVYSDEEKHNTIPFRIINENLKIYFENLNKLEDIGIDTSILYHFPVTDDQIACYNLVIGGNSKEIKGYNQLVNEKKLEVPYLTQLYKNILSETKPLFTTESFKTTEEVKETCKELFESVAGLKNDFRRITSGGDESKIYIHRKNISKFSLIVSGDPLLVKNVLANENIIVTDYVSVGQIKQAFINQKKAGYYENFELNVSKYYTMESVFSDILKNISECDLTKITDLQTDKIQVLPLKDALDKILELFQQVKIVFLDEDFVGKYDAEFYNVLNKVYNALKPVVSVYNKTRNFVTKKLGEQKKLPLNFESSTLLGGWDVNKESASNSVIFYDEKEGKYYLGIFNVENRPSFTAKPGTGFKKMYYKYLPQPNKMIPHVVFSKKGLDTFSPSNEIIEGYKKGLHLKGENFDINFCHKIIDFFKNCIYQYESWKVFDFKFSNTTEYNDLSDFYNEINQQGYNVKLSDVDRDEVYSSVSDGKLYLFEITNRFMSGKSHKRHIPSEIFKSIFDKDSTVQLNGGAEIFYRPEMLKPKITHKKGSFLVNKYTTTGFSVSAEDYKSIYEHLNYNKPLTSSARTLLDTGTVVYKKADYDLIKDRRYSSDKFEFHVPVTINYKYKSSCSVKEFNKSVLNELRENHDINILSVTRGENNLVYAVLQSQEGKILLEKSFNIIGEKTKVNYKDKLHKVELSRNEARKNWQNVQQIKDLKEGFMGNVLNEIVRIMIENNAVLVTEDLSGAFKDSRMKIESNVYKIFETSLVNKLSCLILKNAENEGSIKNPYQLTPPLEGFSKAGSQYGWVFFINPAYISKIVPASTFINIFGLNSVNTFDQKKTFFLKFDSIEYTGDSIFLSYNNGVFVPKFKGKNVIEIKGSRTLWNKETKKYENYNTKDYISEAVVNLGIEEKGNIKPLLEKLQFNIRNNKGLEKLIQAVKIVCEMKTFAVDNYHFVSPTQDDNYDGKDIDFIACVNLAEKFKLAVRNTAEESFVKQPKTEELINTKAQEFK

SEQ ID NO: 23 - protein, 1315 aa, Unknown
  Description of Unknown: uncultivated organism sequence
  Category: MG11 effectors
  Description: MG11-25 effector
MSVFENFVGLYPVSKTLRFELKPELLDGQTIDDFWSVYLNGSEEDDLHKLYMHDDERSKQYPVVKAILDQFHKMFIASALEHFEEGDKGVTWLSLASAYRQDKRSKEFQKLQDEMRKKLRISFEKHEWWSYMKSYSKLIGELIMRMVANNDKFVEAVQESNPELASNPEIRLDRDGMIKALKTFERFSVYFGNYATNRDNMYSEKAQTSSIANRVVNENLPKFLDNIVVYERLKELCPDELKAIEENLSSTLDGFKLDDIFVPDYFNNCLAQVGIEKYNRLLGGNPNEGVLGINSVGNQYLQHHPETSVKLRSLQMTQLFKQILSDRVRLSFLPEQFKSDEELMQSVSDFLEGLESCEVFARIQRTFEILKDESTDLTRIYIQGSNLTKLSTLLYGKWDVLGERLRSTIETGNSKKVRRELDKEIEAWLENKCFSIAQIQAVESELIERSSHSLSVNELFSSLSPWKYDTETHEWSRKPLLKICDDARIVNFKELMRKFKEGCSIRTDAAKEELKYVLDQYIDLFHVVELLRLGNKSAYLEKDDFYVTYEQLFISDDEVILSHIVPLYMKVQSYLTRQLKDEGKILLKFDSPTLADGWDANKEDANNATILLKEGKYYLMIMNPNKKPNLSDGLCDKGDYHKIVYHQIADASKDIQNLMVEKGVTVRKTGRKDSDNINRRLEAEKERLLPKIINEIRIKRSYLRSSEQFNKEDSQTYLAYYMERIVEYKRGEIDFHFKKPEEYECYQDFVDDVSRQKYSLSLVPFSGVIVELWRRQKRIFLFQISNKDFSEKSSGTANLHTLYWNEVFSELNLSDSIFKLNGEAEIFYRKKSDADSFTHKKGSILVNKTFSDGKPIEDKLYGRLLKFFNGTHVELSEEERKLLPMVITKEAKFDIVKDKRYHEHKFFLHVPITINFKASTKSAKQFNEWTLQTLRENRKELNIIGIDRGERNLVYVSVINQRGENLIPPRHFNLIGNYDYLAKLKQTERNRDDARKNWTAMARIKDLKSGYLSQVVHEIAKLAVQYRAIVVLEDLNFGFKRGRFNVERQVYQNFEKMLIQKLNYLAFKTETPSPNCGNIRSGLQLTAPFTSFREMGKQCGWLFYVPAGYTSKIDPATGFVNLFNMNKPAESLRKFFGAFTEISYKDGLFYFTFDYSNEVFNTVKSDYTNRWKLSSHGARIIGKEKELKDLTKEFINFFEKKARIPLDKVSVQTISSLDDANLQQLWGLFKLLLKMRNSNDQFDFIISPVAGEKPFLTGEDNPMQILDADANGAYNIALKGLYWVMNDFPIEDGYLKYIRDTKWFEFVQTKPYLNE

SEQ ID NO: 24 - protein, 998 aa, Unknown
  Description of Unknown: uncultivated organism sequence
  Category: MG11 effectors
  Description: MG11-26 effector
MSIFSGFTRRNNLIKTLQFKLTPMYGTAEQMEKLGVLYSDKERSRCWKILLDVLRRVDAAFIANALCAENSLDWQPLAEALAEGKKERIARQQAAMRKAVAKLLTKHSDYKNLVNPTKAIKLAAAATENAAEADAVTKYARFTTVLVDYFNLKKVFFSSEEKQTTIAYRIAHVNFSLYWQNLSLLKKYRDAGLDFQDKFSFPYTEINGYNQCLVQSQIDAYNRAVGKINMELQTLYRQHKLPQALKGVAVKLRMLHKQVMSGGSDKKVPFDLYTEMQNAVISLQNSLKEIFSLLDEAFGADLELADTYQKLRQQIVDSAKNLLFCEHDEQSIISIKNFLTAVVALRRFIKKTLRDYEQNFESDQEEIFLACSNVWSLLEEVPQLYIRVRGFLTRKPYKTDKIRMFFDCAAFGKGWDVNKESAYLLTLFRREELYYLGIRRQGAKINFADMLANTAEACYEKMVYKSFDFVKGFPGVVFAKSVLQKFVEGAERVVLDGDLYSCPLVVIREDFEQKYFVENGVLHEKEAGEVKYLKEYYAQTGDLAGYKQAVRQRIKLAKQFIAAYKNFAFFDMSQLKSASEYESWTDFLVHVNEFTYGLRWQRISAAAIEKLVAAGDLFFFRLDNQDFALADSKNRAEDEQTLFLREIFSERNARERVLKLLGDVEVYYRPASLAAEVTHRKGSVLVNKKDVHNNLLPRQLHQNICQYLNGEDEKLLPEAEELLAKGMVRYKRADTDIIKDKRFTEAQLSVHFPVSINYRCPNKDYSFNKDFRSMLKNNAAVNILGVHLGGKNLAEAVLIDQKGQILLRKEFNEFNQYNFYQALVLRAEERRQAQQNWLQMEKIKNIRSGFLSALVSEVSKLALAYNAVIVLENFENSRVKKDRGAAFAHTQFAMSLLHKLNYLVLKKREYLEPGGVLNGYQLAPKAESLAGFANQIGCVFLVLPDYDGGEDEKAAYNLALKGLLLLRRIHEAENVDKVDLLITKKNWLEFLREYGSRS

SEQ ID NO: 25 - protein, 1309 aa, Unknown
  Description of Unknown: uncultivated organism sequence
  Category: MG11 effectors
  Description: MG11-27 effector
MKQFTNLYPVSKTLRFELKPELLEGQTIDDFWNSYLNGSGNSELHKLYMHDKERNESYPIMKAILDEFHKRFVASVLDGFELREDCSLTWNELLKEYQNDKKSKIYQKLQGNVRKAIHKAFLEHEWWPYLSSYSKLIGSLMRKLVGEDDDFVESVIENFRDMPLNREKMLKAIDVFDRFSVYFVKYQSNRDNVYSDKAQNTSIANRIVNDNFPKFVDNLIVYQRLKDCCPDELEAIEDNLQDKLKGLALDDVFEISYYNQCLTQNGIEKYNWILGGNPNENVFGLNSVGNQYLQHHPESNLKLRNLQMTPLYKQILSDRVRLSFLPEQFKSDDELMRSVSDFLNGLESQDCFAQIEKTMNSLKERETDLNKIFVQGANLTKLSTLLYGNWSLLGEKLRSTLITGNTKKDKEARNKEIEAWLENKCFSLSQIIAVEEELMEQVAHPLSVIELFTNMTIWKYDVERHEWVKKSLLKQCHDARITEFNTLMNRYKKGMPIKSDAAKETLKSVLDNYMELLHVVELLRLGNKTAYLEKDDFYLPYENLFETDNDNTSILSIVPLYMKVQTYLTRKLKKSEKLLLKFDSPTRANGWNDCSIAIKNGKYYLVLYLQKLLDEEVSKLYSGDSAEIVIYHQQKADFRNAPRLFINSKGDRRSPSVSKYHLPIEMIESLYKEQKGLKTQTEKKLFEERHPDYNEKLIDYYKIGFMHHEDFAAYRHTFESMWKKSSDYDSVQEFFEHTQEMCYMLTLKSIDYDYLYRLQNTGKLLLFRISNKDFNEQAKGTPNMHTLYWNELFSKENLTDVIYKLSSQGIEFFYRNAVSQQSFIHEKGSILVNKTFSDGAPIEDELYRKFLLHFNGKQVELSDDEVVLLPKVVTKKAKFNIVKDKRYHEHKFFLHIPITINFKESGISQKQFNERTLDILRDNKDGLNIIGIDRGERNLIYVSVINQKGENLITPRHFNLIESSTFEGLVRKFDYLAKLKQTEKNRDSARKNWTTMDRIKDLKSGYLSQVVHEIAKLVVQYKAIVVLEDLNFGFKRGRFNVERQVYQNFEKMLIQKLNYLVFKRDAPSSEYGNIRSGLQLTAPFTSFKDLGKQSGWIFYVPAGYTSKIDPVTGFVNLFNMNKPASSLKQFFGAFKNIKYEKGLFYFTFDYSNKDFNTVKIDYKNQWTLSSHGTRIVGKEKEFKDLTTEFVEFFRKVNLPLQQVSVQSILTLDDIQLQKLWGLFKLLLKMRNSNDKTDFIISPVSGECPFITGSDNLLGIEDADANGAYNIALKGLYWVYYGFPKDGDFLKYISDSEWFKFIQTKPYLTD

SEQ ID NO: 26 - protein, 1314 aa, Unknown
  Description of Unknown: uncultivated organism sequence
  Category: MG11 effectors
  Description: MG11-28 effector
MNNLRQFTGIYPVSKTLRFELKPVLLDGQTVNDFWDIYLNGSTDNDLHKLYLHDKRRNDYYPIMKVILDQFHKKFIALALEQFEVGDKGVTWESLALAYQEDKKSKTFQRLQEEMRGKIRKAFTEHEWWSYISSYSKLIGSLIKQKVEDDDDFVESIQESNPKMSLDRDKMLQAIETFNNFSVYFGNYRDNRNNMYSDKDQATSVANRIVNENYPKFLDNIVVYNRLKDTCNNELKAIESNLSKVLNGISLDDVFTPKYYNRCLTQNGIETYNWVLGGSPNEGVLGINSVGNEYLHHHPDSQLKLRSLKMTQLHKQILSDRVRISFLPEQFNSDEELMQNVSAFFEAFESSKLFVHIQETLNILKDSDTDLNKIYVLGKNLSRLSTLLYGKWDVLGEKLRSVMVTGNTQKAQKDKDKEIEAWLENKCFSLAQIKAVENELMELSTRPLSLMELLTNLTIWKYDSENKIWSKKSLPKLCMDARITEFNVLMDKYKQGKLTIKTDAAKEVLKSVLELYMELFHVIELLRLGNKSPYLEKDDFYIPYEHLFESTDDTVLVSHIVPLYMKVQSYLTRKLADQGKMLLKFDSPTRANGWNDCSIAIKDGKYYLLLYLESLTNEEIAALYSGDSADLVIYQQQKTDYRNAPRLFINSKGDNQAPAVSKYHLPIEMVESLYKERKALKTQSAKREFDERHPDYLEKLINYYKIGFLRHEDFQPFQRTFENMWKDSLEYNSVQEFFEHTQELCYLLTFKPIDFDSLLNLQKSKKLLLFSITNKDYKEKAKGTPNMHTLYWEELFSKDNLSNVVYKLSGQGIEIFHREAISPELSFVHKKGSILVNKTFSDGTPIDTELYKKLLRHFNGLDVDLKPEEVNLLPMVRTKKAQFDLMKDKRYYEHKFFLHVPITINFKASATSQKQFNERTLNILRDSKEGLNIIGIDRGERNLIYVSVINQRGENLIAPRHFNLIETRTYDGKERKFDYLTKLKQTEKNRDEARKNWTTQEKIKDLKSGYLSQVVHEIAKLVVRYNAVIVLEDLNFGFKRGRFNVERQVYQNFEKMLIQKLNYLAFKKDAPSMDYGTIQSGLQLTAPFTSFKELGKQSGWLFYVPAGYTSKIDPSTGFVNLFNMNKPADSLREFFGAFDEITYRDGLFYFSFDYSKDVFFKVRTDFKNKWTLASHGERIVGKEKERKDLTAQFVKFFEEEANVPLEKVSVQTVSSLDESQLKTLWGLFKLLLKMRNSNDDTDFIISPVASDHPFITGKDNSMQIADADANGAYCIALKGLYWLYNDFPAEQGYLKYIKDEDWFRFIQTKPYRQD

SEQ ID NO: 27 - protein, 1235 aa, Unknown
  Description of Unknown: uncultivated organism sequence
  Category: MG11 effectors
  Description: MG11-29 effector
MLDKFASLYPVTKTLRFRLLPQGRTEENMQAAKVLENDLERSEAAAVVKGLIKKYHLQFISDTLSGSTLSWQALTETLDKFKADHTATAELDSALAAYRCKLAELFTKSPKYKVMATPVSIIKEILKTETDPENIAALNKLNGYTYIIFDYVSTRMLTYSADAKATSLAYRLVDENYLRFYQDISAAAEISAVLEEAGFDNAEVEAFIRTDYNTCLTSEGIASFNAAAGSINQFVNVLLQQNPVLQSEPALRRHLQPLYKMLLDEAESKIIKFEDYGQLRDAVENFRRNFQDLPQSLIDIFAGRYDYSKIYVGYKYLNEASSQIAGGYNWKLLENALEDFYSKPYLVNGKMPVKYKTVVNKKMNQLAYSFTELQEALDAGDSGSSITDLFGKYAELHAAYAAADGNVFYKEYDRKSIASLKNYLDAVNAIARFIKIFAVPEVYVKDEGFYGIVDGAADKLRDFDLLYNMVRNYITKKPYKKTKVALTFNSSSFGRGWDENKIYDELTTIFTYNGKYYLGVINKNDKPDLAAAVSKDEGGYKRMVYKTFDIVKQLPRLSFTKAVKTHFAESDEDFIFDGPKFAKPLRVPKEIYLQSFTDNGDKLPDSAKKYTKAYLDMSGDYKGYYEAIVKRIDYTKKFLSAYKSTSIYDLAFLKPADQYEQWSNFTDDVQTALYKIRWDNIPAAAIDEMVESGKLYLFEIYSADLYKNPAEGRKIDTQAQIFKEIFSENGQKVIKLLGNCEVYFRPASLPAVVTHPKGSILVHKQLVNGKTLPDEVYREIYRYLNKKSENLSPLAKQLLDKELVKYRVAQEDIIKDKRFTENQYSFHLPVTLNYKVKQQFYINMEVMNMLRSRKDINILGINRGTRNLLYVTVINQQGEILYSRSLNEFNGVDYRDKLLVKERGIKDAAMNWQAADSIKNIKEGYLSRALGEIVRLMVKFNAICVVENLSSNFRNAGGGIFAYGNFYKGFETNLIKKLNCLIIKDAEKDKAGSVLRSLQMTRSFESFEKAGRQSGWLFMLDPAYISAVDPLTGFVNLFSFRNLKTIRQKAEFLQKFKSINYVPETKAFDFVFDYKDFGVTACGPVSCWVATSDVERIVKTTENGKVKFESVLPSMQLAKLFTDKDIDFTDGHNLISEITADSRLVTETLSIFMNIMRLYNYDIDRNNDYVSSPVMGRFDTRYDKKLHNPDELAAYNMARKGLMIIKRAQASEKDSKVDLFIKNADWFSFLQTGSI

SEQ ID NO: 28 - protein, 167 aa, Unknown
  Description of Unknown: uncultivated organism sequence
  Category: MG11 effectors
  Description: MG11-30 effector
MPLNKFVLTSKGKKWINVNNNGQWETIPTEPTKDLLKLFENRIDINGDIRAQITENKMSSEFYYDLTHIFKNVVQLRNSKIGDASVDYILSPYLLEDGTTFNSLDIQEQVQNGKNVMLPIDADANGAYHIALKGLMALETITEDGKIKISNKNTDWFEFIQKKKYRN

SEQ ID NO: 29 - protein, 496 aa, Unknown
  Description of Unknown: uncultivated organism sequence
  Category: MG11 effectors
  Description: MG11-31 effector
MKNNQFNENFREFTNQYSLTKTIRMELVPYNNDAKKLIHDYKSGCENGISKGKKFANNYVIVKKILDDYYRSQINEKLSVINLNDDKKIENAFDLFVNNKNDKNNKQFENSLKSLRIIIASALKPIKEIKYEKLINLYEVKGEKTCELIEFIKQNETLSEPDKEKYINAVSLFNSFVGYFSGYKENRNNMFSEKAEITAISNRLINENMLLYFENCLKLEKIKNNAEELHDELCEILKEFVLPKNYSMLLTQDKIEEYNKLIGHDASDKFAKGCNQLINEYRLKYPEKKKVIPFLNQLYNQILFRDIKTQNGIEKISTDKELFEIINVYIQNTLDDYLKTADNLFYDKTLFSDIYFLSNKFSSLSTILFESKNKSYSILKRKLAESNFDISKPVKINDIENNFKIDVYKILKCKYDQMNLEIKKNIERIKPILMLEKLNDDKSVPKIDNGNDKGGIGFQQIAIIQSLFNSIIELNRFMQLFSLELNGQKIEIENKN

SEQ ID NO: 30 - protein, 1282 aa, Unknown
  Description of Unknown: uncultivated organism sequence
  Category: MG11 effectors
  Description: MG11-32 effector
MKDLNQFIGKYKVEKTLRFELAPIGKTEAWMESKGVIANDKRRADNYTIVKSLIDRYHKVCIRESLTGCNLNWTRLSEAVETYRRCQDTESRKALLKCQDEYRTEIAKKFLSFEDFAELTAPSPSALIKDTLPHHVTNKVHPEFSDIDDVDNAKQALSLFEGFAMYFESYQKNRSNLYTAKNIASSVAHRIVNDNFSKFLANIKVFENLRVIYPEIIEQCTNELRQLLKGKQLEEVFRVESFNNVLTQEGIDFYNTIIGGVSVQEGEKKFQGINELVNLTLHKEDQGRGKRTALTMVPLFKQILSDRNTYSYIPERINDEEELISVLRAFHAHLASFYLNGKEVNVMEELLKIVENINHFDPNGIFVDAKKLNGISKKLYDGLFELRTKMTSHLEEQKQTKKNIEKFFQKDAFSITELSLDKKHSLVKYFTGLKDVLKAIDQKWEQFETRNNKDGQKKYKDCHTGIELIKNLLDGYKEFFAVCSVLDVDSENALDNNFYGIFTPLLTELRGIIPLYNQVRNFLSQKPSDEKKYLLKFDNSKCSDGWDAPQTKSVRIFRGQGKFLLGVTDSENRSCLNDLSSYTPISPDDQIVFLDYSQGGHMGQNLLTLVVREGKTVMVKGRKENGENLGLERQLKELLPPDIYRIRKSQSYKNESPNFSKEDLLLFVDYYKQRAKEYYSHFSFTFKDSCYYASFTELVEDIDEKAYQIKFVPTSYKNLLRLVNEGKLYLFDIKNKDYEPGAHGKKNLHTLYWEQLFCQENLENLTIKLNAKSTLFCRPQIVANPKTHKKGSMLLNRKDKNGQPIPESIYQQLYKYVNGKIAEAKMSDEAKGYLDKIAVKEAQYAITKDKRYTKQKYFIHFSTTLNANAPKTTDINKEVLDYIKDNPDVNIIGIDRGERNLLYVTLINQKGEILDQKSLNIINGFDYHAKLEQREKERDEAQRSWQSVGNITDLKEGYLSAAIHEITTMMIENNAIIVLEDLNRGFKRGRFKFEKQVYQMFEKKLIEKLNYLCSKDIKPTANGSVLRGYQLTEKFVSFEKMTKQNGILFYVRPDYTSAIDPVTGFVTHFNFKDITNTKGRKDFFENMESITYKNGYFEFTFDYRKYKPKVKDFKNIWTVCSSGKRVLWSKETKEYTDYYPTTAISGAFASRGITLDEGADVKALLSGIDDSISNADFYRILFEAFKRIVQLRNTNSNTGEDYIHSPAIQDGKQYCSLDELRKWKDNGESSIPSLPIDADANGAYHIALKGLYLMLNLQAKQIENEKWFRFVVEKPFKEEKVM

SEQ ID NO: 31 - protein, 1308 aa, Unknown
  Description of Unknown: uncultivated organism sequence
  Category: MG11 effectors
  Description: MG11-33 effector
MKDLNQFIGLYPVSKTLRFELKPVLQEGQTIDDFWNVYLNGPEKDVLHTLYTHDKERNDNYPIMKALLDQFHKNFIASALEDFEDGNGNVTWQKLEMEYQKNKKSKDYQDLQKKMRNKIREAFKKHELWPCISSYSTLISKQLKQMVKENEDGFVEAVQESHPKMELDRDKMLKAIETFNRFSVYFGNYQDNRNNMYSEEAQSTSIANRIVNENLPKFLDNIIVYQRLKDNCPNELKEIETNLSTTLNGLSLDDIFVPEYYNNCLTQNGIEKYNWILGGNPNEGVLGINSIGNDYLQHNPDSNLKLRNLEMTKLYKQILSDRERIAFLPEQFANDDELMQSINDFLDAFDSMNIFSCIQETMKILKDSNTNLEKIYVQGSKLTKLSTLLYGKWDVLGEKLRSTTVTGNTKKAQKEREEEIEKWLESKCFSLAEIKAVEDELMAQSAHPLSLMELLTDLTLWKYDQENNIWSKKSLIKLCEDSRITEFNVLMNDYQQGSISIKKDEAKEILKSVLDHYMELLHVLELLRLGKKSEYVEKDDFYTPYESLFEADDDKITISHIIPLYMKVQGYLTRKLTDQGKILLKFDSPTLANGWDDCSIVIKDNKYYLMMYLERLDDKETRALYAGNSADLVIYQQQKTDFRNAPRLFINSKGENRSPAVSKYNLPIEMVESLYKERKSLSSQAAKKAFDEQHPDYNTKLIDYYKIGFLRHDDFAPFRHTFESMWKSSSEYGSIQEFFEHTQEMCYMLSFKPIAFDYLCHLQKDGKVLLFNITNKDFNDGAKGTPNIHTLYWKELFSKDNLSNIVYKLSSQGIEFFYRKAIEKETAFVHKKGSVLVNKTFSDGTPIAGELYKKFVKHFNGSEVNLTQEEIVLLPMVKTKTAKFNITKDKRYYEHKFFLHVPITINFKASETTQKQFNERTLDIFRRNKQDLNIIGIDRGERNLVYVSVINQRGENLIPPRSYNLIGNYNYLAKLKQTEKNRDEARKNWTTIERIKDLKTGYLSQVVHEIAKLMVQYNAIVVLEDLNIGFKRGRFNVERQVYQNFEKMLIQKLNYLAFKKEMPSQECGNIRSGLQLTAPFTSFKDLGKQCGWLFYVPAGYTSKIDPSTGFVNLFNMNKPSTSLQEFFGAFDEIAYRNGLFYFTFDYSKEEFNTVKTDYTNRWTLSSHGNRIIGKEKELKDLTTKFREFFEKEVNMPLAEVSVQKVSSLEENKLQELWGLFKLLLKMRNSNDEYDYIISPVASETPFITGKDNRMQITDADANGAYNIALKGLYWLWNDFPTAEKGYLSYIKDEEWFRFIQTKPYLRDA

SEQ ID NO: 32 - protein, 1298 aa, Unknown
  Description of Unknown: uncultivated organism sequence
  Category: MG11 effectors
  Description: MG11-34 effector
MRFSTNLDPNFSKMFEVKKTIRMELVPYNEDAKHLIHDYKSGLKNGISKGKKFADNYLLVKKVLDEWYRREINKKLLNINLNDDKKIENAFDLFVNNKIEKNEKQLEKALKTLRREIALLLKPIKDEKYDKLINLHNDGDSKTCELIKVIKKNENFSDVEKENYINAVKLFDAFAGYFSGYKENRNNMFSEKAEITAISNRLINENMILYFENCLKIEKIKNNAEELYDELCKILKEFVLPMNYSMLLTQDKIEKYNKLIGHEASDKFAKGCNQLINEYRLKYPEKKKVIPFLNQLYNQILFRDIETQNGIEKISTDKELFEIINVYIQNTLDDYLKTADNLFYDKTLFSDIYFLSNKFSSLSTILFEPENKSYSILKRKLAESNFDISKPVNINDIENNFKIDVYKILKCKYDQINLEIKKNVERIKPILLLEKLNDDKSVPKIDNGNDKGGIGFQQIAIIQNLFNSIIELNRFMQLFSLELNGQKIEIENKNLDFYYQYEKICELNKDFTIYLKTKDYLTKKPYSNDKIRLFFDNNSYFLNGFVESKTDTSDHGTQYGGYLFRKRNSFGEYDYFLGCSKNTKLFREHLASSISEEDRSEFERFYYYQLKTQTIYNNYKNQNGESYEIDKQKLKDAILDATKECGLPFSYEREDTPTNYLKKIEDENPSLFKLVISNENVMQLQLSIIKNLKTVFGKYVSKVPALKDVIDREYKLLKDFNDDIQTVSSNKIIYYAPVNQKELEDLQNQKEHLKKDAKFYLFKIENKDLRDKSKRINKIGTDNLHTMYFKALMSENQYTFDIGAGMVFFREQNYTGKKIIHEKNKPIKNKTYRYTKKESVFEYDIIKDKRYFEDKFFLHLSLSINYTKSSLKISDLNSKVNKFLYKNRNEITIMGIDRGERNLIYLTIIDLKGNIILQKSMNELIYNVKTDGTEFQVQKNYHTMLNNRVKERDLAKKSWGVIDSIKELKEGYLSQVVHEIILLMMRYNSIIVMEDLNPNFKHSRISIDSQIYQKFEKALIDKLGYLVLKRDEVIDGEIIEKGNVLNGFQLACPVPAIKDMKNQNGFIFYVWPQYTSKIDPISGFVSMFDTSEKNIDGYIAFFKKFSAIKYNGQDFEFYIDDYQLFFDKKNKMPLNKFVLTSKGTRWVNVKNNGKWESIPTEPTKDLLKLFENRIDINGDIRTQITENKMSSEFYYDLTLIFKNVVQLRNSKTGDASVDYILSPYLLENGTTFNSLEIQEQVQNGKNVMLPIDADANGAYHIALKGLMALETITEDGKIKISNKNTDWFEFIQKKKYKN

SEQ ID NO: 33 - protein, 1304 aa, Unknown
  Description of Unknown: uncultivated organism sequence
  Category: MG11 effectors
  Description: MG11-35 effector
MARIIDEFCGQENFNDFVGLFSLTKTIRMELVPYNENAKHLVCDIQTDSDNAIERARTFANNYVIVKKILDNYYRQEINNKLLNYNLNVDNKIGKAFDLFLANKTTKETKLFDTILKDLRGQVVNELKSIKEIKYDNLINLHDVNGEKTCLLIELIKKDKSLSESEKEKKINAIKTFDKFAGFFSGYKENRNNMFSDKTEMTAIANRLINENMIFYFENCFKLEKIKNYALDLYNALCEILHDFVCPTNYGKLITQDAIEGYNTLIGHSFADKYSKGCNQIINEYRINHPDLKKHIPFLNRIYNQILFRDKKIENNSNEIITDKELFERIDSYTRYSLSDYLQSVDSLFNDRDLFSEIYFLPNKLNILSQILFEKERNSFSILKKKLAEKNIDSSIPVTLENISLVCSLDVYEILKCKYDQISSAIKTNLEHLKPILLLDKLNDDRSVPKLGAEYDKGGLGFQQIGIIQHFFNSVIELNRFVQLFSLELNGKEVEIENKNFDFYHRYCLINEFKDDFSIYLKVKDYLTRKPYSNDKVRVYFENNSYFLNGFVESRTEKSDHGTQYGGYLFRKLNSSGDYDYFLGCSKNAKLFREHLASSVSENDKSTYERFYYYQLKTQTIYYNYRNEQGETYEIEKQKLKDVILQATKENGRLFEYDDKDTPTNYLNKIERENQSLYKAIIENENVKQLQLSIIKNLKFAFEKYVSKVPALKDILDKDYQFLKDFNDDIQEVSNNKIIYYAPVSQQEWESVLNFTEDSSDKGKFYLFKIQNKDLKDKSNRKNKSGIDNLHTLYFKTLMSEHQHTFDIGAGMVFFREKNYRGKKIIHQRNKPIQNKTPNYSKLESLFEYDIVKDKRYFENKFFLHLSMMINYSKSSLRMADLNTKVNKFIYNNKDSINIMGIDRGERNLIYITIIDQKGNILLQKTMNNLTYMVKNAEADFFVNKDYHKLLSNRVKERDVAKKNWGTIDSIKELKEGYLSQVVHEIVLLMMRYNAIIVMEDLNPNFKRSRINIESQIYQKFEKALTDKLNYLVLKKDEVIDGKKIVKGDVQNGLQLTCPVPAIKDMKNQNGFIFYVWPQYTSQIDPITGFVSLFDTRAKNIEGYLSFFKKFSAIRFNGEDFEFTVDNYQQFCNQKDVMPFNSFVITSRGVRLIKVKKGSRWETITVEPTKQLYQLFENKIDIYGDIRAQITDVNMSSDFYYELMLIFKSIVQLRSSKSGDSSIDYILSPILLDDGTTFDSYQQKILEENGERALLPIDADANGAYHIALKGLMALDTITSDGKIKISNKNSDWFMFIQKKDYKK

SEQ ID NO: 34 - protein, 1302 aa, Unknown
  Description of Unknown: uncultivated organism sequence
  Category: MG11 effectors
  Description: MG11-36 effector
MRNVENFTGLYQISKTLRFELKPMLKSGETTEDFWNRYINGNEDDRLHKLYMSDDGRHEKYPLMKAMLDQWHKIFISRVLSQFSETVVTWQQIAEAYINKSDDYKTLQEEMRKSIRKSFESHVWWKYMSAEFKNLISEQIRYMVENNENNFIETVQNSNPKMNATREDMLEAIDSFANFSAFFDIYKDNRMNMYSHEDKTTSIANRVVNENFPKFLDNIKVYEKLKEICPDELKIAENSLQAQLNGKTLDDVFKPEYYNNCISQQGIEVYNWIIGGNPNENVIGINSIGNEYIQSHPDTNYKLRNLKMTQLFKQILSDRVRLSFIPEQFGSDDELMQSISSFLDEVESSKLMTRIKETMGSLLDGTVNLEKVYIQGTNLTKLSAMMYGGSNWNALGEKLRAMTVNSKTKKGQAEIDEKIDSWLAKKCFSVAQTQKASYEISKEIQSSVTLLDVLGRLVAHKCDSETKTWSDKSYIDICNNARIIQFKELMNGYKSGNVSIKDDSAKEIIKTVLDNYIELFNVVNLLRLNKKMDSLDKDDFYVAYNALFESEDELTITQIIPLYNKVRNYLTRKLSNGGKIELKFDSPTRANGWNDCSIIIKDGKYYLAMYIDKISNVDTERLYAGNTASLVESKQQKTDFKNLSRLFFYSKGTKLAPAVTEYNLPIETISDMYNEKRGISGAAKLKEFNKKYPDFTRKMIDYLKVGLSKHSSFSMFSENFRSLWKDSSEYKSIKEFCDHTQTICYAVSLRPISFEYLYTLQNENKMLLFNITNKDFNSGSYGTPNLHTLYWKELFSEENMKNPVYKLSSQGVKFFFREAITEEKPYKHRKGSTLVNKTFADGTPIEGTLYKRLMLFLNGADIQLTDKEKELLPKLKTRKAKHEIVKNRRYYENKFFFHVPIVINYNVAAETPSLYQFNKSVLDNFRANKRDINIIGIDRGENNLIYVSVIDQHGKNIITPRSYNLIGNYNYMEKMKQVEKNRDEARKNWTTIEKIKDLKNGYLSQVVHEISSLIFRYNAIVIMENLDSEFKRGRYKIERQVYQNFEKMLMDKLNYLVFKRNANETCGTVRDGLQLTAPANFNELGKQNGWIFYVPAAYTSMMDPSTGFVNLFNMKKPAESLQKFFGSFNEITYKNSMFYFTFDYRNFKTIRNDYTNVWTLSSHGMRNYGKNKRLEVLTGLFCNFFDKVGIQYTDVSVKTVSELDESKLVELWNIFKCMLKMRNYNGDNVGFDISPVASENPFITGTNNSMGIMDADANDAYNIAIKGLYWLHNDFPVNDKGYLEYIKDEDWFKFVQSKPYSK

SEQ ID NO: 35 - protein, 1235 aa, Unknown
  Description of Unknown: uncultivated organism sequence
  Category: MG11 effectors
  Description: MG11-37 effector
MLDKFASLYPVTKTLRFRLLPQGRTEENMQAAKVLENDLERSEAAAVVKGLIKKYHLQFISDTLSGSTLSWQALTETLDKFKADHTATAELDSALAAYRCKLAELFTKSPKYKVMATPVSIIKEILKTETDPENIAALNKLNGYTYIIFDYVSTRMLTYSADAKATSLAYRLVDENYLRFYQDISAAAEISAVLEEAGLDNAEVEAFIRTDYNTCLTSEGIASFNAAAGSINQFVNQLLQQNPVLQSEPSLRRHLQPLYKMLLDEAESKIIKFEDYGQLRDAVENFRRNFQDLPQSLIDIFAGRYDYSKIYVGYKYLNEASSQIAGGYNWKLLENALEDFYSKPYLVNGKLPVKYKTVVNKKMNQLAYSFTELQEALDAGESGSSITDLFGKYAELHAAYAAADGNVFYKEYDRKSIASLKNYLDAVNAIARFIKIFAVPEVYVKDEGFYGIVDGAADKLRDFDLLYNMVRNYITKKPYKKSKVALTFNSSSFGRGWDENKIYDELTTIFTYNGKYYLGVINKNDKPDLAAAVSKDEGGYKRMVYKTFDIVKQLPRLSFTKAVKAHFEESDEDYIFDGPKFAKPLRVPKEIYLQSFTDNGDKLADSTKKYTKAYLDMSGDYKGYYEAIVKRIDYTKEFLSAYKSTSIYDLAFLKPADQYEQWSNFTDDVQTALYKIRWDTIPAAAIDEMVESGKLYLFEIYSADLYKNPAEGRKIDTQAQIFKEIFSENGQKVIKLLGNCEVYFRPASLPAVVTHPKGSILVNKQLVNGKTLPDEVYREIYRYLNKKSENLSPLAKQLLDKELVKYRVAQEDIIKDKRFTENQYSFHLPVTLNYKVKQQFYINMEVMNMLRSRKDINILGINRGTRNLLYVTVINQQGEILYSRSLNEFNGVDYRDKLLVKERGIKDAAMNWQAADSIKNIKEGYLSRALGEIVRLMVKFNAICVVENLSSNFRNAGGGIFAYGNFYKGFETNLIKKLNCLIIKDAEKDKAGSVLRSLQMTRSFESFEKAGRQSGWLFMLDPAYISAVDPLTGFVNLFSFRNLKTIRQKAEFLQKFKSINYVPETKAFDFVFDYKDFGVTACGPVSCWVATSDVERIVKTTENGKVKFESVLPSMQLAKLFTDKDIDFTDGHNLISEITADSRLVTETLSIFMNIMRLYNYDIDRNNDYVSSPVMGRFDTRYDKKLHNPDELAAYNMARKGLMIIKRAQASEKDSKVDLFIKNADWFSFLQTGSI

SEQ ID NO: 36 - protein, 844 aa, Unknown
  Description of Unknown: uncultivated organism sequence
  Category: MG11 effectors
  Description: MG11-38 effector
KYAELHAAYAAADSNIFYKEYDRKSIASLKNYLDAVNAIARFIKIFAVPEVYVKDEGFYGIVDGAADKLRDFDLLYNMVRNYITKKPYKKSKVALTFNSSSFGRGWDENKIYDELTTIFTYNGKYYLGVINKNDKPDLAAAVSKDEGGYKRMVYKTFDIVKQLPRLSFTKAVKAHFEESDEDYIFDGPKFAKPLRVPKEIYLQSFTDNGDKLADSAKKYTKAYLDMSGDYKGYYEAIVKRIDYTKEFLSAYKSTSIYDLAFLKPADQYEQWSNFTDDVQTALYKIRWDNIPAAAIDEMVESGKLYLFEIYSADLYKNPAEGRKIDTQAQIFKEIFSENGQKVIKLLGNCEVYFRPASLPAVVTHPKGSILVNKQLVNGKTLPDEVYREIYRYLNKKSENLSPLAKQLLDKELVKYRVAQEDIIKDKRFTENQYSFHLPVTLNYKVKQQFYINMEVMNMLRSRKDINILGINRGTRNLLYVTVINQQGEILYSRSLNEFNGVDYRDKLLVKERGIKDAAMNWQAADSIKNIKEGYLSRALGEIVRLMVKFNAICVVENLSSNFRNAGGGIFAYGNFYKGFETNLIKKLNCLIIKDAEKDKAGSVLRSLQMTRSFESFEKAGRQSGWLFMLDPAYISAVDPLTGFVNLFSFRNLKTIRQKAEFLQKFKSINYVPETKAFDFVFDYKDFGLTACGPVSCWVVTSDVERIVKTTENGKVKFESVLPSMQLAKLFTDKDIDFTDGHNLISEITADSRLVTETLSIFMNIMRLYNYDIDRNNDYVSSPVMGRFDTRYDKKLHNPDELAAYNMARKGLMIIKRAQASEKDSKVDLFIKNADWFSFLQTGSI

SEQ ID NO: 37 - protein, 391 aa, Unknown
  Description of Unknown: uncultivated organism sequence
  Category: MG11 effectors
  Description: MG11-39 effector
MLDKFASLYPVTKTLRFRLLPQGRTEENMQAAKVLENDLERSEAAAVVKGLIKKYHLQFISDTLSGSTLSWQALTETLDKFKADHTATAELDGALAAYRCKLAELFTKSPKYKVMATPVSIIKEILKTETDPENIAALNKLNGYTYIIFDYVSTRMLTYSANAKATSLAYRLVDENYLRFYQDISAAAEISAVLEEAGFDNAEVEAFIRTDYNTCLTSEGIASFNAAAGSINQFVNVLLQQNPVLQSEPALRRHLQPLYKMLLDEAESKIIKFEDYGQLRDAVENFRRNFQDLPQSLIDIFAGRYDYSKIYVGYKYLNEASSQIAGGYNWKLLENALEDFYSKPYLVNGKMPVKYKTVVNKKMNQLAYSFTELQEALDAGESGSSITDLFG

SEQ ID NO: 38 - protein, 798 aa, Unknown
  Description of Unknown: uncultivated organism sequence
  Category: MG13 effectors
  Description: MG13-2 effector
FESDEDVLVAIEKAYVELYERVLCNERSLKELLCHLSDYDLNNIYVCNDLQLTDISQRLFGGWEVIQKAMIEELKRTVPRKSKSEKDEAYEERIQKMYKTFKSISIAQINHCLTSCKENDVQTIEGYFSNLGAIHTDTIQRENLFVRIENAYTDVKELLNTPYPKEKLLAQDKYNVEKIKTLLDSIKDLQHFVKPLLGKGDEAEKDEKFYGELVALWEELDKITPLYNMVRNYVTKKPYSIKKIKLNFENSTLMNGWDVNKERDNTTVILRKDGLYYLAIMNKKYNRVFDVDVMEMHGDCYEKMEYKLLPGANKMLPKVFFSKSRIDEFQPSEVLLENYKKETHKKGENFKLSDCHALIDFFKSSIEKHEDWNKFGFKFSDTCTYQDLSGFYREVEQQGYKISFRNVSVDYINSLVDEGKIYLFQIYNKDFSPYSKGTPNLHTLYWKMLFDERNLTDVVYKLNGEAEVFYRESSIHVEKPTHPANQSIKNKNELNEKKHSVFPYDLIKHRRYTVDKFQFHVPITMNFKGMGQENINHSVNEYIRESEDLHIIGIDRGERHLLYLTLIDMKGNIKEQYSLNEIVNEYKGNTYRVDYHDLLEKREKERMEARQSWQTIENIKELKEGYLSQVIHKISQLMVKYHAIVVLEDLNTGFMRGRQKIEKQVYQKFEKMLIDKLNYLADKQKSPEELGGILNAYQLTSKFVSFQKLGKQSGFLFYTPAWNTSKIDPVTGFVNLFDTRYETREKSRAFFGKFDFICYNADKDWFEFTFDYGKFTSKAEGTRTRWTLCTQGMRIETY

SEQ ID NO: 39 - protein, 1256 aa, Unknown
  Description of Unknown: uncultivated organism sequence
  Category: MG13 effectors
  Description: MG13-3 effector
MEFKDFTNQYKMNKTLRFELKPVGHTLELIRQNAIISSDEGLAEAYQKVKKIIDEYHRYYIETQLANLQLQCEEQTDAKGKGKCNSLAEYYALRGDESDSGKKNFKKVKELLRKQVSDCLQKSAEYKTIFKKELIQVDLINFVNGLDISEEEKSKRRKLIEAFNNFTSYFVGFHQNRENMYTFEEKSTSIAYRLINENLPKFIDNISVFVKISEVPELKDKISQLTEDFSSYLGGVSVENVFKLEYFNKVVTQRQIEVYNALIGGRSEGDTKIQGLNEYINLYNQKHPEAKLPRFKVLYKQILSDREPISWLPEQFKRDGDLLDAVREYHEEMQLVAENIMVLLSDIKNYNLDGIFVSNDTQLTSISKALDENGNWGRIQRDFIEYFKSQNKKKKNEGDEKYYERMKDLYDANKSFSISEINSVAGLNVEEYFANMEVRDYTDDTARKKINVFDAISDAYSDVEYLLTSEYPKEKHLISEENDIESIKCLLDTWKSLQHFVKPLLGTGDEPAKDNAFYGEFNEYWDKLNKLNALYNKVRNYLTRKPYSDEKIKLNFRSAQLLGGWDQNKETDCLSVLFMKDGKYYLGIMNKRVKEDLDYNENKGNNKIFATKLSSTGDCYQKMVYKLLPGANKMLPKVFFSESRINEFAPSAKILHIREIGSYKSGDTFNLDDCHALIDFYKESLQKHEDWSKFNFEFPDTSEYSNINEFFEDVERQGYKVEFQPISVKVIDKFVNEGKLYLFEIYNKDFSEHSKGTPNLHTIYWKMLFDERNLKDVVYQLNGQAEVFFRKKSLDNKFPTHPAGTPIKNKNKQNPKKESVFEIDLIKNKRYTEDKFLFHVPITMNFKSGKIGSLNSKVLEYIKEADDLHIIGIDRGERNLLYVVVIDKNGNICEQVSLNQIGNVNYHNLIDEREGNRQKQRENWKTIEGIKDLKQGYLSQAVRIIADLMVKYKAIVVLENLNLGFMRGRQKVEKSVYQQFEKMLIEKLNYLVDKKAAPNLPGGALKAYQLANKFESFRAIGRQCGFLFYIPAWNTSKIDPATGFVNMLNPRYESIEKSKDYIGKFDAIRYNADKDYFEFDIDYSEFTVRAEGTKLKWPLCSYGTRIENYVDSQSGKWASRTVILTDEFKRAFKDLDINGDLKGQILSQSEKSFFEDLFRVLRLLVQLRNSEIQEHGESVKEPEDYILSPVANSEGVFFDSRKADDSMPKDADANGAYNIARKGLMIVNQVKQEKDLDKFKSDLTNKNWLNFAQEGK

SEQ ID NO: 40 - protein, 1256 aa, Unknown
  Description of Unknown: uncultivated organism sequence
  Category: MG13 effectors
  Description: MG13-4 effector
MEFKDFTNQYKMNKTLRFELKPVGHTLELIRQNAIISSDEGLAEAYQKVKKIIDEYHRYYIETQLANLQLQCEEQTDAKGKGKCNSLAEYYALRGDESDSGKKNFKKVKELLRKQVSDCLQKSAEYKTIFKKELIQVDLINFVNGLDISEEEKSKRRKLIEAFNNFTSYFVGFHQNRENMYTFEEKSTSIAYRLINENLPKFIDNISVFVKISEVPELKDKISQLTEDFSSYLGGVSVENVFKLEYFNKVVTQRQIEVYNALIGGRSEGDTKIQGLNEYINLYNQKHPEAKLPRFKVLYKQILSDREPISWLPEQFKRDGDLLDAVREYHEEMQLVAENIMVLLSDIKNYNLDGIFVSNDTQLTSISKALDENGNWGRIQRDFIEYFKSQNKKKKNEGDEKYYERMKDLYDANKSFSISEINSVAGLNVEEYFANMEVRDYTDDTARKKINVFDAISDAYSDVEYLLTSEYPKEKHLISEENDIESIKCLLDTWKSLQHFVKPLLGTGDEPAKDNAFYGEFNEYWDKLNKLNALYNKVRNYLTRKPYSDEKIKLNFRSAQLLGGWDQNKETDCLSVLFMKDGKYYLGIMNKRVKEDLDYNENKGNNKIFATKLSSTGDCYQKMVYKLLPGANKMLPKVFFSESRINEFAPSAKILHIREIGSYKSGDTFNLDDCHALIDFYKESLQKHEDWSKFNFEFPDTSEYSNINEFFEDVERQGYKVEFQPISVKVIDKFVNEGKLYLFEIYNKDFSEHSKGTPNLHTIYWKMLFDERNLKDVVYQLNGQAEVFFRKKSLDNKFPTHPAGTPIKNKNKQNPKKESVFEIDLIKNKRYTEDKFLFHVPITMNFKSGKIGSLNSKVLEYIKEADDLHIIGIDRGERNLLYVVVIDKNGNICEQVSLNQIGNVNYHNLIDEREGNRQKQRENWKTIEGIKDLKQGYLSQAVRIIADLMVKYKAIVVLENLNLGFMRGRQKVEKSVYQQFEKMLIEKLNYLVDKKAAPNLPGGALKAYQLANKFESFRAIGRQCGFLFYIPAWNTSKIDPATGFVNMLNPRYESIEKSKDYIGKFDAIRYNADKDYFEFDIDYSEFTVRAEGTKLKWTLCSYGTRIENYVDSQSGKWASRTVILTDEFKRAFKDLDINGDLKGQILSQSEKSFFEDLFRVLRLLVQLRNSEIQEHGESVKEPEDYILSPVANSEGVFFDSRKADDSMPKDADANGAYNIARKGLMIVNQVKQEKDLDKFKSDLTNKNWLNFAQEGK

SEQ ID NO: 41 - protein, 1255 aa, Unknown
  Description of Unknown: uncultivated organism sequence
  Category: MG13 effectors
  Description: MG13-6 effector
MNDFIRLYPLSKTLRFKLIPLRKTLEYIVSNGLLEQDRHRAESYVRVKDIIDNYHKAFIERVLSTFKLQYADRQSKDSLEEYYTYYMVGNKTEEQLKVFSEIQEKLRKQIAGCLVSDPVFKRIDKKELIKEDLVDFVSTEEERQLIAEFKDYTTYFTGFHENRRNMYSSEAQSTAIAYRLIHENLPKFIDNLQVFSKMAATSVAEKLPQLYADFEEYLNVAEINDMFRLDYFNVLLTQTQIDVYNAIIGGKALEDGTRIQGLNEYINLYNQQQKDKHVRLPKFKLLYKQILSDRNAISWLPDEFVSDNETLEAIERCYEDLESQILNRKVEGEHSLKTLLEGLEEYDLAKIYVRNDLQLTDISQKIFGDWSVVQRTYIDTFKNENPLTKKETMDKYEERIEKYWKGLKMLSIADIDARLILSGKDKTQTFACYFRRLGKDVKNDVEQNVFERIEIAYLNVKDLLNTPYPAHKNLAQDKESVEKIKLFLDAVKDLQYFVKPLLEKGLEVEKDERFYGEFIPLWEELDKITPLYNKVRNYLTRKPYSTQKIKLNFENSTLMDGWDENKERDNCTVILRKDGLYYLAIMNRNHRKIFDKKIMPSSGECYEKMVYKLLPGANKMLPKVFFSKSRIGEFNPSVRVREIYEKGTFKKGNDFNLEDCYAMIDFFKESINKHEDWSKFGFHFSKTEDYKDLSDFYKEVEQQGYKVSFVNVSQSYVDQLVDEGKLYLFQIYSKDFSPYTKGTPNMHTLYWKMLFDEQNLADVVYKLNGQAEVFYRKASIKSDRPTHPANVPIANKRKGTEKKESVFAYDLIKDKRYTVDHFQFHVPITLNFKSRGADNINQLVNEYIKQTGDELKIIGIDRGERHLLYLTLIDTKGRIVSGMQFSLNQVDQTDYHQLLTQREEERLKARQSWRTIENIKELKEGYLSQVVHTIATLMVEHNAIVVLEDLNMGFMRGRQKVEKQVYQKFERMLIDKLNYLVDKKKESSEAGGLLKAYQLTSKFESFQKLSKQSGFLFYVPAWNTSKIDPVTGFVNLFDIRYESVDKSKIFLAKFDDIRYNAGKDWFEFSFDYSHFTSKAQDTRQNWTVCSYGERIETYRNPTKNMNWDNREVLLTDEFKNLFQTYGIDYSAGSLKEQILNQTEKSFFCNEKLDKKTPIGLLQLLKLTLQMRNSITGTEVDYLVSPVVDEKGQFYDSRTCGDDLPQNADANGAYNIARKGLWVVQQIRQSTDLKKLKLTISNKEWLRFVQQKLYLE

SEQ ID NO: 42 - protein, 1298 aa, Unknown
  Description of Unknown: uncultivated organism sequence
  Category: MG13 effectors
  Description: MG13-7 effector
MNDNRTDFNQFSNLYSQSKTLRFSLEPEPKEKTLENLGFIKKENVWVLDEKNSLLGQDKERADDYKKVKGLIDDYIKDFIEKSLSHLELNKEDLENFEKLYKKKGKNEEERICFDEIKAKLRGQIADYLKNDPCYPSILKESKGKGKGKGKKVVDHSSNASTNPSVPEVNKKKEKGKSKKEDNETFFFEHLYNFVEEDDRRYIDKFKKFTTYFRGFNENRKNLFTEEAQATAIAYRLVHDNLPKFIDNMQCFEAFKDAGLADKLPELYASLGAEPGVGTIDEMFRLDYYSRLLTQSHIDIYNAVIGGKTTDKEKIQGLNELVNLYNQQQTDRSMRLPLFKPLFKQILSDRGSLSWLPEQFGSDNEVLESIEACYKELEYTFSSLKQLLEELGNYDLHKVYVYYAMLPPISLAVYDDWSAIYRALDAAFMRENPRKKNEKDEKYEERRQKYFKNKSACSIAEVEEALVVQDADSPHALAGYFSRLDAGREDGEASADLFARIAALHKEAEPLLTASYPKEKNLARDKEGVGKLKNLLDAVKALQHFVAPLAATAEQPDKDERFYGQLMPLWHSLGQVTPLYNQVRDYLTRKPYSVEKIKLNFENSTLMDGWDVNKIRDNTTVILRKDGAYFLAIMDKKHNKTFDAKNIQTDGVCYEKMDYKLIPGPNKMLPKVFFSQKGKSEFNPSSQIMEIYEERGSFKKGDSFRIEDCRALIDFYKDAISRHPDWKNFGFQFSETQSYNDISDFYHEVEMQGYSISFSPVSENYINSMVDGGKLYLFKIYSKDFSSKSKGRPNLHTIYWRMLFDPRNLADVSFRLNGGGEVFYRKASLPNEPEKPTHPAGRPIANKRAGAKKKESCFNYDLIKDERFTERHFELHVPITLNFKSRQIKDINQMVKEYIHDAADLHVIGIDRGERNLLYLSLIDMQGRIVKQESLNRVDRTDYHALLEKREVERQKARRSWQTIESIKELKEGYLSQVVRVVANWMVEYHAIVALENLNFGFKRGRQKVEKQVYQKFEKMLTDKLCYLVDKTKDADEPGGALRAYQLAKPLEKSANMGFQNGFLFYVPAWNTSKIDPVTGFVNLFDTRYESKDKAKDFFKKFDAIRYNEATGLFEFVFQYSEFPTKAEGTRDGWTLCSHGERIEAFKDKAGHWDTCTVNLTEELKKLFAHYGIALDGDLRAAISRQTDKKFFQNDKREGDCPRGLMQLFRLMVQMRNSEPGTNTDYLISPVADAQGRFFDSREVGDDLPKDADANGAYNIARKGLWLVRKIKEGASPEELKLTNQEWLSFAQEKPYEE

SEQ ID NO: 43 - protein, 1231 aa, Unknown
  Description of Unknown: uncultivated organism sequence
  Category: MG13 effectors
  Description: MG13-9 effector
MKFQDFTNLYPLNKTLRFELQPIGKTKENIERKGFLFNDKQRAGDYKKVKRIIDEYHKKLIDESLASFTLQYENKGKKDSLLEYYESLKSARTSNNETFAKIRTNLRQQISKCLRRSEEYKRIYKKELFSQDLPQFVAEENLDLIKKFNGFATYFSGFHQNRQNMYSDDAKSTAIAFRMIHENLPKFIDNIDIFNKIKHIPEIAENLAQLYKDFEQYINVGKIDEVFELPYFNYTLTQSQIEIYNAIIGGKSEGDIKIKGLNEYINIYNQTHKESRLPKFKVLYKQILSDREHISWLPEQFNDDNELLQAIKEYYDSIYNHLANLRVILETLDTYDLCGVFVRNDQQLTNISKRVSNDWSKIQSAITEDLKQVRRQKKKEDSETYEEELRKLYKKQGSFSIDYIYKVADLQINSYFTNLDAINTEDLQQENIFARITNAYTEIRSLLEEPYPANKKLIQDKNDVVTIKVFLDTLLELLHFVKPLLGTGEESDKDNRFYSEFIPIWEKLNLLTPLYNKVRNYVTRKPYSVEKYKLNFGSPQLLGGWDKNKEKDCLSVLLRKDGKYFLGVMNKHNNKIFEQFPCDGDCYEKVVYKLLPGANKMLPKVFFSKSRIGEFMPSEEVLDIYDSGSFKKGANFNLQDCHKLIEFYKGAIAKHEDWSKFEFDFSNTESYDDISGFYREVEEQGYKLTYQLISVSYIDTLVEEGKLYLFQIYNKDFSKHSKGTPNMHTLYWKMLFDERNLADVVYQLNGGAELFYRERSIEYDKPTHPAKIPIKNKNTHNPKNESCFRYDLIKNRRYTIDKFQFHVPITLNFKSPGRDNINSLVCDYLHSTENTHIIGIDRGERNLLYLVVINPKGEICEQISLNEICNYHNGNLHKTDYHNLLDKREKDRHNERQSWQTIEGIKELKEGYLSQVIHKISELMVKYNAIVVLEDLNSEFMRGRQKVEKSVYQKFEKMLIDKLNYLVDKKADPAIPGGLLRAYQLTNKFDSFTKLGKQSGFLFYVPAWNTSKIDPATGFVNLLDLRYESEDKAKLLLSKFDSIRYNNDKDRFEFKIDYNKFTTKAAGTRTKWTICTYGTRIETFRNPAKNSQWDSREVNLTAEFKDLFEGMDICGNLKEIIMQQNGKQFFERLLHLLRLTLQIRNSITGTDVDYIISPVANDRGEFFDSRNSDTTMPQDADANGAYNIARKGLMIIEQIKNSDTPQSIKFDLSNKRWLQFAQQEDKDVVYL

SEQ ID NO: 44 - protein, 1254 aa, Unknown
  Description of Unknown: uncultivated organism sequence
  Category: MG13 effectors
  Description: MG13-10 effector
MKNILEQFVGLYPLSKTLRFELKPLGKTLEHIEKKGLIAQDEQRAEEYKLVKDIIDRYHKAFIHMCLKHFKLKMYSEQGYDSLEEYRKLASISKRNEKEEQQFDKVKENLRKQIVDAFKNGGSYDDLFKKELIQKHLPRFIEGEGEEEKRIVDNFNKFTTYFTGFHENRKNMYSDEKESTAIAYRLIHENLPLFLDNMKSFAKIAESEVAARFTEIETAYRTYLNVEHISELFTLDYFSTVLTQEQIEVYNNVIGGRVDDDNVKIQGLNEYVNLYNQQQKDRSKRLPLLKSLYKMILSDRIAISWLPEEFKSDEEMIEAINNMHDDLKDILAGDNEDSLKSLLQHIGQYDLSKIYIANNPGLTDISQQMFGCYDVFTNGIKQELRNSITPTKKEKADNEIYEERINKMFKSEKSFSIAYLNSLPHPKTDAPQKNVEDYFALLGTCNQNDEQQINLFAQIEMARLVASDILAGRHVNLNQSENDIKLIKDLLDAYKALQHFVKPLLGSGDEAEKDNEFDARLRAAWNALDIVTPLYNKVRNWLTRKPYSTEKIKLNFENAQLLGGWDQNKEPDCTSVLLRKDGMYYLAIMDKKANHAFDCDCLPSDGACFEKIDYKLLPGANKMLPKVFFSKSRIKEFSPSESIIAAYKKGTHKKGPNFSLSDCHRLIDFFKASIDKHEDWSKFRFRFSDTKTYEDISGFYREVEQQGYMLGFRKVSETFVNKLVDEGKLYLFHIWNKDFSKHSKGTPNLHTIYWKMLFDEKNLTDVVYKLNGQAEVFYRKKSLDLNKTTTHKAHAPITNKNTQNAKKGSVFDYDIIKNRRYTVDKFQFHVPITLNFKATGRNYINEHTQEAIRNNGIEHIIGIDRGERHLLYLSLIDLKGNIVKQMTLNDIVNEYNGRTYATNYKDLLATREGERTDARRNWQKIENIKEIKEGYLSQVVHILSKMMVDYKAIVVLEDLNTGFMRSRQKIERQVYEKFEKMLIDKLNCYVDKQKDADETGGALHPLQLTNKFESFRKLGKQSGWLFYIPAWNTSKIDPVTGFVNMLDTRYENADKARCFFSKFDSIRYNADKDWFEFAMDYSKFTDKAKDTHTWWTLCSYGTRIKTFRNPAKNNLWDNEEVVLTDEFKKVFAAAGIDVHENLKEAICALTDKKYLEPLMRLMTLLVQMRNSATNSETDYLLSPVADESGMFYDSREGKETLPKDADANGAYNIARKGLWTIRRIQATNSEEKVNLVLSNREWLQFAQQKPYLND

SEQ ID NO: 45 - protein, 1249 aa, Unknown
  Description of Unknown: uncultivated organism sequence
  Category: MG13 effectors
  Description: MG13-11 effector
MKEFTNLYPVSKTLRFDLQPIGRTKENIERNGILQRDEKRAEDYKTVKGFIDEYHKQFIKDRLWSYKLPLYSEGHLNSLEEYQALYELSKRDETQEREFAEVKDNLRAFIAKRLTEGGSAYDRIFKKELIREDLVDFLENEDDREIVRQFADFTTYFGGFHENRKNMYSAEEKSTAIAYRLIHQNLPKFMDNMKAFAKIAESSVSEHFEEIYEGWKEYLNVGSLEEIFRLDYFSVTLTQPHIEVYNYIIGKKILEDGTEIKGINEYVNLYNQQQKDKTKRLPFLVPLYKQILSDREKLSWMAEEFDSDDQMLTAINESYSHLHDLLMGDDNESLRSLLEHLKDFNLEQINITNDLSLTDISQHLFGRYDVFTNGIKDELRIITPRKKKEDDESFEDRISKIFKTQKSFSIALLDKLPQPVMEDGKLRTVEDYFLSLGAVNTGLTQKENLFAQIENAYEDARTILQLKNTDDTLSQDKPAVAKIKTLLDALKDLQHFIKPLLGSGEENEKDELFYGSFQMMWDELDTVTPLYNKVRNWLTRKPFSTEKIKLNFDNSQLLGGWDVNKEPDCTGVLLRKDGLYYLGIMDKKSNRIFEADVTPTDGVCYEKFDYKLLPGANKMLPKVFFSKSRIDEFSPSETIIASYKRGAHKKGANFNLAECHRLIDFFKQSISKHEDWSKFGFHFSDTKTYEDISGFYREVEQQGYMLSYHPVSSSYINQLVDEGKLYLFRIWNKDFSEFSKGTSNLHTLYWKMLFDEQNLANVVYKLNGQAEVFYRKASIKSENRIIHKANQPINNKNELNKKDTSTFEYDIIKDRRYTVDKFQFHVPITINFKATGQTNINPIVQDVIRQGGFSHIIGIDRGERHLLYLSLIDLQGNIVKQMTLNDIINEYKGQTYKTNYHDLLAKREGERTDARRSWETIETIKELKEGYLSQVVHIISKMMVEYNAIVVLEDLNTGFMRGRQKIERQVYEKFEKMLIEKLNCYIDKHAEPTEETGLLHPLQLTCDAKKWTRSHQCGCLFYIPAWNTSKIDPVTGFVNLLDTRYDTREKARLFFSKFQRISFNVDMGWFEFAFDYNDFNTKAEGTRTQWNLCTFGERIRSFRNPKKNNQWDDERIVLTDEFKQLFEKYDIDIAGNLKEAISAQSDAQFFKELLGLMKLLLQMRNSVTNSEEDYLLSPVADENGHFFDSREGISSLPIDADANGAYNIARKGLWVIRKIQETQEDEKVSLNITNKEWLQFAQTKPYRND

SEQ ID NO: 46 - protein, 1262 aa, Unknown
  Description of Unknown: uncultivated organism sequence
  Category: MG13 effectors
  Description: MG13-12 effector
MRKFDEFVGLYPISKTLRFELKPIGKTLEHIQRNKLLEEDAVRADDYVKVKKIIDKYHKCLIDEALSGFTFETEVDGRSNNSLSEYYLYYNLRKRNEQEQKTFKTIQNNLRKQIVNKLTQSEKYKRIDKKELITTDLPDFLTNESEKELVEKFKNFTTYFTEFHKNRKNMYSKEEKSTAIAFRLINENLPKFVDNIAAFEKVASSPLAEKINALYEDFKEYLNVEEISRVFRLDYYNELLTQKQIDLYNAIVGGRTEEDNRIQIKGLNQYINEYNQQQTDRSNRLPKLKPLYKQILSDRESVSWLPPKFESDKELLIKIKECYDALSEKEKVFDKLESILKSLSTYDLSKIYISNDSQLSYISQKMFGRWDIIGKAIREDCAKGNPQKNRESLEKFAERIDKKLKAIDSISIGDVDECLAQLGEPYVKRVEDYFAAMGASDMVEEQTDTTSFKKNIERAYKSVKELLNNADNITDNNLMQDKGNVEKIKTLLDTIKDLQRFIKPLLGKGDEADKDGVFYGEFTSLWTKLDAVTPLYNMVRNYLTSKPYSTKKIKLNFENSTLMDGWDLNKEPDNTTVIFRKDGLYYLGIMGKRYNRVFVDREDLPHDGECYDKMEYKLLPGANKMLPKVFFSETGIQRFRPSEELLGKYERGTHKKGAGFDLGDCRALIDFFKKSIERHDDWKKFDFKFSDTSTYQDISEFYREVEQQGYKMSFRKVSVDYIKSLVEEGKLYLFQIYNKDFSAHSKGTPNMHTLYWKMLFDEENLKNVVYKLNGEAEVFFRKSSITVRTPTHPANSPIKNKNKDNQKKESKFEYDLIKDRRYTVDKFLFHVPITMNFKSVGGSNINQLVKRHIRSATDLHIIGIDRGERHLLYLTVIDSRGNIKEQFSLNEIVNEYNGNTYRTDYHELLDTREGERTEARRNWQTIQNIRELKEGYLSQVIHKISELAIKYNAVIVLEDLNFGFMRSRQKVEKQVYQKFEKMLIDKLNYLVDKKKPVAETGGLLRAYQLTGEFESFKTLGKQSGILFYVPAWNTSKIDPVTGFVNLFDTHYENIEKAKGFFDKFKSIRYNSDKDWFEFVVDDYTRFSPKAEGTRRDWTICTQGKRIQNYRNPQRNNEWEGRKIDLTKAFKEHFEAYGVDISKDLREQINTQNKKEFFEELLRLLRLTLQMRNSMPSSDIDYLISPVADDTGCFFDSRKQAELKENAVLPMNADANGAYNIARKGLLTIRKMKQEENDSAKISLAISNKEWLKFAQTKPYLED

SEQ ID NO: 47 - protein, 1261 aa, Unknown
  Description of Unknown: uncultivated organism sequence
  Category: MG13 effectors
  Description: MG13-13 effector
MKQKKSQNPFNQFTGLYPLSKTLRFELRPIGKTKENIISAGILAEDNHRAESYKKVKKIIDEYHKAFIERVLKNLDLDKGALQAFYECYKKSTKEEKREETLQEIGNNLRSQISNAFKKDPKYSTLTSKDLINKELPSIATTEEERILLEEFHGFSTYFVGFHQNRENMYSKEEKATSIAYRLINENLPKFIDNIRSFEKIANSPIADKLESIYNEYAKEGYMNVNNLNEMFEISFYNRVLTQTQIDLYNAIIGGKTEKDGRKTQGINEYINLYNQRGEVQKKDRLPLLKPLFKQILSDREHISWFEEGFVDDQAMLSAIKDFYLKLTETEPTTTESILDRTRSLLRNIADYDLTKIYLEYTSLSKISQQIFGEWDRIQRALEAEYDATHLQRKKTKTYEEQKEQYFQSLKSVSIGFIDECLNSFETEKQLSLSIKEYIAQVGKKNDDPDLIEHITASYKAVKAILTTEWPKERNVAQEKDIVALIKKLLDRIKDLQYFIKPLLGSGKESDKDNLFYGELASIWEVINTVTPLYDKVRNRMTRKPYSTEKIKVNFRNSHFLSYWPQDYETKGGILFEKEGLYYLAIIDKKLKAKDIERLHCTKSNAVRIIVDTQKPDNKNTPRLFIRSKGENYAPAIDEYKLPIHEIIDLYDRKLFKKPLKGASPEDTEIFKASLTKLIDYFKLGFSRHESYRHYKFNWKKSDEYNDIDEFYQDTIESCYQIIRQPIDWDVVEEYTKEGKIYLFQIYNKDFSSHSKGTPNMHTLYWKTLFDEQNLANVVYKLNGEAEIFFREASLERKVTHPANEPIKTKNPETSIREKTFAYDLIKDKRYTEDKFQLHVPITMNFKGLNVKNINSRVNNYIKTEEDLHFIGIDRGERNLLYVCVIDSKGNIKEQYSLNEIVTQYNRTDYKYLLEKREEEREKERRSWQTIENIKDLKQGYLSQVVHKIAQLMVQYHAIVVLEDLNSGFKRSRQKVEKSVYQQFEKSLIDKLNYLVDKQLPIDEEGGVLRAYQLTNKFESFKTMKMQNGFLFYIPAWNTSKMDPTTGFVNLFDTRYTNINKSKEFFEKFEAIRYNEEKDWFELEFDYKNFTAKAEGTQTQWTLCTWGERINTFRNKSKNSSWDYKTINLTEEYKALFEQFSINYRGNLKKEILEQTSKDFFERLLSLLRLTLQMRNSIPNTDTDYLISPVADANGCFYYSEQCGDNLPKNADANGAYNIARKGMWMAEQIRRSNEGDELNLAISNKEWLRFVQEKPYLEEK

SEQ ID NO: 48 - protein, 1253 aa, Unknown
  Description of Unknown: uncultivated organism sequence
  Category: MG13 effectors
  Description: MG13-14 effector
MNNLEQFTGLYPVSKTLRFELLPIGKTKENIEKNGILQRDEKRAEDYKLVKVFIDEYHKQFIKDRLWNFKLPILNEGNHDSLEEYQALYELSKRDDVQEAEFTEVKDNLRGIIAKRLTEKGSAYERIFKKELIREDLVDFLENEEDKNIVRQFEEFTTYFGGFHENRKNMYSAEEKSTAIAYRLIHQNLPKFMDNMKAFAKIAESSVSEHFEEIYEGWKEYLNVGSIEEIFRLDYFSETLTQPHIEVYNYIIGKKILDDGTEIKGINEYVNLYNQQQRDKSKRLPFLVPLYKQILSDREKLSWMAEEFDSDEKMLAAINESYNHLHDLLMGDENESLRSLLTHLKDFNLERINITNDLSITDISQHLFGRYDVFTNGIKGKLREITPRKRKESDEGFEERISKIFKTQKSFSISFLNKLPQPVMEDGKSRSIEEYFMSLGAINTVTTQKENLLAQIENTFENARDVLHMKDTGDALSQNKPAVAKIKAFLDTLKDLQHFIKPLLGSGDENDKDELFYGSFQMMWDELDTVTPLYNKVRNWLTRKPYSTEKIKLNFDNSQLLAGWDVNKEPDCTGILLCKGSFYYLGIMDKRSNRIFDSRITPSDGDCYDKIDYKLLPGANKMLPKVFFSKSRIDEFAPSESIVSNYKRGTHKKGTGFNLSDCHKLIDFFKESINKHDDWSKFNFHFSDTKTYDDISGFYREVEQQGYMLSTHPVSSAYINQMVNEGKLYLFRIWNKDFSEFSKGTPNLHTLYWKMLFDERNLANVVYKLNGQAEVFYRKASIKPENCIIHRANQPIINKNEFNKKQTSTFEYDIIKDRRYTVDKFQFHVPITINFKAMGQANINPIVQETIRKGGFSHIIGIDRGERHLLYLSLIDLKGNIVKQMTLNDIINEYKGQTYKTNYHDLLTKREGDRTDARRSWDTIETIKELKEGYLSQVIHIISKMMIEYNAIVVLEDLNTGFMRGRQKIERQVYEKFEKMLIEKLNCYIDKQANPQSIGGQLRPIQLTNKFDSFQKLGKQSGCLFYIPAWNTSKIDPVTGFVNLLDTRYETREKARLFFSKFQRISYNAEKGWFEFAFDYNDFTTKAESTRTQWTLCTYGERIRTFRNPLKNHQWDDERIILTDEFKHLFEKYDIDIRGNIKEAISAQSDAQFYRNLLGLIKLLLQMRNSITNSKEDYLISPVADDFGHFFDSREGISTLPIDADANGAYNIARKGLWIIRKVQETREGEKPSLTIKNKEWLQFAQNKPYLND

SEQ ID NO: 49 - protein, 1243 aa, Unknown
  Description of Unknown: uncultivated organism sequence
  Category: MG13 effectors
  Description: MG13-15 effector
MKQFTNLYPVSKTLRFELIPQGETRAHLNDLIAEDEQRAEDYKEVKKYIDRYHKWFIDDCLSKVPNSPLGEEMIRLLNKFIEANDEKDGEGPDKVQDDLRKLIVKALKSGVSLDKDPEQEERFKSLFSEELVKNILPNFVQTEEEKSKVAKFRDMTTYFVGFHKNRENMYSEEAQTTAISYRLIHENLPRFLDNIAVYEKIKPVLSDEIVSLEEQLHQNGYVEACCIDSLFSVDFYLRVLTQRGIEQYNAVIGKIVNDESDEIKGLNERINLYNQVHKKEKLPLFKPMYKQILSDREQLSWLPETFENDASLLDAVKGFHQDLLSNDILSRIDKLLSSLQDFNLDQIWIANDVQLRGLSKDLYGDWSLIDRALGIERSEDVVQGLTAAQKKAASAAKKRSSFSIVELNAAIRSRVPDEKYVPVQNYFSAMGKVCAQGEATRENFVTRICAAYQELEEYIPSIRKSLLQEKRATEFIKNYLDAVNDLLRFIKPLLGRGNETDKDANFYGEFAFLTDCLFAIVPLYNEVRNYLTQKPYSTEKFKLNFRGSTLLNGWDKNKEKDNLGVILRKEGKYFLAIMNKKHNTLFTEGKLQQHTGGECYEKMEYKLIPGSKMLPKVFFSQKGISTFQPSEELLLNYRIGTYKKGEKFNLEHLHKLIDFYKHSIAVHEDWSKFDFHFSDTSSYRDISGFYKEVEQQGYKLTFRNVSVSYINRLVEEGKLYLFQIYNKDFSEYSKGTPNLHTLYWKMLFDLENLKDVVYKLSGEAEVFFRKKSLDVSHPTHPQNEPIEKKNINNKGEKSLFSYDLIKDRRFTVDKFQFHVPITMNFKGEQGDRVNQMVQSYVRNHKGLNVIGIDRGERNLLYLAVINEHGEILEQFSLNEIRNAYNGKEHKIDYHTLLEERSKKRQDARQSWQTIEGIKDLKTGYLSQVIHVITQLMVKYNAIVVLEDLNFGFKSSRQKFEQSVYQQFERKLIDKLNFLVNKKVAPNEVGGLLNAYQLTAPLGNSRKMGKQNGFLFYVPAWHTSKIDPRTGFVNLLDTRYENVANSKEFFAKFASITYNPEKKWFEFAFDYKAFGNRADGSRTKWTICSYGERIETFRNPKNNNQWDTKTVPLTERLTELFSNYGIDYTTNLKEQILNQTDKAFFVELLGALRLTLQLRNSRKSTGEDFLFSPVADENGCFFDSRKANDNEPKDADANGAYHIALKGLWVLDTIRNTEEGKNPKLAITNKEWLSFAQAKPFAHE

SEQ ID NO: 50 - protein, 1262 aa, Unknown
  Description of Unknown: uncultivated organism sequence
  Category: MG13 effectors
  Description: MG13-16 effector
MRKFNEFVGLYPISKTLRFELKPIGKTLEHIQRNKLLEHDAVRADDYVKVKKIIDKYHKCLIDEALSGFTFETEADVRSNNSLSEYYLYYNLKKRNEQEQKTFKTIQNNLRKQIVNKLTQSEKYKRIDKKELITTDLPDFLTNESEKELVEKFKNFTTYFTEFHKNRKNMYSKEEKSTAIAFRLINENLPKFVDNIAAFEKVASSPLAEKINALYEDFKEYLNVEEISRVFRLDYYNELLTQKQIDLYNAIVGGRTEEDNRIQIKGLNQYINEYNQQQTDRSNRLPKLKPLYKQILSDRESVSWLPPKFDSDKDLLIKIKECYDALSEREKVFDKLESILKSLSTYDLSKIYISNDSQLSYISQKMFGRWDIIGKAIREDCAKRNPQKSRESLEKFAERIDKKLKAIDSISIGDVDECLAQLGETYVKRVEDYFAAMGELEIDDEQIDTTSFKKNIEEAYESVKELLNNADNITDNNLMQDKGNVEKIKNLLDAIKDLQRFIKPLLGKGDEADKDGVFYGEFTSLWTKLDQVTPLYNMVRNYLTSKPYSTKKIKLNFENSTLMDGWDLNKEPDNTTVIFCKDGLYYLGIMGKKYNRVFVDREDLPHDGECYDKMEYKLLPGANKMLPKVFFSETGIQRFRPSEELLGKYERGTHKKGAGFDLGDCRALIDFFKKSIERHDDWKKFDFKFSDTSTYQDISEFYREVEQQGYKMSFRKVSVDYIKSLVEEGKLYLFQIYNKDFSAHSKGTPNMHTLYWKMLFDEENLKDVVYKLNGEAEVFFRKSSITVQSPTHPANSPIKNKNKDNQKKESEFEYDLIKDRRYTVDKFLFHVPITMNFKSVGGSNINQLVKRHIRSATDLHIIGIDRGERHLLYLTVIDSRGNIKEQFSLNEIVNEYNGNTYRTDYHELLDTREGERTEARRNWQTIQNIRELKEGYLSQVIHKISELAIKYNAVIVLEDLNFGFMRSRQKVEKQVYQKFEKMLIDKLNYLVDKKKPVAETGGLLRAYQLTGEFESFKTLGKQSGILFYVPAWNTSKIDPVTGFVNLFDTHYENIEKAKGFFDKFKSIRYNSDKDWFEFVVDDYTRFSPKAEGTRRDWTICTRGKRIQICRNHQRNNEWEGREIDLTKAFKEHFEAYGVDISKDLREQISTQNKKEFFEELLRLLRLTLQMRNSMPSSDIDYLVSPVADDAGCFFDSRKQAELKENAVLPMNADANGAYNIARKGLLAIRKMKQEENDSAKISLAISNKEWLKFAQTKPYLED

SEQ ID NO: 51 - protein, 1262 aa, Unknown
  Description of Unknown: uncultivated organism sequence
  Category: MG13 effectors
  Description: MG13-17 effector
MRKFNEFVGLYPISKTLRFELKPIGKTLEHIQRNKLLEDDAVRADDYVKVKKIIDKYHKCLIDEALSGFTFDTEVDGRSNNSLSEYYLYYNLRKRNEQEQKTFKTIQNNLRKQIVNKLTQSEKYKRIDKKELITTDLPDFLTNESEKELVEKFKNFTTYFTEFHKNRKNMYSKEEKSTAIAFRLINENLPKFVDNIAAFEKVASSPLAEKINALYEDFKEYLNVEEISRVFRLDYYNELLTQKQIDLYNAIVGGRTEEDNRIQIKGLNQYINEYNQQQTDRSNRLPKLKPLYKQILSDRESVSWLPPKFDSDKELLTKIKECYDALSEKEKVFDKLESILKSLSTYDLSKIYISNDSQLSYISQKMFGRWDIIGKAIREDCAKRNPQKNRESLEKFAERIDKKLKAIDSISIGDVDECLAQLGEPYVKRVEDYFATMGASEIGEEQIGQEFFKKNIEEAYESVKELLNNADNITDNNLMQDKGNVEKIKNLLDAIKDLQRFIKPLLGKGDEADKDGVFYGEFTSLWTKLDTVTPLYNMVRNYLTSKPYSTKKIKLNFENSTLMDGWDLNKEPDNTTVIFRKDGLYYLGIMGKKYNRVFVDREDLPHDGECYDKMEYKLLPGANKMLPKVFFSETGIQRFRPSEELLGKYERGTHKKGAGFDLGDCRALIDFFKKSIERHDDWKKFDFKFSDTSTYQDISEFYREVEQQGYKMSFRKVSVDYIKSLVEEGKLYLFQIYNKDFSAHSKGTPNMHTLYWKMLFDEENLKDVVYKLNGEAEVFFRKSSITVQSPTHPANSPIKNKNKDNQKKESKFEYDLIKDRRYTVDKFLFHVPITMNFKSVGGSNINQLVKQHIRSATDLHIIGIDRGERHLLYLTVIDSRGNIKEQFSLNEIVNEYNGNTYRTDYHELLDTREGERTEARRNWQTIQNIRELKEGYLSQVIHKISELAIKYNAVIVLEDLNFGFMRSRQKVEKQVYQKFEKMLIDKLNYLVDKKKPVAETGGLLRAYQLTGELESFKTLGKQSGILFYVPAWNTSKIDPVTGFVNLFDTHYENIEKAKGFFDKFKSIRYNSNKDWFEFVVDDYTRFSPKAEGTRRDWTICTQGKRIQICRNHQRNNEWEGREIDLTKAFKEHFEAYGVDISKDLREQINTQNKKEFFEELLRLLRLTLQMRNSMPSSDIDYLISPVADDTGCFFDSRKQAELKENAVLPMNADANGAYNIARKGLLAIRKMKQEENDSAKISLAISNKEWLKFAQTKPYLED

SEQ ID NO: 52 - protein, 1239 aa, Unknown
  Description of Unknown: uncultivated organism sequence
  Category: MG13 effectors
  Description: MG13-18 effector
MDNIMKKLNDFTGLYSLNKTLRFELQPVGETADKIKEAGILKDDEYRANNYEAVKKIIDKYHRSFIERVLSGFTFICESSNKENSLEEFYNFYTSTIRDEKKFRTIRSNLRKQIVTAFNEDKDFALLFKKDFIKKVLMEFVETKEEQLLIKKFEKDTTFFKRFNDKRKNIYSADAKHTTIVYRLVHDNLPRFIDNISRFNKLVNCLGLDELQTLCADLKNSLGVRDISNLFELKYYNQVLTQGQIDVYNKIIGGVNKYVNLYNQSQKNRSACLPKLNFLFKQILSEKETISWLPEQFESDNALLASVRNAYQELYIKNKSDLVRLLSNLPEYDLDKIYIKNDDQLSRISKNMFGCSDTIQEALKKELRNTSRKKKDESRIEKEFQKRQSIPIGYINRCLSTEGTETKKIEEYFRECGVTHEDEKSLWNQVEDAYAKVCDLLESAYPQDKTLITDDINIENIKVLLDALKRIQLFVKPLLGNGDETEKDERFYGDFVAVCDTLNEITPLYNRVRNYLTRKPYSKDKIKLIFGESQLLNGWDLNKEQACKSVIFRKGELFYLGIMNKKYNKILEVKNEQSDGDCYEKMELKSFGESFRRIPKSSVAMNEVKTHFDKSEKDYVLDNKKNFLLPLYISKEIYDLGKGGVLDNLRKIEDLEIRRKKLNLWINFCIDFLEKYKSTSIYDVKNLKNKDYEDVNDFYNDVDHICYRITFRNVSVQYIDSLVSDGKLYLFKIHNKDFEPSSKGTPNMHTLYWRMLFDERNLSDVVYQLNGGAEVFFRKASLERRITHPANRPINNKNKNNSKRQSIFKYDLIKDKRYTIDKYLFHVPITLNFNSLNDSDLNTSVQEYIRKSNDLHIIGIDRGERNLVYISVIDLYGNIKAQYSLNEIKNSYLSYSTDYHDLLLNRERERQEARSGWKAIKNIKDLKEGYLSQVVHVIAELMLEYNAIVVLEKLNKGFYRGRQKVEMSVYAKFEKMLIDKLSYYVNKKKDPEDVGGLLNALQLTNKDMDEKSSQNGFLFYVRPQYTSKIDPVTGFVDLFKVQYENKEKAKQFFESFDFIRYNKEKDWFEFSFDYEHFPTKGKSARTSWTVCTHGSRIRSTKSITKNGHWSSEEIILTEEFKRHFEHYGIDWNFDLKDAILAQEDSSFFKDLLSLFKLTLQLRNSRSDVDYIVSPVINENGDRCYDEFLPKDGDANGAYNIARKGLYLVRKIKESNSLDCLSIEDKEWFDFAQKRPYLKI

SEQ ID NO: 53 - protein, 1243 aa, Unknown
  Description of Unknown: uncultivated organism sequence
  Category: MG13 effectors
  Description: MG13-19 effector
MKTFNDLTGLYSLSKTLRFELKPVGKTKDNIETKGIIAQDEKRAEEYKKVKDIIDRYHKSFIDMCLAGLVLKTTSDGNNDSLKDYVALASKSNRDEKEDKDFDDVKTALRKQIVDAFKKGGSYSDLFKKELIQVHLPDFVTDEQEKQMVENFGKFTTYFTGFNENRQNMYSDEEKSTSIAYRLIHENLPMFIDNIKSFAKIAEHEDIDFLPDIENGFKEELKRLKVQSISEVFDLANFTNTLTQSQIDSYNAIIGARYDENGDKVQGINEYVNLYNQQHKDARLPLLKPLYKMILSDRVALSWLPEEFATDEEMLAAINETHGNLKNVMTDVRKLLQNIDSYDTEHIYIANDKGLTDISQQIFGQYDVYTSAIKAELRDSITPSAKERKDPELLEKRINDIFKASKSFSIEYLNSHVDSDKTIQSYYKELGAYDRNGEQRINLLSQIELAYVDAHDVLLGKHTNLNQSEDSIKKIKALLDAYKALQHFIKPLLGNGDEADKDNEFDAKLRAIWDELDIVTPLYDKVRNRLTRKPYSTEKIKLNFDNAQLLNGWDMNKEPDCTSVLLRKDGQYYLAIMDKKSNHAFDIDELPCDGECYDKMDYKLLPGANKMLPKVFFSKSRIKEFAPSKEICDAYQKGTHKKGANFSIKDCRRLIDFFKDSIAKHEDWSKFPFTFSDTSTYEDISGFYREVEQQGYMLGYRKVSVSFINQLVDEGKLYLFQIWNKDFSEYSKGTPNMHTLYWKMLFDERNLANVVYKLNGQAEVFYRKRSLDLNKTTIHRANQPIANKNMQNEKRESTFSYDIVKNRRYTVDKFQFHVPITINFKATGSDNINASVLDVIRNNGIEHIIGIDRGERHLLYLSLIDMKGNIVKQMTLNDIINEYKGNTYTTNYKELLQAREGDRKEARQNWQKIENIKELKEGYLSQVVHVITKMMVEYKAIVVLEDLNGGFMRGRQKIERQVYEKFEKMLIDKLNYYVDKQKDANENGGLLHAYQLASKFDTFKKLGKQSGCLFYIPAWNTSKIDPVTGFVNMLDTRYENADKARKFFSKFKSISYNADKNWFEFVIDDYSKFTDKAKDTRTDWVLCTYGTRIKTFRNPEKLNQWDNKEIVLTDEFKKVFMEAGIDINGNLKEAICTLTEKKHLESLMQLMKLLVQMRNSETNSEVDYLLSPVADTEGHFYDSRNCDDNLPKDADANGAYNIARKGLWAVMKIKASKPQENLKLGISNKEWLQFAQEKPYLND

SEQ ID NO: 54 - protein, 1238 aa, Unknown
  Description of Unknown: uncultivated organism sequence
  Category: MG13 effectors
  Description: MG13-20 effector
MNTYEELTGLYSLIKTINFALNPIGETLRHIEEKGFIAQDEQRAEDYKKVKDIIDRYHKYFITMCLDGFKFSTDKLMKYVALAENAKRDEDAFDEVKTQLRKEIVAAFEKGETYKDLFKKELILKHLPNFVTDENEKRLVASFNKFTTYFKKFHKCRKNMYSDEAKSTAIAHRLIHENLPMFYDNMKSFKKIAACEDCIDLAEFEAAFSEEFKAFKVEHLADIFQLEYFNNTLTQRKIDFYKLVVGGKVLEDGTKLKGVNEYVNLYNQQHKDARLPLLKPLYKMILSDKVALSWLPEEFKSDEEMVEAIQEMHKNLKGALTDNAENNLRDLLLNMGKYDLAHIYIANDLGLRDISQNIFGQYDVYTSALKQALRNEYAPTTDECQNLELYDERINKLFKSRTSFSIAELNSLADCDHTIENHFKQLGAAERNGKQEIDLFSQIETAYAKASDILSGKHGNIGQSEAETALVKNLLDAYKSLQHFIKPLLGHGDEAEKDNEFDAKLRAAWDALDIINPLYNKVRNWLTRKPYSTEKIKLNFENAQLLDGWDKNKETVNTSVLLRKDGMYYLAIMNKKANDAFACDELPSDGDCYEKIDYKQISNARMDLPRVLLPPKNIDKYAPSEEIKDIYSKRTYRKGKNFNLEHCRRLIDFFKRSITKHKDWKNFQFIFSPTEKYECISSFYNEVEQQAYMLDFRKVSVAYINQLVESGNLYLFQIWNKDFSKFSKGTPNMHTLYWKQLFDERNLADVVYKLNWQAEVFYRKRSLKLEETTVHHAHQPIPNKNKQNEKRQSQFNYDIVKNRRFTVDKFQFHVSITLNFKATGGGDINDKVLEIIRNNGIKHVIGIDRGERHLLYLSLIDLKGNIIKQMTLNDIVNEYRGHTYTTNYKDLLAEREDNRTEARRNWKRIDNIKEIKQGYLAQVVHIISKMMVEYKAIVILEDLNMGFMRRWQKIERSVYEQFEKSLIEKLNYYVDKQKDENEVGGLLHAFQLTSKFKSFKELGKQSGCLFYVPAWNTSKIDPVTGFVNLFDTKNVKGEKVRAFFSNFDAIRYNAERDWFEFAFNYSNFTNKARDTREEWTLCTHGTSIRTFRNPSKINHRDSEEVVLTDEFKKVFEKAGIDICGNLKNAICALKEKAHLEKLMQLMKLLLQMRNSKPNTEVDYMISPVADEQGNFYDSRCGNSALPDNADANGAYNIARKGLWVIKQIRETPAGKRPDWAIKNKEWLKFAQQKPYLDD

SEQ ID NO: 55 - protein, 1262 aa, Unknown
  Description of Unknown: uncultivated organism sequence
  Category: MG13 effectors
  Description: MG13-21 effector
MRKFDEFVGLYPISKTLRFELKPIGKTLEYIQRNKLLEHDAVRADDYVKVKKIIDKYHKCLIDEALSGFTFDTEADGRSNNSLSEYYLYYNLRKRNEQEQKTFKTIQNNLRKQIVNKLTQSEKYKRIDKKELITTDLPDFLTNESEKELVEKFKNFTTYFTEFHKNRKNMYSKEEKSTAIAFRLINENLPKFVDNIAAFEKVASSPLAEKINALYEDFKEYLNVEEISRVFRLDYYNELLTQKQIDLYNAIVGGRTEEDNRIQIKGLNQYINEYNQQQTDRSNRLPKLKPLYKQILSDRESVSWLPPKFDSDKDLLIKIKECYDALSEKEKVFDKLESILKSLSTYDLSKIYISNDSQLSYISQKMFGRWDIIGKAIREDCAKRNPQKNRESLEKFAERIDKKLKAIDSISIGDVNECLAQLGEPYVKRVEDYFAAMGASEIGEEQIGQEFFKKNIEEAYESVKELLNNADNITDNNLMQDKGNVEKIKTLLDAIKDLQRFIKPLLGKGDEADKDGVFYGEFTSLWTKLDQVTPLYNMVRNYLTSKPYSTKKIKLNFENSTLMDGWDLNKEPDNTTVIFCKDGLYYLGIMGKKYNRVFVDREDLPHDGECYDKMEYKLLPGANKMLPKVFFSETGIQRFRPSEELLGKYERGTHKKGAGFDLGDCRALIDFFKKSIERHDDWKKFDFKFSDTSTYQDISEFYREVEQQGYKMSFRKVSVDYIKSLVEEGKLYLFQIYNKDFSAHSKGTPNMHTLYWKMLFDEENLKDVVYKLNGEAEVFFRKSSITVQSPTHPANSPIKNKNKDNQKKESKFKYDLIKDRRYTVDKFLFHVPITMNFKSVGGSNINQLVKRHIRSATDLHIIGIDRGERHLLYLTVIDSRGNIKEQFSLNEIVNEYNGNTYRTDYHELLDTREGERTEARRNWQTIQNIRELKEGYLSQVIHKISELAIKYNAVIVLEDLNFGFMRSRQKVEKQVYQKFEKMLIDKLNYLVDKKKPVAETGGLLRAYQLTGEFESFKTLGKQSGILFYVPAWNTSKIDPVTGFVNLFDTHYENIEKAKGFFDKFKSIRYNSDKDWFEFVVDDYTRFSPKAEGTRRDWTICTQGKRIQIYRNPQRNNEWEGREIDLTKAFKEHFEAYGVDISKDLREQINTQNKKEFFEELLRLLRLTLQMRNSMPSSDIDYLISPVADDTGCFFDSRKQAELKENAVLPMNADANGAYNIARKGLLAIRKMKQEENDSAKISLAISNKEWLKFAQTKPYLED

SEQ ID NO: 56 - protein, 1275 aa, Unknown
  Description of Unknown: uncultivated organism sequence
  Category: MG13 effectors
  Description: MG13-22 effector
MNNLNDLTGQYPVSKTIRFDLQPIGKTKENIEKGGILQQDEQRAEDYKTVKGFIDEYHKQFIKDRLWNFRLPLISEGHLDSLEEYQTLYLLAKRNDAQEAEFKEVKDNLRSIIARRLTEKGSAFERIFKKELIREDLIDFVEKPEDKDLVKSFADFTTYFTEFHKNRANMYTAEEKSTAIAYRLIHQNLPKFMDNIKAFAKIAQTSVAGHFVEIYNGSKEYLNVGSLEEVFQLDYFSDTMTQPHIEVYNSIIGKRVLEDGTEIKGINEYVNLYNQQQKDKRQRLPLLVPLYKQILSDREKLSWLAQEFDSDKKMLAAINETFIHLREILMGEDSESLRSILTHLKDFDLTQINITNDLSLTDISQHLFKRFDVFSNGIKAKIRSITPKKKKESDEELEDRVSKIFKTQKSFSIAFLDNLPQPEMEDGKRRSVADYFTALGAVNNEVTQKENLFAQIEIAYEDARDVLQMTETGDTLSQDKPAVAKIKALLDALKDLQHFIKPLRGSGEENEKDELFYGSFLMMWDELDTVTPLYNKVRNWLTRKPYSTEKIKLNFDSPTLLNGWPNPQTNSGAIFRDEEGLYYLAILDAQNRACLNELSSNVNGNEDHIEMMKYLQGGDMGKNVQNLMVIDGEVRKVNGRKETSGEFAGQNLRLENAKHQYLPKNINEIRLKQSYLTSSPTFNKKDLVSFIEYYIPLVEAYYSDYVFHFRKSSEYKSFADFTEHINQQAYQVQFKPVSKTSLYSLVEEGKLYLFRIWNKDFSEFSKGTPNLHTLYWKMLFDERNLADVVYKLNGQAEVFYRKASIKPENKIVHPANRAIANKNELNKKRTSSFDYDIIKDRRYTVDKFQFHVPITINFKATGQTNVNPIVQDTIRRGGFTHIIGIDRGERHLLYVSLIDLKGNIVKQMTLNEILNEYKGLTHKTNYHDLLAKREGERTDARRSWDTIENIKELKEGYLSQVVHIISKMMVEYNAIVVLEDLNPGFMRGRQKIERQVYEKFEKMLIEKLNCYIDKKAEPIEIGGLLHPLQLSCDIKKWKKSHQCGCLFYIPAWNTSKIDPVTGFVNLFDTHYETREKARSFFSKFQRIHFNSEKNWFKFTFDYGNFTTKAEGTRTQWTLCSYGTRIRNFRNPLKNHQWDDEEVELVDEFKHLFDKYSIDIFGNLKESICNQTDAQFYKELMGLMKLLLQMRNSRTNSEVDYLLSPVADEQGHFFDSREGIGSLPDNADANGAFNIARKGLWIIRKVQGTPSDEKMSLAISNKEWLQFAQNRPYLND

SEQ ID NO: 57 - protein, 1263 aa, Unknown
  Description of Unknown: uncultivated organism sequence
  Category: MG13 effectors
  Description: MG13-23 effector
MRDFNEFVGLYPISKTLRFELKPIGKTLEHIQRNELLEDDAVRADDYVKVKKIIDKYHKCLIDEALSGFTFDTEADGRSNNSLSEYYLYYNLKKRNEQEQKTFKTIQNNLRKQIVNKLTQSEKYKRIDKKELITTDLPDFLTNESEKKLVEKFKNFTTYFTEFHKNRKNMYSKEEKSTAIAFRLINENLPKFVDNIAAFEKVASSPLAEKINALYEDFKEYLNVEEISRVFRLDYYNELLTQKQIDLYNAIVGGRTEEDNRIQIKGLNQYINEYNQQQTDRSNRLPKLKPLYKQILSDRESVSWLPPKFDSDKDLLIKIKECYDALSEREKVFDKLESILKSLSTYDLSKIYISNDSQLSYISQKMFGRWDIIIGKAIREDCAKRNPQKSRESLEKFAERIDKKLKAIDSISIGDVDECLAQLGETYVKRVEDYFAAMGESEIDDEQTDTTSFKKNIEGAYESVKELLNNADNITDNNLMQDKGNVEKIKTLLDAIKDLQRFIKPLLGKGDEADKDGVFYGEFTSLWTKLDQVTPLYNMVRNYLTSKPYSTKKIKLNFENSSLMKGWDLNKEPDNTTVIFRKDGLYYLGIMGKKYNRVFVDREDLPHDGECYDKMEYKLLPGANKMLPKVFFSETGIQRFRPSEELLGKYERGTHKKGAGFDLGDCRALIDFFKKSIERHDDWKKFDFKFSDTSTYQDISEFYREVEQQGYKMSFRKVSVDYIKSLVEEGKLYLFQIYNKDFSAHSKGTPNMHTLYWKMLFDEENLKDVVYKLNGEAEVFFRKSSITVQSPTHPANSPIKNKNKDNQKKESEFKYDLIKDRRYTVDKFLFHVPITMNFKSVGVSNINQLVKRHIRSATDLHIIGIDRGERHLLYLTVIDSRGNIKEQFSLNEIVNEYNGNTYRTDYHELLDTREGERTEARRNWQTIQNIRELKEGYLSQVIHKISELAIKYNAVIVLEDLNFGFMRSRQKVEKQVYQKFEKMLIDKLNYLVDKKKPVAETGGLLRAYQLTGELESFKTLGKQSGILFYVPAWNTSKIDPVTGFVNLFDTHCENIEKAKGFFDKFKSIRYNSDKDWFEFVVDDYTRFSPKAEGTRRDWTICTQGKRIQIYRNPQRNNEWEGREIDLTKAFKEHFEAYGVDISKDLREQINTQNKKEFFEELLRLLRLTLQMRNSMPSSDIDYLISPVADDTGCFFDSRKQAELKENAVLPMNADANGAYNIARKGLLAIRKMKQEENDSAKISLAISNKEWLKFAQTKPYLED

SEQ ID NO: 58 - protein, 1250 aa, Unknown
  Description of Unknown: uncultivated organism sequence
  Category: MG13 effectors
  Description: MG13-24 effector
MEQLTNLYPVSKTLRFELQPIGKTRENIEKRGILQQDEERAENYKLVKGFIDEYHKQYIKSRLWNFELPLDDEGRHNSLAEYRALYELPKRDAEQETAFTEVKDNLRAIIARRLTEKGSAYDRIFKKELIREDLIEFLEDENDKEIVRQFADFTTYFTGFHENRANMYSSEEQSTAIAYRLIHQNLPKFMDNMKSFTKIAETSVAEHFADIYAGWEEYLNVGSINDMFRLDYFSQTLTQEHIEVYNYIIGKRILDDGTEIKGINEYVNLYNQQQKDKKQRLPLLVPLYKQILSDREKLSWLSEEFDSDIKMQQAIKETYDHLYDLLMGDENESLKSLLMHLGDFDLSQINITNDLSLTDISQHLFGKYDVFTNGIKDKLRIITPRKKKETDEDFEERITKLFKTQKSFSIAELNSLPHPIIEGSQPKNIEDYYMALGAVNTETVQKENLFAQIENAYTDVLPILQLTDTGDKLSQNKAEVAKIKKLLDAFKDLQHFVKPLLGSGEEVEKDERFYGAFQTIWDELDTEIPLYNKVRNWLTRKPYSTEKIKLNFDNAQLLGGWDVNKEPDCTGVLLRKDGFYYLGIMNKKNNRIFEKDMTPSDGDCYDKIDYKLLPGANKMLPKVFFSKSRIDEFAPSASLVEKYKAGTHKKGANFSLKDCHKLIDFFKQSIAKHEDWSKFGFHFSDTNTYEDISGFYREVEHQGYSLSSHNVSVDYIHRMVDEGKLFLFRLWNKDFSEYSKGTPNLHTLYWKMLFDERNLNDVFYKLNGQAEVFYRKASIKEENRIIHPAKKDINNKNALTDKQTSRFDYDIIKDRRFTVDKFQFHVPITINFKAIGQTNINPVVHDIIRQGGIKHIIGIDRGERHLLYLSLIDLQGRIVKQMTLNEIINEYSGHKYKTNYHDLLAKREGERTDARRSWDTIENIKELKEGYLSQVVHVITRMMVKYKAIVVLEDLNMGFMRGRQKIERQVYEKFEHMLIDKLNCYIDKQEDPSKPGGMLHALQLSNKFESFARLGKQSGCLFYIPAWNTSKIDPVTGFVNLLDTHYDTMKAAKSFFSKFECIRYNGENDWFEFTFDYDEFNKKAEGTKTRWTLCTYGTRIRNFRNPQKNNQWDDEEVVLTDMFKKLFDVYGIDYRGNLKEAIQQPTEAKFYQELMLLMKSLLQMRNSKINSEVDYLLSPVADENGHFFDSRQGDATLPDNADANGAYNIARKGLWAIRKIQESPKDEKVSLAISNKEWLTFAQTKPYLDK

SEQ ID NO: 59 - protein, 1252 aa, Unknown
  Description of Unknown: uncultivated organism sequence
  Category: MG13 effectors
  Description: MG13-25 effector
MKNLKQFTNLYPVSKTLRFELQPIGKTKENIEKNGILTRDEKRAKDYQVVKGFIDEYHKQFIKDRLWDFKLPLISEGNLDSLEEYQMLYEMARRDDAQEAEFSEIKDNLRAIIAKRLTENGSAYDRIFKKELIREDLVDFLDNEEDKALVRQFADFTTYFSGFHENRRNMYSAEEKSTAIAYRLIHQNLPKFMDNMKAFTKIAETSVAEHFINIYKGWEEYLNVGSIEEIFRLDYFSETLTQPHIEVYNYIIGKKVLEDGTEIKGINEYVNLYNQQQKDKSKRLPFLVPLYKQILSDREKLSWMAEEFDSDEKMLAAINESYTHLHELLMGNENESLRSLLLHLREYDLSQINITNDLSLTDISQHLFGRYDVYTNAIKEQLKIITPRKKKETDEDFEDRISKIFKTQKSFSISFLNNLPHPETEDGKPRSVEEYFISTGAINTETTQKENLFAQIENAYENVRVILKMKDTDDALSQNKPAVTKIKALLDAFKDLQHFIKPLLGSGEELEKDELFYGSFQMIWDELDNVTPLYNKVRNWLTRKPYSTEKIKLNFDNSQLLGGWDVNKEPDCTGILLRKDGFYYLGIMDKKSNRVFEADVTPSDGDCYEKIDYKLLPGANKMLPKVFFSKSRIDEFAPSKSIVSSYKRGTHKKGKDFNLSDCHRLIDFFKRSINKHEDWCKFGFHFSDTHTYDDISGFYREVEDQGYMLSSHSVSSSYINQLVDEGKLYLFRIWNKDFSEYSKGTPNLHTLYWKMLFDERNLSNVVYKLNGQAEVFYRKASIQPENRIIHKAKQSIANKNELNKKRTSTFEYDIIKDRRYTVDKFQFHVPITINFKGTGQFNINPIVQETIRQGDFTHIIGIDRGERHLLYLSLIDLNGNIVKQMTLNDIINEYKGQTYKTNYHDLLVKREGDRTNARRSWDTIETIKELKEGYLSQVVHVISKMMVEYKAIVVLEDLNSGFMRGRQKIERQVYEKFEKMLIEKLNCYIDKQADATEVTGLLHPLQLTCEAKKWKRSHQCGCIFYIPAWNTSKIDPVTGFVNLLDTRYDTREKARLFFSKFQRISFNTEKGWFEFTFDYNDFTTKADGTRTQWTLCTYGERIRTFRNSQKNNQWDNERIILTDEFKKLFDEKEIDISGNIKEAICNQADAQFYRDLLGLMKLLLQMRNSITNSEEDYLLSPVADENGHFFDSRESISNLPIDADANGAYNIARKGLWIVRKIRDNPEDEKLSLTITNKEWLLFAQNKSYLND

SEQ ID NO: 60 - protein, 1249 aa, Unknown
  Description of Unknown: uncultivated organism sequence
  Category: MG13 effectors
  Description: MG13-26 effector
MKQFTNLYPVSKTLRFELQPIGKTKENIEKKGILTRDEKRAKDYQIVKGFIDEYHKQFIKDRLWNFKLPLASEGNLDSLEEYQMFYEMPRRDDAQETDFSEVKDNLRVIIANRLRESGSAYDRIFKKELIREDLVEFLSDEEDKNIVRQFADFTTYFSGFHENRRNMYSAEEKSTAIAYRLIHQNLPKFMDNMKAFTKIAKTSVAEHFADIYAGWKEYLNVGSIEEVFRLDYFSETLTQPHIEVYNYIIGKKVLEDGKEIKGINEYINLYNQQQKDKSKRLPFLVPLYKQILSDREKLSWLAEEFDSDEKMLAAIDKLYTHLHELLMGEENESLRSLLMHMKDYDLSQINITNDLSLTDISQHLFNRYDVYTNGVKEQLKGITPRKKKENDEDFEDRISKIFKTQKSFSISLLNGLPHPEIEDSQPRRIEEYFMAMGAVNTATIQRENLFSKIESAYEDARAILQMKDTGDSLSQNKPAVAKIKALLDAFKDLQHFIKPLLGSGEELEKDELFYGSFQMIWDELDTVTPLYNKVRNWLTRKPYSTEKIKLNFDNSQLLGGWDVNKEPDCTGVLLRKDGFFYLGIMDKRYNHIFEADLPHSDDDCYDKVDYKLLPGANKMLPKVFFSKSRIDEFAPSAAIVSSYKRGTHKKGKNFDLSDCHRLIDFFKQSIQKHADWCKFGFHFSDTQTYEDISGFYREVEEQGYMLSSHQVPSSYINELVDGGKLYLFRIWNKDFSENSKGTPNLHTLYWKMLFDKRNLSDVVYKLNGQAEVFFRKASIKPENRVVHKANQSITNKNALNKKTTSTFEYDIIKDRRYTVDKFQFHVPITINFKASGQTNINPIVQETIRQGGFKHIIGLDRGERHLLYLSLIDLNGNIVKQMTLNDIVNEYNGQTYKTNYHDLLTKREGERTDARRSWDTIETIKELKEGYLSQVIHIISKMMVEYKAIVVLEDLNTGFMRGRQKIERQVYEKFEKMLIEKLNCYIDKKADATDATGLLHPLQLTCDAKKWNRSHQCGCLFYIPAWNTSKIDPVTGFVNLLDTRYETREKAHLFFSKFQRISFNQKKGWFEFAFDYADFTTKAEGTRTQWTLCTYGERIRTFRNPQKNNQWDNERIVLTDEFKRIFDEKGIDIFGNLKDAICNQRDAKFFKDLLGLMKLLLQMRNSITNSEEDYLLSPVADEKGHFFDSREGISSLPIDADANGAYNIARKGLWVIRKIQETPENERPSLSITNKEWLQFAQTKPYLKE

SEQ ID NO: 61 - protein, 1238 aa, Unknown
  Description of Unknown: uncultivated organism sequence
  Category: MG13 effectors
  Description: MG13-27 effector
MNTYEELTGSYPLIKTINLALNPIGETLRHIEEKGFIAQDEQRAEDYEKVKDIIDRYHKYFITMCLDEFKFSTDKLMKYVALAEDSKRDEDAFDEVKTQLRKEIVAAFEKGETYNDLFKKKLILKHLPNFVTDENEKRLVASFNKFTTYFKKFHKCRKNMYSDEAKSTAIAHRLIHENLPMFYDNMKSFKKIAACEDCIDFAEFEAAFSEEFKEFKVEHLADIFQLEYFNNTLTQRKIDFYKLVIGGKVLEDGTKLKGVNEYVNLYNQQHKDARLPLLKPLYKMILSDKVALSWLPEKFESDEEMVEAIQEMHKNLKGTLIDNAENNLRDLLLNMGKYDLAHIYIANDLGLRDISQSIFGQYDVYTSALKQALRNEYAPTTDECQNLELYDERINKLFKSRTSFSIAELNSLADCDHTIENHFKQLGAAERNGKQEIDLFSQIETAYAKASDILSGKHGNIGQSEVETALVKNLLDAYKSLQHFIKPLLGHGDEAEKDNEFDAKLRAAWDALDIINPLYNKVRNWLTRKPYSTEKIKLNFENAQLLDGWDKNNETVNTSVLLRKDGMYYLAIMNKKANDAFACDELPSDGDCYEKIDYKQISKAKMNLPHGFFPQKNIDKYAPSEEIKDIYSKRTYRKGKNFNLEHCRRLIDFFKRSFTKHKDWKNFQFIFSPTEKYECISSFYNEVEQQAYMLDFRKVSVAYINQLVESGKLYLFQIWNKDFSKFSKGTPNMHTLYWKQLYDERNLADVVYKLNGQAEVFYRKRSLKLEETTVHQAHQPIPNKNKQNEKRQSQFNYDIVKNRRFTVDKFLFHVPIVLNFKATGGGDINDKVLEIIRNNGIKHVIGIDRGERHLLYLSLIDLKGNIIKQMTLNDIVNEYRGHTYATNYKDLLAEREDNRTEARRNWKRIDNIKEIKQGYLAQVVHIISKMIVEYKAIVILEDLNMGFMRGRQKIERSVYEQFEKSLIEKLNYYVDKQKDEKEVGGLLHALQLTSKFKSFKELGKQSGCLFYVPAWNTSKIDPVTGFVNLFDTRYVNVEKARAFFSNFDAIRYNAEKDWFEFAFNYSNFTDKAKDTREEWTLCTHGTSIRMFRNPSKLDHWDGEEVVLTDEFKKVFEKAGIDICGNLKNAICALKEKAHLEKLMQLMKLLLQMRNSKPNTEVDYMISPVADEQGNFYDSRCGNSALPDNADANGAYNIARKGLWVIKQIRETPAGKRPDWAIKNKEWLKFAQQKPYLDD

SEQ ID NO: 62 - protein, 1249 aa, Unknown
  Description of Unknown: uncultivated organism sequence
  Category: MG13 effectors
  Description: MG13-28 effector
MKQFTNLYPVSKTLRFELQPIGKTKENIEKKGILTRDEKRAKDYQIVKGFIDEYHKQFIKDRLWNFKLPLASEGNLDSLEEYQMFYEMPRRDDAQETDFSEVKDNLRAIIANRLRESGSAYDRIFKKELIREDLVEFLSDEDDKNIVRQFADFTTYFSGFHENRRNMYSAEEKSTAIAYRLIHQNLPKFMDNMKAFTKIAKTSVAEHFADIYAGWKEYLNVGSIEEVFRLDYFSETLTQPHIEVYNYIIGKKVLEDGKEIKGINEYINLYNQQQKDKSKRLPFLVPLYKQILSDREKLSWLAEEFDSDEKMLAAIDKLYTHLHELLMGEENESLRSLLMHMKDYDLSQINITNDLSLTDISQHLFNRYDVYTNGVKEQLKGITPRKKKENDEDFEDRISKIFKTQKSFSISLLNGLPHPEIEDSQPRRIEEYFMAMGAVNTATTQRENLFSKIESAYEDARAFLQMKDTGDSLSQNKPAVAKIKALLDAFKDLQHFIKPLLGSGEELEKDELFYGSFQMIWDELDTVTPLYNKVRNWLTRKPYSTEKIKLNFDNSQLLGGWDVNKEPDCTGVLLRKDGFFYLGIMDKRYNHIFEVDLPHSDDDCYDKVDYKLLPGANKMLPKVFFSKSRIDEFAPSAAIVSSYKRGTHKKGKNFDLSDCHRLIDFFKQSIQKHADWCKFGFHFSDTQTYEDISGFYREVEKQGYMLSSHQVPSSYINELVDGGKLYLFRIWNKDFSENSKGTPNLHTLYWKMLFDKRNLSDVVYKLNGQAEVFFRKASIKPENRVVHKANQSITNKNALNKKTTSTFEYDIIKDRRYTVDKFQFHVPITINFKASGQTNINPIVQETIRQGGFKHIIGLDRGERHLLYLSLIDLNGNIVKQMTLNDIVNEYNGQTYKTNYHDLLTKREGERTDARRSWDTIETIKELKEGYLSQVIHIISKMMVEYKAIVVLEDLNTGFMRGRQKIERQVYEKFEKMLIEKLNCYIDKKADATDATGLLHPLQLTCDAKKWNRSHQCGCLFYIPAWNTSKIDPVTGFVNLLDTRYETREKAHLFFSKFQRISFNQKKGWFEFAFDYADFTTKAEGTRTQWTLCTYGERIRTFRNPQKNNQWDNERIVLTDEFKRIFDEKGIDIFGNLKDAICNQRDAKFFKDLLGLMKLLLQMRNSITNSEEDYLLSPVADEKGHFFDSREGISSLPIDADANGAYNIARKGLWVIRKIQETPENERPSLSITNKEWLQFAQTKPYLKE

SEQ ID NO: 63 - protein, 1262 aa, Unknown
  Description of Unknown: uncultivated organism sequence
  Category: MG13 effectors
  Description: MG13-29 effector
MRDFNEFVGLYPISKTLRFELKPIGKTLEHIQRNKLLEDDAVRADDYVKVKKIIDKYHKCLIDEALSGFTFETEADVRSNNSLSEYYLYYNLKKRNEQEQKTFKTIQNNLRKQIVNKLTQSEKYKRIDKKELITTDLPDFLTNESEKELVEKFKNFTTYFTEFHKNRKNMYSKEEKSTAIAFRLINENLPKFVHNIAAFEKVASSPLAEKINALYEDFKEYLNVEEISRVFRLDYYNELLTQKQIDLYNAIVGGRTEEDNRIQIKGLNQYINEYNQQQTDRSNRLPKLKPLYKQILSDRESVSWLPPKFDSDKDLLIKIKECYDTLSEREKVFDKLESILKSLSTYDLSKIYISNDSQLSYISQKMFGRWDIIGKAIREDCAKRNPQKSRESLEKFAERIDKKLKAIDSISIGDVDECLAQLGETYVKRVEDYFAAMGASDMGEKQTDTTSFKKNIEGAYESVKELLNNADNITDNNLMQDKGNVVKIKNLLDAIKDLQRFIKPLLGKGDEADKDGVFYGEFTSLWTKLDAVTPLYNMVRNYLTSKPYSTKKIKLNFENSTLMDGWDLNKEPDNTTVIFRKDGLYYLGIMGKKYNRVFVDREDLPHDGECYDKMEYKLLPGANKMLPKVFFSETGIQRFRPSEELLGKYERGTHKKGAGFDLGDCRALIDFFKKSIERHDDWKKFDFKFSDTSTYQDISEFYREVEQQGYKMSFRKVSVAYIKSLVEEGKLYLFQIYNKDFSAHSKGTPNMHTLYWKMLFDEENLKDVVYKLNGEAEVFFRKSSITVQSPTHPANSPIKNKNKDNQKKESEFKYDLIKDRRYTVDKFLFHVPITMNFKSVGVSNINQLVKRHIRSATDLHIIGIDRGERHLLYLTVIDSRGNIKEQFSLNEIVNEYNGNTYRTDYHELLDTREGERTEARRNWQTIQNIRELKEGYLSQVIHKISELAIKYNAVIVLEDLNFGFMRSRQKVEKQVYQKFEKMLIDKLNYLVDKKKPVAETGGLLRAYQLTGEFESFKTLGKQSGILFYVPAWNTSKIDPVTGFVNLFDTHYENIEKAKGFFDKFKSIRYNSDKDWFEFVVDDYTRFSPKAEGTRRDWTICTQGKRIQICRNPQRNNEWEGREIDLTKAFKEHFEAYGVDISKDLREQINTQNKKEFFEELLRLLRLTLQMRNSMPSSDIDYLISPVADDTGCFFDSRKQAELKENAVLPMNADANGAYNIARKGLLAIRKMKQEENDSAKISLAISNKEWLKFAQTKPYLED

SEQ ID NO: 64 - protein, 1232 aa, Unknown
  Description of Unknown: uncultivated organism sequence
  Category: MG13 effectors
  Description: MG13-30 effector
MQQFTNLYPVSKTLRFELIPDERTRAMLEHSDLIAQDEHRAASYKLVKKIIDRYHMAYIDSVLEALILPSGYLKGMCDLYLKSQKSDADKKALEQLQDKLRKMIAGALTKDNRFKRIDKKELIREDIMSVITPEERALIDEFRDFTTYFTGFHKNRQNMYSAEAQSTAIAYRLIHENLPKFIDNMATFARIAASPVAEKFPQLYQEMSEYLNVREIGDLFKLDYYTELLTQRQIDVYNAVIGGRTQDDGDKKIQGINEYVNLYNQQQATKETRIPKLKPLFKQILSDREAVSWLPEEFASDKDMLEAVRDCCNSLNSHVFGMLRELLTNLSGYRLDGIYIPNDLSISDISQAMFKDWAVIKKGIVEDLKRNYPPKRSEKADNYEERIRKLIKRENSFSIGYLNSCINKDICDYFASLGAIDDGENQAVNLFMRIQNAYTEVQSLLENGYPEDCNLAQDKDNVAKLKTLLDAIKALQHFVKPLLGNGDEPDKDERFYGELAVLWEELDRVTPLYNKVRNRMTRKPYSIEKFKLNFENSTLLDGWDVNKERDNTCVILRREGKYYLGIMRKQFNDIFVNVPNAQGEDNFEKMEYKLLPGANKMLPKVFFSKSRIKEFNPSPTLLEHYHQGTHKKGDNFSLQDCHELIDFFKVSLAKHEDWGKFDFHFSPTESYEDMSGFYREVEQMGYKISYKLIPFSYIDQMVEEGKLFLFQIYNKDFSRFSKGTPNLHTLYWKMVFDERNLADVVYKLNGQAEVFYRKKSLAYKRPTHPAYQAIKNKNSEGKKAESTFDYDIVKDRRFTTDKFQFHVPITINFKATGTGNINVRVNQFIHDHDDLHFIGIDRGERHLLYVTVIDSKGRIKEQFSLNEIVNEYQGTKYKTNYRSLLDKREEERQRERQSWNTIEGIKELKQGYLSQVIHKIVTLMVKYRAVVVLEDLNMGFKRGRQKVESSVYQQFEKALIDKLNLLIDKRIDATAPGGLLHAYQLTNKFTSFREMRRQNGFMFYIPSWNTSKIDPVTGFVDLLHPRYESVEKSRVFFSKFKSIRYNQDNGWYEFSLDYKDFTSKADGSRTEWTLCTHGTRVVTYRNPKKNSSWDSREINLTEEFNALFEAYGIQAQGNLKQAIAEQSEKDFFDKLTHLLSLTLQLRNSITGTEVDYMISPVADEYGHFFDSRTCGKDLPQNADANGAYNIARKGLWVARQIQASAVDEKVDIIMSNKEWLVFAQEKPYLADD

SEQ ID NO: 65 - protein, 1262 aa, Unknown
  Description of Unknown: uncultivated organism sequence
  Category: MG13 effectors
  Description: MG13-31 effector
MRKFDEFVGLYPISKTLRFELKPIGKTLEHIQRNKLLEHDAVRADDYVKVKKIIDKYHKCLIDEALLGFTFETEVDGRSNNSLSEYYLYYNLRKRNEQEQKTFKTIQNNLRKQIVNKLTQSEKYKRIDKKELITTDLPDFLTNESEKKLVEKFKNFTTYFTEFHKNRKNMYSKEEKSTAIAFRLINENLPKFVDNIAAFEKVASSPLAEKINALYEDFKEYLNVEEISRVFRLDYYNELLTQKQIDLYNAIVGGRTEEDNRIQIKGLNQYINEYNQQQTDRSNRLPKLKPLYKQILSDRESVSWLPPKFDSDKDLLIKIKECYDALSEREKVFDKLESILKSLSTYDLSKIYISNDSQLSYISQKMFGRWDIIGKAIREDCAKRNPQKSRESLEKFAERIDKKLKAIDSISIGDVDECLAQLGEPYVKRVEDYFAAMGTSDMGEEQTDTTSFKKNIEGAYKSVKELLNNADNITDNNLMQDKGNVEKIKNLLDAIKDLQRFIKPLLGKGDEADKDGVFYGEFTSLWTKLDQVTPLYNMVRNYLTSKPYSTKKIKLNFENSTLMDGWDLNKEPDNTTVIFCKDGLYYLGIMGKKYNRVFVDREDLPHDGECYDKMEYKLLPGANKMLPKVFFSETGIQRFRPSEELLGKYERGTHKKGAGFDLGDCRALIDFFKKSIERHDDWKKFDFKFSDTSTYQDISEFYREVEQQGYKMSFRKVSVDYIKSLVEEGKLYLFQIYNKDFSAHSKGTPNMHTLYWKMLFDEENLKDVVYKLNGEAEVFFRKSSITVQSPTHPANSPIKNKNKDNQKKESKFEYDLIKDRRYTVDKFLFHVPITMNFKSVGGSNINQLVKRHIRSATDLHIIGIDRGERHLLYLTVIDSRGNIKEQFSLNEIVNEYNGNTYRTDYHELLDTREGERTEARRNWQTIQNIRELKEGYLSQVIHKISELAIKYNAVIVLEDLNFGFMRSRQKVEKQVYQKFEKMLINKLNYLVDKKKPVAETGGLLRAYQLTGEFESFKTLGKQSGILFYVPAWNTSKIDPVTGFVNLFDTHCENIEKAKGFFDKFKSIRYNSDKDWFEFVVDDYTRFSPKAEGTRRDWTICTQGKRIQIYRNPQRNNEWEGREIDLTKAFKEHFEAYGVDISKDLREQINTQNKKEFFEELLRLLRLTLQMRNSMPSSDIDYLISPVADDTGCFFDSRKQAELKENAVLPMNADANGAYNIARKGLLAIRKMKQEENDSAKISLAISNKEWLKFAQTKPYLED

SEQ ID NO: 66 - protein, 1275 aa, Unknown
  Description of Unknown: uncultivated organism sequence
  Category: MG13 effectors
  Description: MG13-32 effector
MNNLNDLTGQYPVSKTIRFDLQPIGKTKENIEKGGILQQDEQRAEDYKTVKGFIDEYHKQFIKDRLWNFRLPLISEGHLDSLEEYQTLYLLAKRNDAQEAEFKEVKDNLRSIIARRLTEKGSAFERIFKKELIREDLIDFVEKPEDKDLVKSFADFTTYFTEFHKNRANMYTAEEKSTAIAYRLIHQNLPKFMDNIKAFAKIAQTSVAGHFVEIYNGSKEYLNVGSLEEVFQLDYFSDTMTQPHIEVYNSIIGKRVLEDGTEIKGINEYVNLYNQQQKDKRQRLPFLVPLYKQILSDREKLSWLAQEFDSDKKMLAAINETFIHLREILMGEDSESLRSILTHLKDFDLTQINITNDLSLTDISQHLFKRFDVFSNGIKAKIRSITPKKKKESDEELEDRVSKIFKTQKSFSIAFLDNLPQPEMEDGKRRSVADYFTALGAVNNEVTQKENLFAQIEIAYEDARDVLQMTETGDTLSQDKPAVAKIKALLDALKDLQHFIKPLRGSGEENEKDELFYGSFLMMWDELDTVTPLYNKVRNWLTRKPYSTEKIKLNFDSPTLLNGWPNPQTNSGAIFRDEEGLYYLAILDAQNRACLNELSSNVNGNEDHIEMMKYLQGGDMGKNVQNLMVIDGEVRKVNGRKETSGEFAGQNLRLENAKHQYLPKNINEIRLKQSYLTSSPTFNKKDLVSFIEYYIPLVEAYYSDYVFHFRKSSEYKSFADFTEHINQQAYQVQFKPVSKTSLYSLVEEGKLYLFRIWNKDFSEFSKGTPNLHTLYWKMLFDERNLADVVYKLNGQAEVFYRKASIKPENKIVHPANRAIANKNELNKKRTSSFDYDIIKDRRYTVDKFQFHVPITINFKATGQTNVNPIVQDTIRRGGFTHIIGIDRGERHLLYVSLIDLKGNIVKQMTLNEILNEYKGLTHKTNYHDLLAKREGERTDARRSWDTIENIKELKEGYLSQVVHIISKMMVEYNAIVVLEDLNPGFMRGRQKIERQVYEKFEKMLIEKLNCYIDKKAEPIEIGGLLHPLQLSCDIKKWKKSHQCGCLFYIPAWNTSKIDPVTGFVNLFDTHYETREKARSFFSKFQRIHFNSEKNWFEFTFDYGNFTTKAEGTRTQWTLCSYGTRIRNFRNPLKNHQWDDEEVELVDEFKHLFDKYSIDIFGNLKESICNQTDAQFYKELMGLMKLLLQMRNSRTNSEVDYLLSPVADEQGHFFDSREGIGSLPDNADANGAFNIARKGLWIIRKVQGTPSDEKMSLAISNKEWLQFAQNRPYLND

SEQ ID NO: 67 - protein, 1249 aa, Unknown
  Description of Unknown: uncultivated organism sequence
  Category: MG13 effectors
  Description: MG13-33 effector
MKEFTNLYPVSKTLRFDLQPIGRTKENIERNGILQRDEKRAEDYKTVKGFIDEYHKQFIKDRLWSYKLPLYSEGHLNSLEEYQALYELSKRDETQEREFAEVKDNLRAFIAKRLTEGGSAYDRIFKKELIREDLVDFLENEDDREIVRQFADFTTYFGGFHENRKNMYSAEEKSTAIAYRLIHQNLPKFMDNMKAFAKIAESSVSEHFEEIYEGWKEYLNVGSLEEIFRLDYFSVTLTQPHIEVYNYIIGKKILEDGTEIKGINEYVNLYNQQQKDKTKRLPFLVPLYKQILSDREKLSWMAEEFDSDDQMLTAINESYSHLHDLLMGDDNESLRSLLEHLKDFNLEQINITNDLSLTDISQHLFGRYDVFTNGIKDELRIITPRKKKEDDESFEDRISKIFKTQKSFSIALLDKLPQPVMEDGKLRTVEDYFLSLGAVNTGLTQKENLFAQIENAYEDARTILQLKNTDDTLSQDKPAVAKIKTLLDALKDLQHFIKPLLGSGEENEKDELFYGSFQMMWDELDTVTTLYNKVRNWLTRKPFSTEKIKLNFDNSQLLGGWDVNKEPDCTGVLLRKDGLYYLGIMDKKSNRIFEADVTPTDGVCYEKFDYKLLPGANKMLPKVFFSKSRIDEFSPSETIIASYKRGAHKKGANFNLAECHRLIDFFKQSISKHEDWSKFGFHFSDTKTYEDISGFYREVEQQGYMLSYHPVSSSYINQLVDEGKLYLFRIWNKDFSEFSKGTSNLHTLYWKMIFDEQNLANVVYKLNGQAEVFYRKASIKSENRIIHKANQPINNKNELNKKDTSTFEYDIIKDRRYTVDKFQFHVPITINFKATGQTNINPIVQDVIRQGGFSHIIGIDRGERHLLYLSLIDLQGNIVKQMTLNDIINEYKGQTYKTNYHDLLAKREGERTDARRSWETIETIKELKEGYLSQVVHIISKMMVEYNAIVVLEDLNTGFMRGRQKIERQVYEKFEKMLIEKLNCYIDKHAEPTEETGLLHPLQLTCDSKKWTRSHQCGCLFYIPAWNTSKIDPVTGFVNLLDTRYDTREKARLFFSKFQRISFNVEMGWFEFAFDYNNFTTKAEGTRTKWNLCTFGERIRSFRNPKKNNQWDDERIVLTDEFKQLFDKYDIDIAGNLKEAISAQSDAQFFKELLGLMKLLLQMRNSVTNSEEDYLLSPVADENGHFFDSREGISSLPIDADANGAYNIARKGLWVIRKIQETQEDEKVSLNITNKEWLQFAQTKPYRND

SEQ ID NO: 68 - protein, 1240 aa, Unknown
  Description of Unknown: uncultivated organism sequence
  Category: MG13 effectors
  Description: MG13-34 effector
MKTFNDLTGLYSLSKTLRFELKPVGKTKDNIETKGIIAQDEKRAEEYKKVKDIIDRYHKSFIDMCLAGLVLKTTSDGNNDSLKDYVALASKSNRDEKEDKDFDDVKTVLRKHIVDAFKKGNSYGDLFKKELIQNHLPDFVTDEQEKLMVENFSKFTTYFTGFNENRKNMYSDEEKSTSIAYRLIHENLPMFIDNIKSFAKITEQEDIDFIADVEHSFKEELKGKSITQMFCLENFTETLTQGHIELYNKIVGGRVEDSGVKKQGINEYVNLYNQQHKDARLPLLKPLYKMILSDRVALSWLPEEFATDEEMLAAINETHGNLKNVMTDVRKLLQNIDSYDTEHIYIANDKGLTDISQQIFGQYDVYTSAIKAELRDSITPSAKERKDPELLEKRINDIFKASKSFSIEYLNSHVDSDKTIQSYYKELGAYDRNGEQRINLLSQIELAYVDAHDVLLGKHTNLNQSEDSIKKIKALLDAYKALQHFIKPLLGNGDEADKDNEFDAKLRAIWDELDIVTPLYDKVRNRLTRKPYSTEKIKLNFDNAQLLNGWDMNKEPDCTSVLLRKDGQYYLAIMDKKSNHAFDIDELPCDGECYEKMEYKLLPGANKMLPKVFFSKSRIKEFAPSKEILDAYQKGTHKKGPNFSIKDCRRLIDFFKDSIAKHEDWSKFPFAFSDTSTYEDISGFYREVEQQGYMLGYRKVSVSFINQLVDEGKLYLFQIWNKDFSEYSKGTPNIHTLYWKMLFDERNLANVVYKLNGQAEVFYRKRSLDLDKTTIHRANQPIANKNKQNEKRESTFSYDIVKNRRYTVDKFQFHVPITINFKATGSDNINASVLDVIRNNGIEHIIGIDRGERHLLYLSLIDMKGNIVKQMTLNDIINEYKGNTYTTNYKELLQAREGDRKEARQNWQKIENIKELKEGYLSQVVHVITKMMVEYKAIVVLEDLNGGFMRGRQKIERQVYEKFEKMLIDKLNYYVDKQKDVNDNGGLLHAYQLASKFDTFKKLGKQSGCLFYIPAWNTSKIDPVTGFVNMFDTRYENADKARKFFNKFKSISYNADKEWFEFVIDDYSKFTDKAKDTRTDWVLCTYGTRIKTFRNPEKLNQWDNKEIVLTDEFKKVFMEAGIDINGNLKEAICTLTEKKHLESLMQLMKLLVQMRNSETNSEVDYLLSPVADTEGHFYDSRNCGDNLPKDADANGAYNIARKGLWAVMKIKASKPQENLKLGISNKEWLQFAQEKPYLND

SEQ ID NO: 69 - protein, 1251 aa, Unknown
  Description of Unknown: uncultivated organism sequence
  Category: MG13 effectors
  Description: MG13-35 effector
MKEFINLYPVSKTLRFELQPIGKTKENIERNGILKRDSKRAEDYKIVKGFIDEYHKQFIKDRLWSFKLPLQSEGHLDSLEEYQTLYELSKRDATQEAEFTEVKDNLRGIIAKRLTQSGSNYERIFKKELIREDLVEFLENEEDKEIVRQFADFTTYFVGFHENRKNMYSAEEKSTAIAYRLIHQNLPKFMDNMKAFAKIAETTVSEHFADIYEGWKEYLNVGSIEEMFRLDYFSETLTQTHIEVYNYIIGKKILEDGTEIKGINEYVNLYNQQQKDKSKRLPFLVPLYKQILSDREKLSWLADEFDSDEKMLAAINELYINLHDLLMGDENESLRSLLTHLTDFDLTQINITNDISLTDISQHLFGRYDVFTNGIKDKLRVITPKKKKESDEDFEDRISKIFKSQKSFSIDFLNKLPQPVMDDGKPRTIEDYFMALGAVSTDAVQKENLFAQIENAYEDARTILQMNDTGDTLSQNKPAVAKIKVLLDTLKDLQRFIKPLLGSGEENEKDELFYGSFQMMWDELDAVTPLYNKVRNWLTRKPYSTEKIKLNFDNSQLLGGWDVNKEPDCTGILLRKNGYYYLGIMDKKSNHAFDVEISPSDGECYDKIDYKLLPGANKMLPKVFFSKSRIDEFAPSETIVSNYKRGTHKKGADFSLSDCHKLIDFFKQSISKHEDWSKFGFHFSDTDTYEDISGFYREVEQQGYMLSSHRVSVAYVNQLVDEGKLYLFRIWNKDFSEYSKGTANLHTLYWKMLFDERNLADVVYKLNGQAEVFYRKASIKSENRIVHKANQPIANKNELNAKRNSTFEYDIVKDRRYTVDKFQFHVPITINFKAAGQTNINPIVQDTIRRGGFTHIIGIDRGERHLLYLSLIDLKGNIIKQMTLNDIVNEYKGQTYKTNYHDLLAKREGDRTEARRSWDTIETIKELKEGYMSQVVHIISKMMVEYNAIVVLEDLNPGFMRGRQKIERQVYEKFEKMLIDKLNCYIDKQASPTSEGGLLHPLQLTNKFESFRKLGKQSGCLFYIPAWNTSKIDPVTGFVNLLDTRYDTREKARVFFSKFQRISFNPNKGWFEFALDYYNDFTAKAEGTRTQWTLCTYGERIRTFRNPQKNHQWDDERIMLTDAFKQLFERYGIDINGNLKEAIGSQTDAQFYKDMMGLMKLLLQMRNSITNSEEDYLLSPVADEKGNFFDSRKGIESLPIDADANGAYNIARKGLWAIRKIQETRDDEKPSLNITNKEWLQFAQTKPYFND

SEQ ID NO: 70 - protein, 1278 aa, Unknown
  Description of Unknown: uncultivated organism sequence
  Category: MG13 effectors
  Description: MG13-36 effector
MKKFTNKFQLSKTLRFELIPQGKTLENIKSKGLIAKDDQRAISYKKMKKSIDEYHKYFIGLALSNVKLSKLQDFADLYFETNPDKKKEDAYKKSLEKIQTDLRKEIVKGFKEGDAKEIFGKLNKKELFTELLEEWKQEKGDFYFDEEFKTFTTYFTGFNKNRANMYSDEAKSTAIAFRLIHENLPKFLDNIKVFEKAKSIPQLQENCKLLYKEIEEYLNISKIDEVFELGYFNEALTQNDIDVYNLIIGGRTAKEGVQKIQGLNEYINLYNQKQDKKNRIPKLKVLYKQILSDRENISFLPEKFNDSNEVLEAIENFYKSNLLEFQTGDMEHSENVLASLKTLVGEIANFDTSKIYLRNDKSITDISQTIFGDWGIIKSALEFSFIQGLIIGKKGISIKQEVEKDKYLSKQSYYSIAEIENALMLYKDQNELLKELKPTDLPVANYFKNHFKIKVKKDDNSEKEFDLITNIEDKYRCIKGILANDYPEDKDLKSTNNPDTLNIKLFLDSLMEFLHFIKPLALPKDTVLEKDEHFYNPFVIGYEQMQLLIPLYNKVRNYATQKPYSEEKFKLNFENSTLLSGWDVNKEETNTSILFIKEGIYYLGVMDKDHNKIFRDIPKARSNSVYQKINYKLLPGASKMLPKVFFSDKNISFFNPSDEIQNIRNHGTHTKGGSPQEGYSKLDFNVNDCRKMIDFFKTSIEKHPEWKNFGFQFSDTTTFDSIDAFYREVEAQGYTISYSNLDKDYIDQLVSEGKLYLFKIYNKDFSSYSKGQPNMHTLYWKALFDKDNLKDVVYKLNGQAELFYRKKSINYDEKTMKEGHHYQELKDKFAYPIIKDKRFTEDKFHFHVPITLNFKASGNDYINADVLTYLKNNPDVNIIGLDRGERHLIYLSLINQKGEVLKDKNGNPIQYSLNEIINEHKGKTYPTNYQTLLDSKEKERDSARKNWGEIENIKELKEGFISQVVHKIAHLMIDFNAIVVMEDLNFGFKRGRFKVEKQVYQKLEKMLIDKLNYLVFKDKEPTEIGGIYNALQLTNKFKSFKEMGKQSGFLFYVPAWNTSKIDPTTGFVNLFNTKYETIEKAQEFFSKFNDIRFNEKENHFEFEVDDYTKFNLKAEGTKTDWVVCTNEDRILTFRNPETNNNWDNKKVVLTDEFVKFFTENQIEYKTNLQTQILEKTEGKFFKDLFHLFKLTLQMRNSITNSEVDYLISPVKNNDSYFYDSRKADNTLPQDADANGAYHIAKKGLWVLEQINQYEKDDNWKKLQLAISNKMWLNFVQKK

SEQ ID NO: 71 - protein, 1253 aa, Unknown
  Description of Unknown: uncultivated organism sequence
  Category: MG13 effectors
  Description: MG13-37 effector
MKNLTEFTGLYPVSKTLRFELKPQGRTLEYIEKNGLLEQDEHRASSYILVKKIIDDYHKAFIANALRDFKLYSLEDYYLYYNIQKRDDEQKKKFEDIQSKLRKQIADRFTKEESFKNLFAKELIKENLIEFVQTVEDRELIKEFESFTTYFTGFHENRKNMYSAEEKSTAIAYRLIHQNLPKFIDNMRVFEKIANSPVKDKFQTILSDNQLGPVIQVMAVEDMFRLDYFNETLTQIGIDKYNSLCGGFSPNEGKEKIQGLNEYINLYNQTAKKEERIPKLKPLFKQILSDRSTASFIPDEFENDSEVLESIELFYQEVNEQVINKNVEGEHSLKELLKSLPEYELTKIYLRNDLSITDISQKIFGDWGVFQKAMNTWFELNYNGKAKFGTEKYEEEQRKYFANLDSFSIGFINECLLQLDTPYHKNIADYFALRGKTDTETQDLFAVLEDKYNAVTDLLNNPYPQDQDLAQDQKQVDKLKELLDAVKAIQWFIKPLLGKGNEADKDERFYGEFTSLWITLDQITPLYNKVRNYMTRKPYSTDKIKLNFENSYFLNGWAQDYESKAGLIFTKDGNYYLGINDKKLSNEDKTLLKSNSELNLAKRIVLDFQKPDNKNIPRLFIRSKGNNFAPAVEKYNLPIHEVIEIYDNGKFKTEYRKINETDYLKSLHLLIDYFKIGFSKHESYKHYPFSWKNTTEYKDIAEFYHDVEVSCYQVFEENVNWDTLMNFVDEGKLYLFQLYNKDFSPNSKGTPNLHTLYWKMLFDADNLKDVVYKLNGQAEVFFRKSSIKPENIVLHKANEAVNNKNEQNTKKQSRFEYDIIKDKRYTVDKFQFHVPITMNFKARGLNNINTEVNQWLQKSDNVHIIGIDRGERHLLYLTLIDSKGNIKQQFSLNEIVNEYEGKTYKTDYHKLLDNREGNRDEARKNWKTIETIKELKEGYLSQVIHKISELMVEYNAIVVLEDLNMGFMRGRQKVEKQVYQKFEKMLIDKLNYLVDKKQNPAEMGGTLHAYQFTNKFESFQKMGKQSGMLFYVPAWNTSKMDPVTGFVNLFDTRYENMEKARSFIGKFDTIRYNPKKEYFEFDFDYNKFTAKAEGTRTRWTLCTNDTRIETFRNPAKNSQWDNREIILSDEFINLFKLYNIDYQNSDLKVQICKQTEKAFFERLLHLLKLTLQMRNSMTGTEVDYLISPVTNSRGEFYDSRTASDILPKNADANGAYNIARKGMWVIEQIRKATDFRKLKLAISNKEWLSFVQH

SEQ ID NO: 72 - protein, 1251 aa, Unknown
  Description of Unknown: uncultivated organism sequence
  Category: MG13 effectors
  Description: MG13-38 effector
MNTFNGFTGLYPLSKTLRFELKPIGKTLQFIINNGILEQDKHRADSYSQVKEIINEYHKAFIERGLTGFELKYNNEGKKNSLLEYFMYYNIKNREERDKNTYKQIQNNLRKQITDRLSKDEAFQRINKKELIQQDLISFVETQPNSAKKRALVEEFRNFTTYFSGFHENRKNMYSAEEKSTSIAYRLINENLPKFVDNIQVFSKVMGTEISKKMPQLYQEFQKFLNVENIEEMFHLKYFSSTLTQSQIDVYNAIIGGITSDDNVRIKGLNEYINLYNQQHKDTKLPKLKLLLKQILSERNPVSWLPEKFDSDEQMLTAIKQCYENLSERVFGNTSLRLQLELLGDFDLNGIFISNDPQLADISQKIFGNWGIIQKAIQTKIANCLPQKRKESFEDYQERITKRFKSFDSFSIGYIEECLSAVGIPSNKIEKYFSDLGVVNNRIEQKENHFVRIANAYEEIRDLLNNPYPMEKRLSQDKAHVEKIKQLLDAIKALQHFIKPLLSGGDEPNKDERFYGEFTALWNELDQITPLYNMVRNYITRKPYSEKKIKLNFENSTLMDGWDLNKEKDNTTIILRKDNLYYLGIMNKKFNKIFDKYPGSTSDEYYEKMEYKLLPGANKMLPKVFLLSKSGLDEFNPSQEIRDNYEKGTHKKGINFKLEDCHALIDFFKTSINKHSDWKKFDFKFSETSTYEDLSGFYKEVEQQGYKVSFRNVSANYIDTLIDEGKLYLFQIYNKDFSPYSKGIPNMHTLYWKMLFDEQNLENVVYKLNGQAEIFYRESSLEYHHPTHPANQPVMNKNQSNVKQESVFPYDLIKNRRYTIDKFQFHVPITMNFKSNGVNNINQQVNECLQHADDTHIIGIDRGERHLLYLVVIDKKGNIKEQCSLNEIMNEYNGNRYSTDYHNLLNRREDERLKARQSWQSIESIKDLKEGYLSQVIHKISELIVKYNAIVVLEDLNLGFIRGRQKIEKQIYQKFEKMLIDKLNYLVDKKKEPNELGGILKAYQLANKFESFQKMGKQSGFLFYIPAWNTSKIDPQTGFVNLLDVHYESTEKAKSFFCKFDSIKYNTSKDWFEFELDYSKFNQKAEGTRIHWTLCSYGTRIETLRYVSKNSQWDSVEVNLTEKFKEHFNKYHIDIHTNLKEAISRQIEKNFFEGLLHLLKLTLQMRNSKIGADIDYLISPVADDNGIFYDSRSCDPSLPANADANGAYNIARKGLWILKQIKETVDLKKLKLTISNKEWLRFAQEKPYLND

SEQ ID NO: 73 - protein, 1249 aa, Unknown
  Description of Unknown: uncultivated organism sequence
  Category: MG13 effectors
  Description: MG13-39 effector
MKNFESFTNLYPLSKTLRFELRPIGRTLENIQANGLLEQDNHRAESYKLVKAIIDRYHKVFIDEALSHCVLPVENSGNKNSLSEVYQYLTTKDHSEKETDDFNKTQDNLRKMIVSALKKDTHFGRIFKKELIREDLLNNDLQGFDLNEEEYDLIKEFRDFTTYFVGFNENRANMYSEEAKSTAIGYRLIHENLPKFIDNMVIFQKVKVSPVSEYFANIETEMEDMLQGIKVEDIFDLNFFNQVLVQRFIDLYNAVIGGQVASEEDHRKGLNQYINEYNQVQKDKKDRLPKFKPLFKQILSDRIHASWQIDNFESDNEVLKAIENAYETLDEEVISRKDSNLPLLFASISDFDLSGIYVSAKAITDFSQQIFKDWNAIDSALEAACRRSNQPKKKETEEKYAERIKKQRSHIDSYSVGEIIESLVAFQPNPEKSILDYLGGMGRREDKPSIIESIKSAYRDVEELLKTEYPANKNLALDKDNISKVKALLDAIKELQFFIKPLLGTGKESGKDERFYGEFVDYWQTLDIITPLYNKVRNYATRKPYSTAKFKLNFENSTLLNGWDVNKEPDNTSVLLRKDGLYYLAIMKKSCNRVFAVDQYDTVGDCYEKIDYKLLPGANKMLPKVFFAKSRIDEFAPSREVLDIYKRGSFKKGEEFCKADLHTLIDFYKASITKHEDWKKFGFEFSPTSSYDDISGFYREVEQQGYQIRFRKVSCTYIDSLVDQGQIYLFQIYNKDFSPFSKGTPNMHTLYWKMIFDERNLKDVVYKLNGQAEIFFRKSSLPVETPTHPANQPIANKNPLNRKKESLFTYDIVKNRRYRYDKFQFHVPITMNFKSIGSEYINDQVQDYIRQSKDLHFIGIDRGERHLLYLTVIDSKGIIEEQFSLNVINNEYNGTTYSTNYHDLLEERGDDRTKARREWLAIESIKELKEGYLSQVVKKITDLMIKYNAIVVLEDLNMGFKRGRQKVESSAYQQFEHKLIDKLNYLAGKTAPIDKVGGLLKAYQLATPYQNEMGFQNGFVFYIPAWNTSKIDPVTGFTNLFDLHIETMEQAKKFFSKFDYIRWNAANNWFEFAFDYKNFTEKADGSRTQWTLCTQGTRIRTFRNPEKNSEWDNVEVDLTDQFLSLFNSKNIDIKSDLKTQILAQNEKDFFMSLLLCLKLTLQMRNSISNSEVDYLISPVADANGDFFDSRKVDLSLPANADANGAYNIARKGLWMARRIKKSRPEDKVSLKITNKEWLNFAQNKPYLTD

SEQ ID NO: 74 - protein, 1249 aa, Unknown
  Description of Unknown: uncultivated organism sequence
  Category: MG13 effectors
  Description: MG13-40 effector
MEQFTNLYPLSKTLRFELIPHEKTKELLERTDYLAQDEKRAESYKIVKGIIDRYHKSFIEDVLSKPIEDQGEKRPILKFAKESTKNCDSLEEFYELYSKSQKSETEKNTLEITQNNLRKQIVYALTQDARFKNLDKKELIYQDIYAIAKPEEIPFIKEFEGFATYFVGFHENRMNMYSSEAKSTAIGNRLINENLPIFTDNMGTFQKLLNSPVSEHFDTICKDMEDILPYDNIEEIFMLHNYNDFLTQKQITVYNAIIGGRVLEDGTKIQGINEYVNLYNQQQPTRETRLPKLKTLFKQILSDKESVSWLAEEFTSDEEMLKSIRDYYTSFKNNASQQMIDILTNIKSYDIDHIFIPNDISLTTISKKVFKDWEAINKSIIKRLKEDNPQKGREKDDNYEERMSKAFKSYDSFSLGLINSCTATDDVCIYFSKIAKTDEETGLSHNLLDNIEEAYDKAKEYLNNGYPSNLNLAQDKSTVQKIKNLLDSIKDLQKFIKPLLGSGTEAVKDERFYGDISLVWEILDQITPLYNKVRNRMTRKAYSIEKIKLNFENSTLLAGWDLNKEKDNTSIILKKDGLYYLAIMRKEFNKVFQNTPQLTSGEDSFEKMEYKLLPGANKMLPKVFFSKSRISEFAPSDVLIEKYKKGTHKKGSNFNIDDCHNLIDFFKSSIQKHDDWSKFNFKFSPTDSYEDMSGFYREVEKMGYKITFKKISADYIEELVTSGKIFLFKIYNKDFSQYSKGTPNLHTLYWKMVFDENNLKDVVFKLNGEAEIFYRKKSLSYKSPTHPAHQPIRNKNPYNAKEESVFAYDLIKDKRYTLDKFHFHIPITINFKSEGVNNINTLVCNYIRNNDDIHFIGIDRGERHLLYVSVIDSKGRIKEQFSLNQIINEYKGNSYSTDYHKLLEERDEKRTKERQSWDSIESIKELKQGYLSQVIHKIASLVVKYNAIVVLEDLNIGFKRGRQKVESSIYQQFEKALIDKFNYLVDKNVAPEQPGGLMKGYQLTNKFSSFRDMGKQNGFLFYIPAWNTSKIDPVTGFVDMLHPKYESVEKAREFFTKFNKISYNQEKGWFEFLFDYNDFTTKAEGTRTVWTLCTFGKRIEKFRNKDKNSMWDNKEIDLTSAFISLCEKYNVPLSCDMKNDIVAQTEKDFYVELIRILRLTLQMRNSITGTDIDHLISPVADENGNFYDSRNADSTLPENADANGAYNIARKGLWAAMQIRSCTDPDLKVNLAISNKEWLTFAQTKPYIK

SEQ ID NO: 75 - protein, 1243 aa, Unknown
  Description of Unknown: uncultivated organism sequence
  Category: MG13 effectors
  Description: MG13-41 effector
MKQFTNLYPVSKTLRFELIPQGETRAHLNDLIAEDEQRAEDYKEVKKYIDRYHKWFIDDCLSKVPNSPLGEEMIRLLNKYIEANDEKDGEGPDKVQDDLRKLIVKALKSGVSLDKDPEQEERFKSLFSEELVKNILPDFVQTEEEKNNVAKFRDMTTYFVGFHKNRENMYSEEAQTTAISYRLIHENLPRFLDNIAVYEKIKPVLSDEIVSLEEQLHQNGYVEACCIDSLFSVDFYLRVLTQRGIEQYNAVIGKIVNDESDEIKGLNERINLYNQVHKKEKLPLFKPMYKQILSDREQLSWLPETFENDASLLDAVKGFHQDLLSNDILSRIDKLLSSLQDFNLNQIWIANDVQLRGLSKDLYGDWSLIDRALGIERSEDVVQGLTAAQKKAASAAKKRSSFSIVELNAAIRSRVPDEKYVPVQNYFSAMGKVCAQGEATRENFVTRICAAYQELEEYIPSIRKSLLQEKRATEFIKNYLDAVNDLLRFIKPLLGRGNETDKDANFYGEFAFLTDCLFAIVPLYNEVRNYLTQKPYSTEKFKLNFRGSTLLNGWDKNKEKDNLGVILRKEGKYFLAIMNKKHNTLFTEGKLQQHTGGECYEKMEYKLIPGSKMLPKVFFSKKGISTFQPSEELLLNYRIGTYKKGEKFNLEHLHKLIDFYKHSMAVHEDWSKFDFHFSDTSSYRDISGFYKEVEQQGYKLTFRNVSVSYINRLVEEGKLYLFQIYNKDFSEYSKGTPNLHTLYWKMLFDPENLKDVVYKLNGEAEVFFRKKSLDVSHPTHTKNEPIEKKNKNNKGEKSLFSYDLIKDRRFTVDKFQFHVPITMNFKGEQGDRVNQMVQSYVRNNKGLNVIGIDRGERNLLYLVVINEHGEILEQFSLNEIRNAYNGKEHKIDYHTLLEERSKKRQDARQSWQTIEGIKDLKTGYLSQVIHVITQLMVKYNAIVVLEDLNFGFKSSRQKFEQSVYQQFERKLIDKLNFLVNKKAAPNEVGGLLNAYQLTAPFESFRKMGKQNGFLFYVPAWHTSKIDPRTGFVNLLDTRYENVANSKEFFAKFASITYNPEKKWFEFAFDYKAFGNRADGSRTKWTICSYGERIETFRNPENNNQWDTKTVPLTERLTELFSKYGIDYTTNLKEQILNQTDKAFFVELLGALRLTLQLRNSRKSTGEDFLFSPVAAENGCFFDSRKANDNEPKDADANGAYHIALKGLWVLDTIRNTEEGKNPKLAITNKEWLSYAQAKPFAHE

SEQ ID NO: 76 - protein, 1249 aa, Unknown
  Description of Unknown: uncultivated organism sequence
  Category: MG13 effectors
  Description: MG13-42 effector
MKQLTNLYPVSKTLRFELQPIGKTRENIEKGGILQQDEERAENYKLVKGFIDEYHKQYIKSRLWNFELPLADEGRHNSLAEYRVLYEMPKRDAEQEALFTEVKDNLRAIIARRLTEKGSAYDRIFKKELIREDLIEFLENEKDKEIVRQFADFTTYFTGFHENRANMYSSEEQSTAIAYRLIHQNLPKFMDNMKSFVKIAETAVAEHFPEIYAGWEEYLNVGSINDMFHLDYFSQTLTQEHIEVYNYIIGKRILDDGTEIKGINEYVNLYNQQQKDKKQRLPLLVPLYKQILSDREKLSWLSEEFDSDERMQHAIKETYDHLYNLLMGDENESLKSLFMHLRDFDLSQINITNDLSLTDISQHLFGKYDVFTNGIKDKLRIITPRKKKETDEVFEERITKLYKTQKSFSIAELNGLPHPVVEGSQPNNIVDYFMALGAVNTDTIQKENLFAQIENAYTDVLPILQMTDTGDKLSQNKPAVAKIKRLLDALKDLQHFVKPLLGSGEEVEKDERFYGQFQTIWDELDYVTPLYNKVRNWLTRKPYSTEKIKLNFDNSQLLGGWDVNKEPDCTGVLLRKGGFYYLGIMNKKNNRIFEKDLTPSDGDCYDKIDYKLLPGANKMLPKVFFSKSRIDEFAPSTSLVEKYKAGTHKKGANFNLKDCHNLIDFFKQSIAKHEDWRKFGFHFSNTDSYEDISGFYREVEQQGYSLTSHKVSTDYIHRMVDEGKLFLFRLWNKDFSEHSKGTPNLHTLYWKMLFDERNLQDVVYKLNGQAEVFYRKASIKEENRIIHPAKKDISNKNALNNKHTSRFDYDIIKDRRYTVDKFQFHVPITINFKAIGQTNINPVVHDIIRQGGIKHIIGIDRGERHLLYLSLIDLKGRIVKQMTLNEIINEYSGRQYKTNYHDLLVKREGERTDARRSWDTIENIKELKEGYLSQVVHVITKMMVEYKAIVVLEDLNMGFMRGRQKIERQVYEKFEHMLIDKLNCYIDKQEDPSKSGGLLHALQLSNKFESFARLGKQSGCLFYIPAWNTSKIDPVTGFVNLLDTHYDTMKAAKSFFSKFERISYNGEKDWFEFTFDYNEFNKKAEGTRTHWTLCTYGARIRNFPNPQKNNQWDDEEVVLTDMFKNFFEDYGIDYRGNLKEAIQQPTEAKFYQELMSLMKLLLQMRNSKINSEVDYLLSPVVDENGQIFDSRLVNTTLPDNADANGAYNIARKGLWVIRKIQESPKDEKMSLAISNKEWLTFAQTKPYLE

SEQ ID NO: 77 - protein, 1249 aa, Unknown
  Description of Unknown: uncultivated organism sequence
  Category: MG13 effectors
  Description: MG13-43 effector
MKQFTNLYPVSKTLRFELQPIGKTKENIEKNGILMRDEKRAKDYKIVKEFIDDYHKQFIKERLWDFKLPLNSEGKLNSLEEYQALYELSKRDEVQEAEFTEVKDNLRSIIAKRLTESGSAYERIFKKELIREDLVDFLENEEDKDIVRQFADFTTYFSGFHENRHNMYVAEEKSTAIAYRLIHQNLPKFMDNMKAFAKIAETSVAEHFADIYDGWKEYLNVESIEEVFRLDFFSETLTQPHIEVYNYIIGKKILEDGTEIKGINEYVNIYNQQQKDKSKRLPFLVPLYKQILSDREKLSWLAEEFDSDEKMLSAINESYSHLHDLLMSNENESLRSLLLHIKEFNLSHINIANDLSLTDISQHLFSRYDVFTNGIKDELRIITPRKKKESDEDFEERITKIFKAIKSFSIDFLDNLPQPVMEDGKRRSIENYFMTLGAVNTETTQKENLFAQIENAYEDARNILQLKDTGDTLSQNKPAVAKIKALLDALKDLQHFIKPLLGSGEENEKDELFYGSFMMMWDELDTITPLYNKVRNWLTRKPFSTEKIKLNFDNAQLLGGWDVNKEPDCTGVLLRKDGFYYLGIMNKKSNRIFESEVTPSDGECYDKIDYKLLPGANKMLPKVFFSKSRIDEFAPSEAVVSSYKRGTHKKGANFNLSECHRLIDFFKQSINKHEDWSKFGFHFSPTDTYEDISGFYREVEQQGYMLSSHPVSSSYINQLVDEGKLYLFRIWNKDFSEFSKGTPNLHTLYWKMLFDERNLADVVYKLNGQAEVFYRKASIKPENRIIHKANQPIANKNELNEKRTSTFEYDIIKDRRYTVDKFQFHVPITINFKAAGQTNINPIVQDVIRQGGFSHIIGIDRGERHLLYLSLIDLKGNIIKQMTLNEIINEYKGQTYKTNYHTLLAKREGDRTDARRSWETIETIKELKEGYLSQVVHIISKMMVEYNAIVVLEDLNTGFMRGRQKIERQVYEKFEKMLIEKLNCYIDKHADPSEDAGLLHPLQLTSDIQKWKRSHQCGCLFYIPAWNTSKIDPVTGFVNLLDTRYDTREKARVFFSKFQRISFNAQKGWFEFAFDYNDFTTKAEGTRTQWTLCTQGERIRTFRNPQKNNQWDDERIVLTDAFKQLFDKYDIDINGNLKEAISAQTDAQFFKELLGLMKLLLQMRNSITNSEEDYLLSPVADNTGNFFDSREGIYSLPIDADANGAYNIARKGLWVIRKIQETPNGEKTSLSITNKEWLQFAQTKPYLND

SEQ ID NO: 78 - protein, 1237 aa, Unknown
  Description of Unknown: uncultivated organism sequence
  Category: MG13 effectors
  Description: MG13-44 effector
MHTMKKINELTALYPLSKTLRFELKPIGKTLDHIEQKGLIVQDEQRAEEYKQVKKIIDSYHKEFITMCLKGLKLNMVYLERYESLAREVHRDEAEFDKVKAALRKQIVEAFKQGGSYNDLFKKELIQKHLPEFVESEEEKKMVANFSKFTTYFTGFYENRKNMYSDEEKSTAIAYRLIHENLPLFLDNMRSFRKIAESEVGEQFANIEVRFEEYLNVEHLAEMFELDYFSDTLTQEQIAVYNSVIGGRTLDDGTKIQGINEYVNLYNQQHKEARLPLLKPLYKMILSDRVALSWLPENPFESDEEMVEAIKEMCQSLKEVLMGNDGLRNLLLNIDLYDIEHIYIANDLGLTDISQQMFGQYDVYASAIKQKLRQGVKQSPKERREPELFEERINRLYKSTKSFSIADLNSHTDANHTIESYFKQLGAYDREGEQRDNLFTQIEMAQIAATDILAGKHGNISQSDKEIAILKGLLDAYKSLQHFVKPLLGHGDEADKDNEFDAKLREAWNALDIVTPLYNKVRNWLTRKPYSVEKIKLNFENAQLLGGWDVNKEPDCTSVLLRKDGFYYLAIMDKKSNHAFDSDELPCDGKCYEKIDYKLLPGANKMLPKVFFSKSRIDEFAPSKEIVEAYKNGTHKKGKDFNLAHCRRLIDFFKRSITKHEDWKNFPFVFSPTESYEDISGFYREVEQQGYMLSFRKVSESFINQLVDEGKLYLFKIWNKDFSEYSKGMPNMHTLYWKMLFNEQNLADTVYKLNGQAEVFYRKRSLDMADTTVHRASQPLVNKNALNKKRHSTFDYDIVKDRRYTVDKFQFHVPMTMNFKAVGRDNINSEVLNIIRNGGIKHIIGIDRGERHLLYLSLIDLKGNIVKQMTLNDIVNEYNGNTYATNYRDLLAEREGNRTEARRNWKKIENIKEIKQGYLSQVVHIISKMMVEYDAIVVLEDLNMGFMRGRQKIERSVYEQFEKMLIDKLNYYVDKQKRIDEAGGLLHALQLTSKFESFKKLGKQSGCLFYIPAWNTSKIDPVTGFVNLFDTRYVNADKAREFFSKFDSIRYNDAKNWFEFAFDYNKFTEKAKGTRTRWTLCTWGTRIRTFRNPAKLNQWDNEEVVLTDVFKKAFDEAGIDIHSNLKEAICTLTEKKHLESLLHLMKLLLQMRNSITNSEIDYLLSPVADENGHFYDSRTCDDTLPKDADANGAYNIARKGLWAIRTIQESSETERPNLALKNQDWLRFAQQKPYLND

SEQ ID NO: 79 - protein, 1274 aa, Unknown
  Description of Unknown: uncultivated organism sequence
  Category: MG13 effectors
  Description: MG13-45 effector
MNVDLLIKKTYNMRDFNEFVGLYPISKTLRFELKPIGKTLEHIQRNKLLEDDAVRADDYVKVKKIIDKYHKCLIDEALSGFTFDTEADGRSNNSLSEYYLYYNLKKRNEQEQKTFKTIQNNLRKQIVNKLTQSEKYKRIDKKELITTDLPDFLTNESEKKLVEKFKNFTTYFTEFHKNRKNMYSKEEKSTAIAFRLINENLPKFVDNIAAFEKVASSPLAEKINALYEDFKEYLNVEEISRVFRLDYYNELLTQKQIDLYNAIVGGRTEEANRIQIKGLNQYINEYNQQQTDRSNRLPKLKPLYKQILSDRESVSWLPPKFDSDKDLLIKIKECYDALSEKEKVFDKLESILKSLSTYDLSKIYISNDSQLSYISQKMFGRWDIIGKAIREDCAKRNPQKSRESLEKFAERIDKKLKAIDSISIGDVDECLAQLGETYVKRVEDYFAAMGESEIDDEQTDTTSFKKNIEGAYESVKELLNNADNITDNNLMQDKGNVEKIKTLLDAIKDLQRFIKPLLGKGDEADKDGVFYGEFTSLWTKLDAVTPLYNMVRNYLTSKPYSTKKIKLNFENSSLMKGWDLNKEPDNTTVIFRKDGLYYLGIMSKKYNRVFVDREDLPHDGECYDKMEYKLLPDANKMLPHVFLSKKGIQRFRPSGELLGKYERGTHTKGADFDLGDCRALIDFFKKSIERHDDWKKFDFKFSDTSTYQDISEFYREVEQQGYKMSFRKVSVDYIKSLVEEGKLYLFQIYNKDFSAHSKGTPNMHTLYWKMLFDEENLKDVVYKLNGEAEVFFRKSSITVQSPTHPANSPIKNKNKDNKKKESEFEYDLIKDRRYTVDKFLFHVPITMNFKSVGGSNINQLVKRHIRSATDLHIIGIDRGERHLLYLTVIDSRGNIKEQFSLNEIVNEYNGNTYRTDYHELLDAREGERTEARRNWQTIQNIRELKEGYLSQVIHKISELAIKYNAVIVLEDLNFGFMRSRQKVEKQVYQKFEKMLIYKLNYLVDKKKPIAETGGLLRAYQLTGELESFKTLGKQSGILFYVPAWNTSKIDPVTGFVNLFDTHYENIEKAKGFFDKFKSIRYNSDKDWFEFVVDDYTRFSPKAEGTRRDWTICTQGKRIQIYRNPQRNNEWEGRKIDLTKAFKEHFEAYGVDISKDLREQINTQNKKEFFEELLRLLRLTLQMRNSMPSSDIDYLISPVADDTGCFFDSRKQAELKENAVLPMNADANGAYNIARKGLLAIRKMKQEENDSAKISLAISNKEWLKFAQTKPYLED

SEQ ID NO: 80 - protein, 1252 aa, Unknown
  Description of Unknown: uncultivated organism sequence
  Category: MG13 effectors
  Description: MG13-46 effector
MKQFTNLYPVSKTLRFEIQPIGKTRENIEKNGILQRDEKRAEDYKIVKGFIDEYHKQFIKDRLWSFKLPLHSEGHLDSLEEYQALYEMSKRNDAQEAEFTEIKDNLRSIIAKRLTESGSAYERIFKKELIREDLIDFLESNEDKDIVRQFADFTTYFSGFHENRRNMYVAEEKSTAIAYRLIHQNLPKFMDNMKAFAKIAGTSVAEHFTDIYEGWKEHLNVGSIEEIFRLDYFSETLTQIHIEVYNYIIGKKILEDGTEIKGINEYVNLYNQQQKDKSKRLPFLVPLYKQILSDRDKLSWLAEEFDSDEKMLAAINESYNHLHDLLMGNENESLRSLLLHIKDFNLSQINITNDFSLTDISQHLFGRYDVFTSGIKDELRIITPRKKKESDEDFEDRISKIFKTQKSFSIDFLDKLPQPVMEDGKPRCIEDYFMTLGAVNTETTQKENLFAQIENAYEDARAILQMKDTGDTLSQNKSAVAKIKALLDALKDLQHFIKPLLGSGEENEKDELFYGSFQMMWDELDTVTPLYNKVRNWLTRKPFSTEKIKLNFDNSQLLGGWDVNKEPDCTGVILRKDSYYYLGIMDKKSNRIFEANATPSDGDCYDKIDYKLLPGANKMLPKVFFSKSRIDEFAPSEAIVSSYKRGTHKKGADFNLAECHRLIDFFKQSINKHEDWSKFNFHFSDTKTYEDISGFYREVEQQGYMLSSHPISSSYVNQLVDEGKLYLFRIWNKDFSESSKGTPNLHTLYWKMLFDERNLADVVCKLNGQAEVFYRKASIKPENRIVHKANQPIANKNELNTKRASTFEYDIIKDKRYTVDKFQFHVPITINFKAAGQTNINPIVQDAIRQGGFSHIIGIDRGERHLLYLSLIDLKGKIIKQMTLNEIINEYKGQTYKTNYHDLLAKREGDRTDARRSWETIETIKELKEGYLSQVVHIISKMMVEYNAIVVLEDLNTGFMRGRQKIERQVYEKFEKMLIEKLNCYIDKQLSPTDEGGLLHPLQLTCDAQKWKRAHQCGCLFYIPAWNTSKIDPVTGFVNLINTSRYDTREKARGFFSKFQRISFNEKKDLFEFTLDYNDFDYIAKAEGTRTQWTLCTQGERIRTFRNPQKNHQWDDERIVLTDAFKQLFDKYDIDINGNLKEAISAQTDAQFFKELLGLTKLMLQMRNSITNSEEDYLLSPVADITGHFFDSREGISSLPIDGDANGAYNIARKGLLVIRKIQETPDGEKPSLTITNKEWLLFAQTKPYLND

SEQ ID NO: 81 - protein, 1249 aa, Unknown
  Description of Unknown: uncultivated organism sequence
  Category: MG13 effectors
  Description: MG13-47 effector
MKQFTNLYPVSKTLRFELQPVGKTKENIEKNGILLRDEQRAEDYKRVKLLIDEYHKQFIKDRLWNFKLPMINNGHHDSLEEYQALYELSKRDDDQEATFTEVKDNLRSIIAKQLTVGSAYERIFKKELIREDLIEFLEDEKDKDIVRQFADFTTYFSGFHENRKNMYSAEEKSTAIAFRLIHQNLPKFMDNMKAFAKIKQTSVAEHFTDIYEGWKEYLNVESIEEIFSLDYFSETLTQPHIEVYNYIIGKKILDDGTEIKGINEYVNLYNQQQKDKNKRLPFLVPLYKQILSDREKLSWIAEEFDSDEKMLSAINESYSHLHDLLMGEENESLRSLLSHIKDYDLTQINITNDLSLTEISQHLFSRYDVFTNGIKDELRVITPRKKKEGDEIFEDRISKIFKTLKSFSIAFLDRLPQPVMEDGKPRSVEDYFMSLGAVNTETTQRENLFVQIENAYEDARAILQMKDTGDTLSQNKSAVAKIKTLLDTLKDLQHFIKPLLGSGEEQEKDELFYGSFQMMWDELDAITPLYNKVRNWLTRKPYSTEKIKLNFDNAQLLGGWDVNKEPDCTGVLLRKDGLYYLGIINKNHNRIFDADVTPTDGDCFIKIDYKLLPGANKMLPKVFFSKSRIDEFAPSKAIVSSYKQGTHKKGTNFNLTDCHRLIDFFKHSINKHPDWSKFGFHFSDTETYEDISGFYREVEQQGYMLSSHSVSVSYINQMVDEGKLYLFRIWNKDFSEFSKGTPNLHTLYWKMLFDERNLADVVYKLNGQAEVFYRKASIKPENRIVHQAHRPITNKNELNEKRTSTFEYDIIKDRRYTVDKFQFHVPITINFKAKGQNNINPIVQETIRQDGFKHIIGIDRGERHLLYLSLIDLNGNIVKQMTLNDIINEYKGQTYKTNYHHLLAKREGERTDARRSWDTIETIKELKEGYLSQVIHIISKMMVEYNAIVVLEDLNIGFMRGRQKIERQVYEKFEKMLIDKLNCYIDKQIAPQEVGGMLHPIQLTNKFESFGKLGKQSGCLFYIPAWNTSKIDPMTGFVNLFDTRYETREKARLFFSKFQRISFNEEKGWFEFAFDYNDFTTKAEGTRTQWTLCTYGERIRTFRNPDNNHQWDDERIELTEEFKLLFEKYNINIRGNLKEAISNQSDAQFYRDLLGLMKLLLQMRNSIINSEEDYLLSPVADENGHFFDSREEIESLPNNADANGAYNIARKGLWIMEQIKKTDNLAKLKLTISNKEWLHFAQNKPYLNE

SEQ ID NO: 82 - protein, 1171 aa, Unknown
  Description of Unknown: uncultivated organism sequence
  Category: MG13 effectors
  Description: MG13-48 effector
MIRLLNKYIEANNEKDGEGPDKVQDDLRKLIVKALKSGVSLDKDPEQEERFKSLFSEKLVKNILPNFVQTEEEKSKVAKFRDMTTYFVGFHKNRENMYSEEAQTTAISYRLIHENLPRFLDNIAVYEKVKPVLSDEIASLEEQLHQNGYVEASCIDSLFSVDFYLRVLTQRGIEQYNAVIGKIVNDESDEIKGLNERINLYNQVHKKEKLPLFKPMYKQILSDREQLSWLPETFENDASLLDAVKGFHQDLLSNDILSRIDKLLSSLQDFNLDQIWIANDVQLRGLSKDLYGDWSLIDRALGIERSEDVVQGLTAAQKKAASAAKKRSSFSIVELNAATRSSVPDEKYVPVQNYFSAMGKVCAQGEATRENFVTRICAAYQELEEYIPSIRKSLLQEKRATELIKNYLDAVNDLLRFIKPLLGRGDETDKDANFYGEFTFLTDCLFAIVPLYNEVRNYLTQKPYSTEKFKLNFRGSTLLNGWDKNKERVNLGVILRKEGKYFLAIMNKKHNTLFTEGKLQQHTGGECYQKMEYKLIPGSKMLPKVFFSKKGISTFQPSEELLLNYRIGTYKKGEKFNLEHLHKLIDFYKHSIAVHEDWSKFDFHFSDTSSYRDISGFYKEVEQQGYKLTFRNVSVSYINRLVEEGKLYLFQIYNKDFSEYSKGTPNLHTLYWKMLFDPENLKDVVYKLSGEAEVFFRKKSLDVSHPTHPKNEPIEKKNKNNKGEKSLFSYDLIKDRRFTVDKFQFHVPITMNFKGEQGDRVNQMVQSYVRNNKGLNVIGIDRGERNLLYLVVINEHGEILEQFSLNEIRNAYNGKEHKIDYHTLLEERSKKRQDARQSWQTIEGIKDLKTGYLSQVIHVITQLMVKYNAIVVLEDLNLGFKSSRQKFEQSVYQQFERKLIDKLNFLVNKKAAPNEMGGLLNAYQLTAPFESFRKMGKQNGFLFYVPAWHTSKIDPRTGFVNLLDTRYENVAKAKEFFAKFESITYNPEKKWFEFAFDYKAFGNRADGSRTKWTICSYGERIETFRNPKNNNQWDTKSVPLTERLTELFSKYGIDYTTNLKEQILNQTDKAFFVELLGALRLTLQLRNSRKSTGEDFLFSPVADENGCFFDSRKANDNEPKDADANGAYHIALKGLWVLDTIRNTEEGKNPKLAITNKEWLSFAQAKPFAHE

SEQ ID NO: 83 - protein, 1243 aa, Unknown
  Description of Unknown: uncultivated organism sequence
  Category: MG13 effectors
  Description: MG13-49 effector
MKTFNDLTGLYSLSKTLRFELKPVGKTKDNIETKGIIAQDEKRAEEYKKVKDIIDRYHKKFIEMCLANLKLKTISDGNNDSLKEYVTLASKANKDEKEDNDFKDVKTALRKQIVDAFKKGGSYSDLFKKELIQVHLPDFVTDEQEKQMVENFGKFTTYFTGFNENRQNMYSDEEKSTSIAYRLIHENLPMFIDNIKSFAKIAEHEDIDFFPDIENGFKEELKRLKAQSISEVFDLANFTNTLTQSQIDSYNAIIGARHDENGDKVQGINQYVNLYNQKNKDARLPLLKPLYKMILSDRVALSWLPEEFATDEEMLNAINEAHENLKSVLEKVRVLLLNIGNYDTEHIYIANDKGLTDISQQIFGQYDVYTSAIKAELRDSITPSAKERKDPELLEKRINDIFKASKSFSIEYLNSHVDSDKTIQSYYKELGAYDRNGEERINLFSQIELAYVDAHDVLLGKHTNLNQSEDSIKKIKALLDAYKELQHFIKPLLGNGDEADKDNEFDAKLRAIWDELDIVTPLYDKVRNRLTRKPYSTEKIKLNFDNAQLLNGWDMNKEPDCTSVLLRKDGQYYLAIMDKKSNHAFDIDELPCDGECYDKMDYKLLPGANKMLPKVFFSKSRIKEFAPSNEICDAYQKGTHKKGANFSIKDCRRLIDFFKDSIAKHEDWSKFPFTFSDTSTYEDISGFYREVEQQGYMLGYRKVSVSFINQLVDEGKLYLFQIWNKDFSEYSKGTPNMHTLYWKMLFDERNLANVVYKLNGQAEVFYRKRSLDLNKTTIHRANQPIANKNIQNEKRESTFCYDIVKNRRYTVDKFQFHVPITINFKATGSDNINASVLDVIRNNGIEHIIGIDRGERHLLYLSLIDMKGNIVKQMTLNDIINEYKGNTYTTNYKELLQAREGDRKEARQNWQKIENIKELKEGYLSQVVHVITKMMVEYKAIVVLEDLNGGFMRGRLKIERQVYEKFEKMLIDKLNYYVDKQKDVNDNGGLLHAYQLASKFDTFKKLGKQSGCLFYIPAWNTSKIDPVTGFVNMLDTRYENADKARKFFSKFKSINYNADKNWFEFVIDDYSKFTDKAKDTRTDWVLCTYGTRIKTFRNPEKLNQWDNKEIVLADEFKKVFMEAGIDINGNLKEAICTLTEKKHLESLMQLMKLLVQMRNSETNSEVDYLLSPVADTEGNFYDSRNCGDNLPKDADANGAYNIARKGLWAVMKIKASKPGENLKLGISNREWLQFAQEKPYLND

SEQ ID NO: 84 - protein, 1171 aa, Unknown
  Description of Unknown: uncultivated organism sequence
  Category: MG13 effectors
  Description: MG13-50 effector
MIRLLNKYIEANDEKDSEGPDKVQDDLRKLIVKALKSGVSLDKDPEQEERFKSLFSEKLVKNILPNFVQTEEEKSKVAKFRDMTTYFVGFHKNRENMYSEEAQTTAISYRLIHENLPRFLDNIAVYEKVKPVLSDEIASLEEQLHQNGYVEACCIDSLFSVDFYLRVLTQRGIEQYNAVIGKIVNDESDEIKGLNERINLYNQVHKKEKLPLFKPMYKQILSDREQLSWLPETFENDASLLDAVKGFHQDLLSNDILSRIDKLLSSLQDFNLDQIWIANDVQLRGLSKDLYGDWSLIDRALGIERSEDVVQGLTAAQKKAASAAKKRSSFSIVELNAATRSSVPDEKYVPVQNYFSAMGKVCSQGEPKRENFVTRICAAYQELEEYIPSIRKSLLQEKRATELIKNYLDAVNDLLRFIKPLLGRGNETDKDANFYGEFAFLTDCLFAIVPLYNEVRNYLMQKPYSTEKFKLNFRGSTLLNGWDKNKERDNLGVILRKEGKYFLAIMNKKHNTLFTEGKLQQHTGGECYQKMEYKLIPGSKMLPKVFFSKKGISTFQPSEELLLNYRIGTYKKGEKFNLEHLHKLIDFYKHSIAVHEDWSKFDFHFSDTSSYRDISGFYKEVEQQGYKLTFRNVSVSYINRLVEEGKLYLFQIYNKDFSEYSKGTPNLHTLYWKMLFDPENLKDVVYKLSGEAEVFFRKKSLDVSHPTHPQNEPIEKKNINNKGEKSLFSYDLIKDRRFTVDKFQFHVPITMNFKGEQGDRVNQMVQSYVRNHKGLNVIGIDRGERNLLYLVVINEHGEILEQFSLNEIRNAYNGKEHKIDYHTLLEERSKKRQDARQSWQTIEGIKDLKTGYLSQVIHVITQLMVKYNAIVVLEDLNFGFKSSRQKFEQSVYQQFERKLIDKLNFLVNKKVAPNEVGGLLNAYQLTAPLGNSRKMGKQNGFLFYVPAWHTSKIDPRTGFVNLLDTRYENVANSKEFFAKFASITYNPEKKWFEFAFDYKAFGNRADGSRTKWTICSYGERIETFRNPKNNNQWDTKTVPLTERLTELFSNYGIDYTTNLKEQILNQTDKAFFVELLGALRLTLQLRNSRKSTGEDFLFSPVADENGCFFDSRKANDNEPKDADANGAYHIALKGLWVLDTIRNTEEGKNPKLAITNKEWLSFAQAKPFAHE

SEQ ID NO: 85 - protein, 1244 aa, Unknown
  Description of Unknown: uncultivated organism sequence
  Category: MG13 effectors
  Description: MG13-51 effector
MKQFTNLYPVSKTLRFELIPQGETRAHLNDLIAEDEQRAEDYKEVKKYIDRYHKWFIDDCLSKVPNSPLGEEMIRLLNKYIEANDEKDGEGPDKVQDDLRKLIVKALKSGVSLDKDPEQEERFKSLFSEDLVKNILPNFVQTEEEKSKVAKFRDMTTYFVGFHENRKNMYSEEAQTTAIGYRVIHENLPRFLDNIAVYEKVKPVLSDEIASLEEQLHQNGYVEASCIDSLFSVDFYLRVLTQRGIEQYNAVIGKIVNDESDEIKGLNERINLYNQVHKKEKLPLFKPMYKQILSDREQLSWLPETFENDASLLDAVKGFHQDLLSNDILSRIDKLLSSLQDFNLDQIWIANDVQLRGLSKDLYGDWSLIDRALGIERSGDVVQGLTAAQKQAAAVAKKRSSFSIVELNVATRSRVPDEKYVPVQNYFSAMGKVCAQGEATRENFVTRICAAYQELEEYIPSIRKSLLQEKRATELIKNYLDAVNDLLRFIKPLLGRGNETDKDANFYGEFAFLTDCLFAIVPLYNEVRNYLTQKPYSTEKFKLNFRGSTLLNGWDKNKERDNLGVILRKEGKYFLAIMNKKHNTLFTESKLQQHTAGECYEKMEYKLLPGPNKMLPKVFFSKKGISTFQPSEELLLNYRIGTHKKGEKFNLEHLHKLIDFYKHSIAVHEDWSKFDFHFSDTSSYRDISGFYKEVEQQGYKLTFRNVSVSYINRLVEEGKLYLFQIYNKDFSEYSKGTPNLHTLYWKMLFDPENLKDVVYKLSGEAEVFFRKKSLDVSHPTHPKNEPIEKKNINNKGGKSLFSYDLIKDRRFTVDKFQFHVPITMNFKGEQGDRVNQMVQSYVRNNKGLNVIGIDRGERNLLYLVVINEHGEILEQFSLNEIRNAYNGKEHKIDYHTLLEERSKKRQDARQSWQTIEGIKDLKTGYLSQVIHVITQLMVKYNAIVVLEDLNFGFKSSRQKFEHSVYQQFERKLIDKLNFLVNKKTAPNEVGGLLNAYQLTAPLGNSRKMGKQNGFLFYVPAWHTSKIDPRTGFVNLLDTRYGNVAKAKEFFAKFESITYNPEKKWFEFAFDYKAFGNRADGSRTKWTICTFGERIETFRNPENNNQWDTKTVPLTERLTELFSNYGINFTTNLKEQILNQTDKAFFVVLLGALRLTLQLRNSRKSTGEDFLFSPVADENGRFFDSRIANDNEPKDADANGAYHIALKGLWVLDTIRNTEEGKNPKLAITNKEWLSFAQAKPFAHE

SEQ ID NO: 86 - protein, 1246 aa, Unknown
  Description of Unknown: uncultivated organism sequence
  Category: MG13 effectors
  Description: MG13-52 effector
MSIYNELTNLYPVQKTLKFELCPIGNTLEHFLTSGILEEDEQRHEEYKSVKKIIDRYHKQFIEKALSNFSFKVQNEEKLNSLEEYIELFIHKKSVENGAEKFKKVQDNLRKQITSHFAKQEAFANLFKKELIQDDLPAFVTSTDEKEMIAHFTRFTTYFVDFHKNRKNMYSDEAKATSIAYRLIHENLPKFLTNALAFERIRNSEVANHFEAIQESLNIENIASLFDPLSYSQVLTQAKIDIYNGVIGGKTLDNLGNRSQGLNEYINLYNQTHNERLPLLKPLYKQILSDRSSLSWLPDTFKDDEQLADTLNDWYNEIENEIISPQDGQISLRELLENISTYNTDTIYIQNDTSITDISTRLFKRYDTITNAVSSEFQRILPRKKNESQEKYDERIKKIIDKKSSFSIGYLNYCLSQVPNLSYQTIDSYFKSLGAYERDGVQKENLLTSIERAHFLAQPYIINAKGDNLIHNSEAIKAIRELLVSVNNLLHFIKPLCIGEEEADADASFYGDFTHIWAILEKTTLLYNMVRNYLTRKPYSTDKFKLNFKNDQLLLGWDQNKEVDRTTVLLRKDGYYYLAIMNKAHNRIFDMEHLPDDGDCYEKMDYKLLPGPNKMLPKVFFSKSRIDEFAPDTTLLENYNKGTHKKGNNFRIEDCHALIDFFKASIDKHEDWKKFGFHFSDTKDYEDLSDFYQEVEKQGYKVSFRNVSVSYIDNLVNEGKLYLFKIYNKDFSSNSKGTPNLHTLYWKMLFDERNLKHVVYKLNGEAEIFYRKASIPEDKRIIHHVNDEKRFRSPWNQQRHEVFKHEIIQDRRYTIDKFQFHVPITINFQSKGIGDINEKVQQLIHDGKIRHIIGLDRGERHLLYLSLIDMKGNIVKQISLNEIANQYNGNIYKTHYQNLLKQREEDRLEARKNWQVINNIKNLKQGYLSQVVHKISEMIVEYDAIVVLEDLNFGFMRGRQKIERSIYQQFEVALIEKLNYLVDKKQSVEKECGLLQALQLTNQFESFQKLGKQTGVLFYIPAWNTSKIDPVTGFTNLFDTRCDTREKIHDFISSFDSIKYNPDKNYFEFSFNYDNFTKKAEGSRTHWTICSYGERIETFHNLEKNNNWDMRVIDLSAQIRSLLEEEKIDINGNLKDAILRIDKTSFLKSIMHYIKLMLQMRNSKTGTEEDYILSPVADENGIFFDSRTQKANLPLDADANGAYNIARKGLWIVRQIQKKQENEKLNLAISNKEWLKFAQEKTYLND

SEQ ID NO: 87 - protein, 1249 aa, Unknown
  Description of Unknown: uncultivated organism sequence
  Category: MG13 effectors
  Description: MG13-53 effector
MKQFTNLYPVSKTLRFELQPIGKTKENIEKNGILMRDEKRAEDYKIVKGFIDDYHKQFIKERLWSFKLPLNSEGHLNSLEEYQALYEVSKRNEVQEAEFSEVKDNLRSIIAKRLTESGSAYERIFKKELIREDLIDFLESKEDKDIVRQFADFTTYFSGFHENRKNMYVAEEKSTAIAYRLIHQNLPKFMDNMKTFAKIAETSVAEHFSDIYEGWKEYLNVGSIEEIFRLDYFSETLTQPHIEVYNYIIGKKILEDGTEIKGINEYVNLYNQQQKDKSKRLPFLIPLYKQILSDREKLSWLVEEFDSDEIMLAAINEAYNHLHDLLMGRENESLRSLLLHIKDFDLSQISITNDLSLTDISQHLFSRYDVFTNGIKDELRIITPRKKKESDEDFEDRISKIFKTQKSFSIDFLDKLPQPVMEDGKTRSIEDYFMTLGAVNTETTQKENLFAQIENAYEDARFVLQLKDTGDTLSQNKSAVAKIKALLDALKDLQHFIKPLLGSGEENEKDDLFYGSFQMMWDELDTITPLYNKVRNWLTRKPFSTEKIKLNFDNSQLLGGWDVNKEPDCTGVLLRKDGLFYLGIMDKKSNHIFETDVIPTDGECFDKIDYKLLPGANKMLPKVFFSKSRIDEFAPSESIITSYKRGTHKKGVGFNLAECHRLIDFFKQSINKHEDWSKFGFHFSDTKTYEDISGFYREVEQQGYMLSSRPVSSSYIDTLVSEGKLYLFRIWNKDFSEFSKGTPNLHTLYWKMLFDERNLSDVVYKLNGQAEVFYRKASIKPENRIVHKANQPVANKNELNTKLASTFEYDIIKDKRYTVDKFQFHVPITINFKAAGQTNINTIVQDAIRQEEFSHIIGIDRGERHLLYLSLIDLKGNIVKQMTLNEIINEYKGQTYKTNYHDLLAKREGDRTNARRSWETIETIKELKEGYLSQVVHIISKMMVEYNAIVVLEDLNTGFMRGRQKIERQVYEKFEKMLIEKLNCYIDKQVSPTAKGGLLNPLQLTCDAQKWKRSHQCGCLFYIPAWNTSKIDPVTGFVNLLDTHYDTREKARVFFSKFQRISYNAQKGWFEFAFDYNDFTSKAEGTRTQWTLCTQGERIRTFRNPQKNHQWDDERIALTDAYKQLFDKYDIDINGNIKEAISAQTDAQFFKELMGLMKLLLQMRNSVTNSEEDYLLSPVADDAGHFFDSREGISNLPIDADANGAYNIARKGLWIIRKIQEAPSGERISLSITNKEWLQFAQTKPYFND

SEQ ID NO: 88 - protein, 1274 aa, Unknown
  Description of Unknown: uncultivated organism sequence
  Category: MG13 effectors
  Description: MG13-54 effector
MNELKQFTNLYQLSKTLRFELQPIGKTKDNIETNGILQRDKKRAEDYIRVKQFIDEYHKQFIKERLWNFTLPMESEGCHDSLEEYQSLYELPKRDTAQEAAFTEVKDNLRGIIAKRLTEKGTAYDRIYKKELIREDLIEFLEKDEEKDIVRQFADFTTYFTGFYENRANMYTAEEKSTAIAYRLIHQNLPKFMDNMKAFAKIAQTSVAEHFADIYDGWKEYMNVGSLEGIFQLDYFSETLTQPHIEVYNYIIGKRILEDGTEIKGINEYVNLYNRQQKDKSLRLPFLVPLYKQILSDREKLTWLSEELDSDEKMLAAIKETYTNLHDLLMGEENESLRSLLQHLKDFNLAQVNITNDISLTDISQHLFGQYDVFTRGLKDELRIITPRKKNESDEAFEERITKIFKTQKSFCIAVLDKLPQPVMEDGKPRCIEDYFMTLGAVNTETNQKVNLFAQIENAHEDARAILQMTDTGDMLSQNKPAVAKIKALLDAFKDLQHFIKPLLGSGEENEKDELFYGVFHLIWDELDTITPLYNKVRNWLTRKPYSTEKIKLNFDSPTLLKNMANPQTSSAAIFRDKEGYYYLGILNPKHRNCLNNMPSAADDKAESIEFLNYRQGGDMGKNVQNLMVIDGETRMVHGRKETSGKFAGQNLRLENAKNEYLPADVNAIRLRQSYLTTSSTFNKDDLATFIAYYIPLVKSYYSDFVFHFKEPHEYISLPDFTDHINQQAYQLYFTSVSKAYIDQMVKEGKIFLFRIWNKDFSEYSKGTPNLHTLYWRMLFDEHNLRDVVYMLNGQGAEVFFRKASIKPENRIVHKANNAIANKNSLNEKRTSTFDYDIIKDRRYTVDKFQFHVPITINFKEPKERNINPIVLDTIRNGGFTHVIGIDRGERHLLYISLIDLQGHIVKQMTLNEIVNEYKGLTHKTNYHDLLAKREGERTTARRSWDTIENIKELKEGYLSQVVHVISKMMVEYNAIIVLEDLNKGFTRGRQKIERQVYDKFERMLMDKLNCYIDKQIEPDATGGLLHSLQLTNEYKLFSKLKQKQSGCLFYIPAWNTSKIDPVTGFVNLFDTRYETREKARLFFLRFQRISFNVDKNWFEFAFDYNDFTTKAEETRTQWTLCTHGTRIRSFRNPNKNYQWDDDEIVLTDEFKRLFEKYGIDIRGNLKEAINSQAEAQFYKDLMSLMKLLLQMRNSRINSEVDYLLSPVADEKGLFFDSREGIDGLPDNADANGAYNIARKGLWMMEQIKQSDESAKPKLSISNKEWLRYTQGME

SEQ ID NO: 89 - protein, 1263 aa, Unknown
  Description of Unknown: uncultivated organism sequence
  Category: MG13 effectors
  Description: MG13-55 effector
MRKFNEFVGLYPISKTLRFELKPIGKTLEYIQRNKLLEHDAVRADDYVKVKKIIDKYHKCLIDEALSGFTFETEADVRSNNSLSEYYLYYNLKKRNEQEQKTFKTIQNNLRKQIVNKLTQSEKYKRIDKKELITTDLPDFLTNESEKELVEKFKNFTTYFTEFHKNRKNMYSKEEKSTAIAFRLINENLPKFVDNISAFEKVASSPLAEKINALYEDFKEYLNVEEISRVFRLDYYNELLTQKQIDLYNAIVGGRTEEDNRIQIKGLNQYINEYNQQQTDRSNRLPKLKPLYKQILSDRESVSWLPPKFDSDKDLLIKIKECYDALSEREKVFDKLESILKSLSTYDLSKIYISNDSQLSYISQKMFGRWDIIIGKAIREDCAKRNPQKSRESLEKFAERIDKKLKAIDSISIGDVDECLAQLGETYVKRVEDYFAAMGESEIDDEQTDTTSFKKNIEGAYESVKELLNNADNITDNNLMQDKGNVEKIKTLLDAIKDLQRFIKPLLGKGDEADKDGVFYGEFTSLWTKLDQVTPLYNMVRNYLTSKPYSTKKIKLNFENSSLMKGWDLNKEPDNTTVIFRKDGLYYLGIMGKKYNRVFVDREDLPHDGECYDKMEYKLLPGANKMLPKVFFSETGIQRFRPSEELLGKYERGTHKKGAGFDLGDCRALIDFFKKSIERHDDWKKFDFKFSDTSTYQDISEFYREVEQQGYKMSFRKVSVDYIKSLVEEGKLYLFQIYNKDFSAHSKGTPNMHTLYWKMLFDEENLKDVVYKLNGEAEVFFRKSSITVQSPTHPANSPIKNKNKDNQKKESEFKYDLIKDRRYTVDKFLFHVPITMNFKSVGVSNINQLVKRHIRSATDLHIIGIDRGERHLLYLTVIDSRGNIKEQFSLNEIVNEYNGNTYRTDYHELLDTREGERTEARRNWQTIQNIRKLKEGYLSQVIHKISELAIKYNAVIVLEDLNFGFMRSRQKVEKQVYQKFEKMLIDKLNYLVDKKKPVAETGGLLRAYQLTGEFESFKTLGKQSGILFYVPAWNTSKIDPVTGFVNLFDTHYENIEKAKGFFDKFKSIRYNSDKDWFEFVVDDYTRFSPKAEGTRRDWTICTQGKRIQIYRNHQRNNEWEGREIDLTKAFKEHFEAYGVDISKDLREQINTQNKKEFFEELLRLLRLTLQMRNSMPSSDIDYLISPVADDTGCFFDSRKQAELKENAVLPMNADANGAYNIARKGLLAIRKMKQEENDSAKISLAISNKEWLKFAQTKPYLED

SEQ ID NO: 90 - protein, 1249 aa, Unknown
  Description of Unknown: uncultivated organism sequence
  Category: MG13 effectors
  Description: MG13-56 effector
MKNFESFTNLYPLSKTLRFELRPIGRTLENIQANGLLEQDNHRAESYKLVKAIIDRYHKVFIDEALSHCVLPVENSGNKNSLSEVYQYLTTKDHSEKETDDFNKTQDNLRKMIVSALKKDTHFGRIFKKELIREDLLNNDLQGFDLNEEEYDLIKEFRDFTTYFVGFNENRANMYSEEAKSTAIGYRLIHENLPKFIDNMVIFQKVKVSPVSEYFANIETEMEDMLQGIKVEDIFDLNFFNQVLVQRFIDLYNAVIGGQVASEEDHRKGLNQYINEYNHVQKDKKDRLPKFKPLFKQILSDRIHASWQIDNFESDNEVLKAIENAYETLDEEVISRKDSNLPLLFASISDFDLSGIYVSAKAITDFSQQIFKDWNAIDSALEAACRRSNQPKKKETEEKYAERIKKQRSHIDSYSVGEIIESLVAFQPNPEKSILDYLGGMGRREDKPSIIESIKSAYRDVEELLKTEYPANKNLALDKDNISKVKALLDAIKELQFFIKPLLGTGKESGKDERFYGEFVDYWQTLDIITPLYNKVRNYATRKPYSTAKFKLNFENSTLLNGWDVNKEPDNTSVLLRKDGLYYLAIMKKSCNRVFAVDQYDTVGDCYEKIDYKLLPGANKMLPKVFFAKSRIDEFAPSREVLDIYKRGSFKKGEEFCKADLHTLIDFYKASITKHEDWKKFGFEFSPTSSYDDISGFYREVEQQGYQIRFRKVSCTYIDSLVDQGQIYLFQIYNKDFSPFSKGTPNMHTLYWKMIFDERNLKDVVYKLNGQAEIFFRKSSLPVETPTHPANQPIANKNPLNRKKESLFTYDIVKNRRYRYDKIQFHVPITMNFKSIDSEYINDQVQDYIRQSKDLHFIGIDRGERHLLYLTVIDSKGIIEEQFSLNVINNEYNGTTYSTNYHDLLEERGDDRTKARREWLAIESIKELKEGYLSQVVKKITDLMIKYNAIVVLEDLNMGFKRGRQKVESSAYQQFEHKLIDKLNYLAGKTAPIDKVGGLLKAYQLATPYQNEMGFQNGFVFYIPAWNTSKIDPVTGFTNLFDLHIETMEQAKKFFSKFDYIRWNAANNWFEFAFDYKNFTEKADGSRTQWTLCTQGTRIRTFRNPEKNSEWDNVEVDLTDLFLSLFKSKNIDIKSDLKTQILAQNEKDFFMSLLLCLKLTLQMRNSISNSEVDYLISPVADANGDFFDSRKVDSSLPANADANGAYNIARKGLWMALRIKKSRPEDKVSLKITNKEWLNFAQNKPYLTD

SEQ ID NO: 91 - protein, 1235 aa, Unknown
  Description of Unknown: uncultivated organism sequence
  Category: MG13 effectors
  Description: MG13-57 effector
MKAFTNFYSLPKTLKFELKPIGKTLEFINTNGLLAQDEHRADNYIKVKKIIDDYHKAFIENSLRNLKLKYEDIEAYYSYYIIKNREENQKKAFVNIQTSLRKQIASRFKDNDLSRLFGKELIKEDLINFVKTNDDRILIEEFKNFTTYFTGFHENRKNMYSEEEKSTSIAYRLINENLPKFIDNISTFEKVRNTSIENDFNTIYSELEEYLNVVSIEEIFNLNYFTEVLTQTQIDVYNAIIGGKSFDDGRKIKGLNEYINLYNQTQKDKTKRLPKLKVLFKQILSDRNAISYIPEEFKNDNEVLNSIEKVYQDLNQEVFNKKKEGEYSLKELLLHIKEFELDKIYLRNDLSLTDISKKHLGDWGIINKAIANQYIKENPKKTKDKQEKYDEKIKKYLNSFDSFSIQFINDCLEDKTKKVEDYFIQCKNKDDKNLFEQIEIYYNGIKDLLNTDYPENKQLSQDKESVEKIKLFLDSIKELQWFIKPFLEKGEVAEKDEKFYGEFSSMWKLLDDSITPLYNKVRNYMTKKPYSQEKIKLNFENSTLLDGWDVNKESDNASIILRKDGLYYLGIMNKKHNRIFDNKNIKTNGVCYEKMDYKLLPGANKMLPKVFFSKSRIDEFSPSEKLLENYKNDTHKKGDTFNINDCRDLIDFYKSSIQKHEDWKKFNFKFSDTKTYNDLSGFYREVEQQGYKITFRNVSEEYINTLVEEGKLYLFQIYNKDFSPNSKGTPNMHTLYWKMLFDEENLKNVVYKLNGQAEVFFRKSSIKDENKIIHKANSPILNKNEKNHKKESLFDYDLIKDKRYTIDKFQFHVPITINFKAIGSENINPNVNQYIKENKVKHIIGIDRGERHLLYLSLIDLKGNIIKQFSLNEIRNEYKGETYKTNYHDLLNKKEVDRDEARKNWQTIENIKELKEGYLSQVIHKISQLMVEYNAIVVLEDLNFGFMRGRQKVEKQVYQKFEKMLIDKLNYLVDKKKDPQEEGGLLNAYQLTSKFESFQKLGKQSGFLFYVPAWNTSKIDPTTGFVNLFDTRYENIDKSIEFFGKFSSIEYNKAKDYFEFEFDYSKYTTKADGTKTSWTICTNSTRIETFRNTEKNSQWDSKEIVLSQAFKDLFDKYKINYSSNLKASILSQDKKEFFEELLHLLKLTLQMRNSKTGTDIDYLISPVANNKGVFYDSRVVNDTLPKDADANGAYNIARKGLWVIDQIKKTEDLKNLKLAISNKEWLSYVQSLVEK

SEQ ID NO: 92 - protein, 1272 aa, Unknown
  Description of Unknown: uncultivated organism sequence
  Category: MG13 effectors
  Description: MG13-58 effector
MKQFTNLYPVSKTLRFELQPIGKTKEHIEKTGILQRDEKRAEDYKIVKGFIDDYHKQFIKDRLWSFKLPLHSEGHLDSLEEYQALYEMSKRNDVQEAEFTEIKDNLRSIIAKRLTESGSAYERIFKKELIREDLIDFLESNEDKDIVRQFADFTTYFSGFHENRRNMYVAEEKSTAIAYRLIHQNLPKFMDNMKAFAKIAGTSVAEHFTDIYEGWKEYLNVGSIEEIFRLDYFSETLTQTHIEVYNYIIGKKILEDGTEIKGINEYVNLYNQQQKDKSKRLPFLVPLYKQILSDRDKLSWLAEEFDSDEKMLAAINESYNHLHDLLMGNENESLRSLLLHIKDFDLSQINITNDLSLTDISQHLFGRYDVFTNGIKDELRNITPRKRKEGEEDFEDRISKIFKTQKSFSIDFLDKLPQPVMDDGKLRSIEDYFITLGAVNTETTQKENLFAQIENAYEDARTILQLKDTGDSLSQNKSAVAKIKALLDALKDLQHFIKPLLGSGEENEKDELFYGSFQMMWDELDTVTPLYNKVRNWLTRKPFSTEKIKLNFESPTLLKNMAVPQTSSAAIFRDRQGYYYLGILDSNSRNCINELLSVSADPSGFDFMQYHQGGDMGKNVQNLMVINGEVCKKNGRKERSGQFVGQNLILEKLKNEYLPKDVNEIRLKQSYLTSSSTFSKKDLVRFVEYYIPLVKAYYSEYSFVFKTPSEYKSFADFTDHINQQAYQLSFTPISKDSIDNLVEEGRLYLFRIWNKDFSKFSKGTPNLHTLYWQMLFDERNLQNVVYMLNGQGAEVFYRKASIKPENRIIHKANQPIANKNELNTKRTSTFEYDIIKDKRYTVDKFQFHVPITINFKAAGQTNINPIVQEAIKQGEFSHIIGIDRGERHLLYLSLTDLKGNIVKQMTLNDIVNEYKGQTYKTNYHDLLAKREGDRTDARRSWEAIETIKELKEGYLSQVVHIISKMMIEYNAIIVLEDLNTGFMRGRQKMERQVYEKFERMLIDKLNCYIDKQLSPTDEGGLLHPLQLTCDAQKWKRSHQCGCLFYIPAWNTSKIDPVTGFVNLLDTHYDTREKARVFFSKFQRISFNVPKGWFEFAFDYNDFTTKAEGTRTQWTLCTQGERIRTFRNPQKNNQWDDERIVLTDAFKQLFDKYDIDINGNIKEAISEQTDAQFFKDLLGLMKLLLQMRNSITNSEEDYLLSPVADDAGHFFDSREGISSLPIDADANGAYNIARKGLWIVRKIKETPNGEKTTLSISNKEWLQFAQTKPYIND

SEQ ID NO: 93 - protein, 1252 aa, Unknown
  Description of Unknown: uncultivated organism sequence
  Category: MG13 effectors
  Description: MG13-59 effector
MNTFDQFTNLYNVQKTLCFELQPLGKTKDYIEKNGILMRDEKRAEDYKVVKRIIDEYHKKFIKDRLWSFKLPLNSEGRHNSLEEYQTLYEMSKRDESQESAFTEVKDNLRTIIAKRLTESGTKYDTIFKKELIREDLIDSLVDEEEKELVRQFADFTTYFTGFHENRKNMYSAEEKSTAIAYRLIHQNLPKFMDNMKAFAKIAETSVAEHFADIYEGSKEMLNVGSIEEIFRLDYFSETMTQPHIEVYNSIIGKRVLEDGTEIKGINEYVNLYNQQQKEKSQRLPLLVPLYKQILSDREKLSWLAEEFDCDEKMLAAVNETYARLHDLLMGNENESLRSLLLHLGDYDLEQINIANDLSLTDISQHLFGRYDVFTNGIREELRVITPRKRKETDEQLEDRISKIFKTQKSFSIAFLNSLPQPAMEDGKPRNIEGYFMALGAVNTETTQKENLFAQIENAYENAKSVLQMKETGDMLSQNKPAVAKIKALLDALKDLQHFIKPLLGSGEENEKDELFYGSFQMMWDELDAVTPLYNKVRNWLTRKPYSTEKIKLNFDNAQLLGGWDVNKEPDCTGVLLRKDGFYYLGIMDKKSNRVFEPEATPNDGDCFDKIDYKLLPGPNKMLPKVFFSKSRIDEFAPSEAIVSGYKRGTHKKGADFSLSDCHRLIDFFKQSINKHEDWKKFGFRFSDTSTYEDISGFYREVERQGYMLSSHRVSASYVERLVDEGKLYLFRIWNKDFSEYSKGTPNLHTLYWKMLFDERNLADVVYKLNGQAEVFYRKSSIQPEHRIVHPAGKPIANKNELNAKRTSTFEYDIVKDRRYTVDKFQFHVPITINFKATGQENINPVVQDTIRKGGFTHIIGIDRGERHLLYLSLIDLQGNIVMQMTLNEIINEYNGLKHKTNYHDLLAKREGERTEARRSWDTIENIKEMKEGYLSQVVHIISKMMVEYNAIVVLEDLNTGFMRSRQKIERQVYEKFEKMLIDKLNCYIDKQTDPTSEGGLLHPLQLACEAKKWKRSHQCGCLFYIPAWNTSKIDPVTGFVNLFDTRYENAAKAKAFFGKFGSIRYNANKDWFEFAFNYKDFTTKAEGTRTQWTLCTYRERIRTFRNPQKNHQWDDEEIVLTDAFKQLFDKYDIDMKGNLKEAICAQNDAQFFKDMMELMKLLLQMRNSITNSETDYLLSPVADEKGQFFDSRRGITTLPDNADANGAYNIARKGLWVIRKIQETAENEKPSLAITNKEWLQFAQTKPYLKD

SEQ ID NO: 94 - protein, 1240 aa, Unknown
  Description of Unknown: uncultivated organism sequence
  Category: MG13 effectors
  Description: MG13-60 effector
MKQFTNLYPVSKTLRFELIPDKRTKEYLEQSDLISKDEKRSENYKIVKKIIDRYHKQFIDEVLSTTKLQYAKEGKLNSLEEFYFLYTNSNKTDADKKALDKVKEQLRKQIADALKKDNRFKRIDKKELIREDILKVATQEERPLIDEFRDFTTYFTGFHENRKNMYSPEAQSTAIAYRLIHENLPKFVDNIATFQKILHSPIAENLPVLYKEMEEFLNVNSIEEMFMLDYYSDVLTQPQIEVYNAIIGGRTLEDGTKIQGLNEYVNLYNQRQTLRENRLPKLKPLFKQILSDKEAVSWLPEEFESDQQLLKSVREFYASFKDNVMQQLKELLLNLPNYNLDKIYIPNDLALTDISQSLYGDWSVIKNRINEDFRNEYPQKKKETAEKYEERITKLVKSMDSFSIGYLNSCLTSQVKNICSHFTSLGAVNTDKKQKENIFIQIENAYIDVCDLLEKEYPQNKNLAQDKVHVNNLKAFLDAIKTLQHFIKPFLNTENEAEKDERFYGDITVLGEELNSITPLYNKVRNRMTRKPYSIAKFKLNFENSTLLDGWDVNKERDNSCVILRKDGFYYLAIMRKDSNRIFADAPKVENNADAYEKMEYKLLPGANKMLPKVFFSKSRIDEFQPSSLLLEHYEKGTHKKGDSFSLKDCHELIDFFKASINKHEDWKNFNFKFSPTETYEDLSGFYREVEQMGYKISFKNIPVSYINVMVSEGKLFLFQIYNKDFSQYSKGTPNLHTLYWKMIFDEQNLANVIYKLNGQAEVFYRKKSLNIVKATHPANQAIINKNPFNKKEKSTFKYDLIKDKRFTVDKFQFHVPITINFKAIGMGNINPLVNQFIKNTSDLHIIGIDRGERHLLYVTVIDSKGNIKEQFSMNQIVNEHKGNTYKTDYHDLLDKREEERLKERQSWSTIEGIKELKQGYLSQVIHKIVTLMVKYNAIVVLEDLNMGFKRGRQKVESSVYQQFEKALIEKLNYLVDKQQNPHEYGGLLKGFQLTNKFTSFRDMGRQNGFLFYIPAWNTSKMDPVTGFVNLLHPKYESVEKARSFICKFKSIRFNEKKGWYEFTFDYNDFTAKAEGTRTEWTLCTYSTRIETFRNKEKNSSWDSREVNLTEEFNKLFSQYGISDDENLKEAIAKQTEKHFFETLMHLLNLTLQMRNSKTGTEIDYLISPVTNEEGYFYDSRNCGSSLPENADANGAYNIARKGLWITRQIQSSENFEKVDITMSNKEWLNFAQTKPYLND

SEQ ID NO: 95 - protein, 1252 aa, Unknown
  Description of Unknown: uncultivated organism sequence
  Category: MG13 effectors
  Description: MG13-61 effector
MKDLKQFTNLYPVSKTLRFELQPIGKTKENIEKNGILARDEQRAKDYMLVKGFIDEYHKQYIKDRLWSFKIPMNDEGHLDSLEEYQMFYEMSKRDDTQEASFTEVKDNLRGIIVNRLTENGSPYERIFKKELIREDLIDFLEDDESREIVRQFADFTTYFSGFHENRRNMYSAEEKSTAIAYRLIHQNLPKFMDNMKAFAKIAETSVAEHFPDIYEGWKEYLNVGSIEEIFRLDYFSETLTQPHIEVYNYIIGKKVLEDGTEIKGINEYVNLYNQQQKDKSKRLPFLVPLYKQILSDREKLSWLAEEFDSDDKMLSAINELYNHLHDLLMGKENESLRLLLSHLKDYNLEQINIANDLSLTDISQQLFGRYDVFTNGIKEELRAITPRKKKESDEEFEDRISKIFKTQKSFSIALLDKLPQPVMEDAKPRRVEDYFMSLGAVNTEKTQKENLFAQIENAYEDVRSILQMKDTSNMLSQNKVAVAKIKTLLDALKDLQHFIKPLLGSSEENEKDELFYGSFQMMWDELDTLTPLYNKVRNWLTRKPYSTEKIKLNFDNAQLLGGWDVNKEPDCTGVLLKKDGLYYLGIMDKKSNRIFDADVTPADGDCYDKIDYKLLPGANKMLPKVFFSKSRIDEFAPSEAIIDKYKRGTHKKGKDFSLTDCHRLIDFFKSSISKHEDWSKFGFRFSDTKTYEDISGFYREVEQQGYMLSSHPVSASYIHQLVDEGKLYLFRIWNKDFSEYSKGTPNLHTLYWKMLFDERNLADVVYKLNGQAEVFYRKASIKAENRIIHPAKHPIANKNVLNENRTSTFEYDIIKDRRYTVDKFQFHVPITIGFKAAGQTNINPVVQETIRSGGFSHIIGIDRGERHLLYFSLIDLKGNIVKQMTLNDIVNEYKGVTYKTNYHDLLAKREGERTDARRSWDTIETIKELKEGYLSQVVHIISKMMVEYNAIIVLEDLNTGFMRGRQKIERQVYEKFERMLIDKLNCYIDKQANPSENGGLLHPLQLTCDAQKWKRSHQCGCLFYIPAWNTSKIDPVTGFVNLFDTRYDTREKARLFFSKFQRISYNAKKDWFEFAFDYNDFTTKAEGTRTEWTLCTYGERIRTFRNPEKNHQWDDERIMLTEEFKQLFDRYDIDIHGNLKEAISAQSDAQFFKELLSLMKLLLQMRNSITNSEEDYLLSPVADENGHFYDSREDNISLPNNADANGAYNIARKGLWLIEQIKHADELSKLKLAISNKEWLQFAQTKPYLND

SEQ ID NO: 96 - protein, 1249 aa, Unknown
  Description of Unknown: uncultivated organism sequence
  Category: MG13 effectors
  Description: MG13-62 effector
MKQFINQYQVAKTLRFDLQPIGKTKDNIEKTSILARDEQRAKDYVIVKGFIDDYHMQFIKDRLWSFKIPLKSEGHLDSLEEYQMLYGLSKRDEAQETAFTEVKDNLRSIIAKRLTGNGSAYDRIFKKELIREDLVDFLEKEEDKEIVRQFADFTTYFTGFHENRRNMYSAEEKSTAIAYRLIHQNLPKFMHNLKAFAKIAETPVAEHFADIYKGWEEHLNVGSIEEIFQLDYFSETLTQPHIEVYNYIIGKKILEDGTEIKGINEYVNLYNQQQKDKSKRLPFLVPLYKQILSDREKLSWMAEEFDSDDKMLSAINESYSHLHDLLMGEENDSLRSLLLHIKDFNLEQINITNDLSLTDISQHLFNRYDVFTNGIKDELRTITPRKKKETDEIFEDRISKIFKTQKSFSIAFLDKLPQPVMEDGKPRRVEEYFLSLGAVNTETTQKENLFARIEHAYEDAQSILQMKDTIDTLSQNKPAVAKIKALLDALKDLQHFIKPLLGSGEENEKDELFYGSFQMMWDELDTVTPLYNKVRNWLTRKPYSTEKIKLNFDNAQLLAGWDVNKEADCTGVLLQRDGFYYLGIMNKKTNRIFDADVTPSHGECYDKIDYKLLPGANKMLPKVFFSKSRIDEFAPSDAIINSYKRGTHKKGTDFSLSDCHRLIDFFKASIRKHEDWSKFGFHFSDTKIYDDISGFYREVEQQGYKLASHPVSVSYVHQLVEEGKLYLFRIWNKDFSQFSKGTPNLHTLYWKMLFDPRNLEDVVYKLNGQAEVFYRKASIKPENRIIHPAHRPITNKNEFNEKRTSTFEYDIIKDRRYTVDKFQFHVPITINFKATGQTNINPIVQEAIRRRGFTHIIGIDRGERHLLYLSMIDLKGNIVKQMTLNDIINEYNGITYRTNYHDLLAKREGERTDARRSWDTIENIKELKEGYLSQVVHIISKMMVEYNAIVVLEDLNTEFMRGRQKIERQVYEKFEKMLIETLNCYIDKHADPLEGGGLLHPLQLTCDVKKWKRSHQCGCLFYIPAWNTSKIDPVTGFVNLFDTRYDTREKARLFFSKFQRISYNSEKDWFEFTFDYSNFTSKAEGTRTKWTLCTYGERIRTFRNPKKNHQWDDEQIVLTKDFKQLFDKYGIDIHGNLKEAISTQSDSQFFRDMLGLMKLLLQMRNSITNSEVDYLLSPVADEAGHFFDSREEIESLPNNADANGAFNIARKGLWVIRKIQETAENDKISLAISNKEWLQFAQTKPYLND

SEQ ID NO: 97 - protein, 1249 aa, Unknown
  Description of Unknown: uncultivated organism sequence
  Category: MG13 effectors
  Description: MG13-63 effector
MKEFTNLYPVSKTLRFELQPIGMTKENIEKNGILQRDEKRAEDYKIVKGFIDEYHKQFIKERLWSFKLPLNCEGHLNSLEEYQALYELPKRNDAQEAEFTEIKDNLRSIIAKRLTESGSAYERIFKKELIREDLIDFLESNEDKEIVRQFADFTTYFSGFHENRRNMYVAEEKSTAIAYRLIHQNLPKFMDNMKAFAKIAETPVAEHFDDIYEGWKEFLNVGSIDEIFRLDYFTETLTQPHIEVYNYIIGKKILEDGTEIKGINEYVNLYNQQQKDKSKRLPFLVPLYKQILSDREKLSWLGEEFDSDEKMLAAINESYTHLHDLLMGDENESLRALLLHIKDFDLTKINITNDLSLTDISQHLFGRYDVFTNGIKDELRNITPRKRKESDEELEDRISKIFKTQKSFSIDFLDKLPQPVMDDEKPRSIEDYFMTLGAVNTETTQKVNLFAQIENAYEDARTILQLTDTGDTLSQNKSAVAKIKALLDALKDLQHFIKPLLGSGEENEKDELFYGSFQMMWDELDTVTPLYNKVRNWLTRKPFSTEKIKLNFDNSQLLGGWDVNKEPDCTGVILRKEGFYYLGIMDKKSNHIFEADITPSVGECYDKIDYKLLPGANKMLPKVFFSKSRIDEFAPSEAIISSYKRGTHKKGADFNLVECHRLIDFLKQSINKHEDWSKFNFHFSDTKSYEDISGFYREVEQQGYMLSSHPVSSSYINQLVDEGKLYLFRIWSKDFSEFSKGTPNLHTLYWKMLFDERNLADVVYKLNGQAEVFYRKASIKPENRIIHKANHSIANKNELNSKRTSTFEYDIIKDRRYTVDKFEFHVPITINFKAAGQTNINPIVQDVIRQGGFSHIIGIDRGERHLLYLSLIDQKGNIIKQMTLNEIINEYKGQTYKTNYHDLLAKREGDRTDARRSWETIETIKELKEGYLSQVVHIISKMMVEYNAIVVLEDLNTGFMRGRQKIERQVYEKFEKMLIEKLNCYIDKHEAPSENTGLLHPLQLTCDAQKWKRSHQCGCLFYIPAWNTSKIDPVTGFTNLLDTRYDTREKARVFFSKFQRISYNAEKGWFEFALDYNDFTAKAEGTRTQWTLCTYGERIRTFRNPKKNHQWDDERIVLTDAFKQLFDTYDIDINGNLKETISAQTDAQFFKELLGLMKLLLQMRNSITNSEEDFLLSPVADDAGHFFDSREGNSSLPIDADANGAYNIARKGLWVIRKIQETANEEKPSLSITNKEWLHFAQTKPYLKD

SEQ ID NO: 98 - protein, 1252 aa, Unknown
  Description of Unknown: uncultivated organism sequence
  Category: MG13 effectors
  Description: MG13-64 effector
MNNLKQFTGLYPVNKTLRFELKPVGKTKENIENKGVLERDSQRAVDYKVVKGFIDEYHKQFIKDRLWSFKLPLFSEGRLDSLEEYMALYELSKRDEAQEAEFSEVKDNLRSIIAKRLTESGSAYERIFKKELIREDLIAFLEKDEDKEIVRQFADFTTYFGGFHENRKNMYSAEEKSTAIAYRLIHQNLPKFMDNMKAFAKIAETSVAEHFADIYMGWKEYLNVGSIEEIFCLDYFSETLTQPHIEVYNYIIGKKILEDGTEIKGINEYVNLYNQQQKDKSKRLPFLVPLYKQILSDREKLSWLTEEFDSDEKMLAAINESYEHLYDLLMGNENESLRSLLIHLKDFNLAQINITNDLSLTDISQHLFSRYDVFTNGIKDKLRIITPRKKKENDEDFEDRISKIFKTQKSFSIDFLDKLPQPVMDDGKPRSVEDYFMSLGTVNTETTQKENLFAKIENAYEDVRPILQMKDTGDALSQNKPAVAKIKSLLDALKDLQHFIKPLLGSGEENGKDELFYGSFQIMWDELDTVTPLYNKVRNWLTRKPYSTEKIKLNFDNAQLLGGWDVNKEPDCTGILLRKDGQYYLGIMDKKSNRIFEADVTPADGDCYDKIDYKLLPGANKMLPKVFFSKSRIDEFAPSEAIVSSYKKGTHKKGAYFNLLECHRLIDFFKQSINKHEDWSKFGFRFSDTETYEDISGFYREVEQQGYMLSSHPVSSLYINQLVDEGKLYLFRIWNKDFSEFSKGTPNLHTLYWKMLFDERNLADVVYKLNGQAEVFYRKASIKPENRVVHQANKPIDNKNGLNKKRTSTFEYDIIKDKRYTVDKFQFHVPITINFKATGQNNINPVVQETIRQGGFSHIIGIDRGERHLLYLSLIDLKGNIVKQMTLNDIVNEYKGQTYKTNYHDLLAKREGERTDARRSWETIETIKELKEGFLSQVVHIISKMMVEYNAIVVLEDLNTGFMRGRQKIERQVYEKFEKMLIEKLNCYIDKHAAPTEDTGLLHPLQLTCDAQKWKRSHQCGCLFYIPAWNTSKIDPVTGFVNLLDTRYDTREKARVFFSKFQRISFNSEKGWFEFVLDYNDFTTKAEGTRTQWTLCTYGERIRTFRNPQKNHQWDDERIMLTEAFKQLFDKYDIEINGNLKEAISAQSDAQFFKGLLSLMKLLLQMRNSITNSEEDFLLSPVSDESGHFFDSREGISCLPIDADANGAYNIARKGLWVIRKIQAVQDGEKLSLAITNKEWLQFAQTKPYLKE

SEQ ID NO: 99 - protein, 1249 aa, Unknown
  Description of Unknown: uncultivated organism sequence
  Category: MG13 effectors
  Description: MG13-65 effector
MKNFESFTNLYPLSKTLRFELRPIGRTLENIQANGLLEQDNHRAESYKLVKAIIDRYHKVFIDEALSHCVLPVENSGNKNSLSEVYQYLTTKDHSEKETDDFNKTQDNLRKMIVSALKKDTHFGRIFKKELIREDLLNNDLQGFDLNEEEYDLIKEFRDFTTYFVGFNENRANMYSEEAKSTAIGYRLIHENLPKFIDNMVIFQKVKVSPVSEYFANIETEMEDMLQGIKVEDIFDLNFFNQVLVQRFIDLYNAVIGGQVASEEDHRKGLNQYINEYNQVQKDKKDRLPKFKPLFKQILSDRIHASWQIDNFESDNEVLKAIENAYETLDEEVISRKDSNLPLLFASISDFDLSGIYVSAKAITDFSQQIFKDWNAIDSALEAACRRSNQPKKKETEEKYAERIKKQRSHIDSYSVGEIIESLVAFQPNPEKSILDYLGGMGRREDKPSIIESIKSAYRDVEELLKTEYPANKNLALDKDNISKVKALLDAIKELQFFIKPLLGTGKESGKDERFYGEFVDYWQTLDIITPLYNKVRNYATRKPYSTAKFKLNFENSTLLNGWDVNKEPDNTSVLLRKDGLYYLAIMKKSCNRVFAVDQYDTVGDCYEKIDYKLLPGANKMLPKVFFAKSRIDEFAPSREVLDIYKRGSFKKGEEFCKADLHTLIDFYKASITKHEDWKKFGFEFSPTSSYDDISGFYREVEQQGYQIRFRKVSCTYIDSLVDQGQIYLFQIYNKDFSPFSKGTPNMHTLYWKMIFDERNLKDVVYKLNGQAEIFFRKSSLPVETPTHPANQPIANKNPLNRKKESLFTYDIVKNRRYRYDKFQFHVPITMNFKSIGSEYINDQVQDYIRQSKDLHFIGIDRGERHLLYLTVIDSKGIIEEQFSLNVINNEYNGTTYSTNYHDLLEERGDDRTKARREWLAIESIKELKEGYLSQVVKKITDLMIKYNAIVVLEDLNMGFKRGRQKVESSAYQQFEHKLIDKLNYLAGKTAPIDKVGGLLKAYQLATPYQNEMGFQNGFVFYIPAWNTSKIDPVTGFTNLFDLHIETMEQAKKFFSKFDYIRWNAANNWFEFAFDYKNFTEKADGSRTQWTLCTQGTRIRTFRNPEKNSEWDNVEVDLTDQFLSLFKSKNIDIKSDLKTQILAQNEKDFFMSLLLCLKLTLQMRNSISNSEVDYLISPVADANGDFFDSRKVDSSLPANADANGAYNIARKGLWMARRIKKSRPEDKVSLKITNKEWLNFAQNKPYLTD

SEQ ID NO: 100 - protein, 1171 aa, Unknown
  Description of Unknown: uncultivated organism sequence
  Category: MG13 effectors
  Description: MG13-66 effector
MIRLLNKYIEANNEKDGEGPDKVQDDLRKLIVKALKSGVSLDKDPEQEERFKSLFSEKLVKNILPNFVQTEEEKSKVAKFRDMTTYFVGFHKNRENMYSEEAQTTAISYRLIHENLPRFLDNIAVYEKVKPVLSDEIASLEEQLHQNGYVEASCIDSLFSVDFYLRVLTQRGIEQYNAVIGKIVNDESDEIKGLNERINLYNQVHKKEKLPLFKPMYKQILSDREQLSWLPETFENDASLLDAVKGFHQDLLSNDILSRIDKLLSSLQDFNLDQIWIANDVQLRGLSKDLYGDWSLIDRALGIERSEDVVQGLTAAQKKAASAAKKRSSFSIVELNAATRSSVPDEKYVPVQNYFSAMGKVCAQGEATRENFVTRICAAYQELEEYIPSIRKSLLQEKRATELIKNYLDAVNDLLRFIKPLLGRGDETDKDANFYGEFTFLTDCLFAIVPLYNEVRNYLTQKPYSTEKFKLNFRGSTLLNGWDKNKERVNLGVILRKEGKYFLAIMNKKHNTLFTEGKLQQHTGGECYQKMEYKLIPGSKMLPKVFFSKKGISTFQPSEELLLNYRIGTYKKGEKFNLEHLHKLIDFYKHSIAVHEDWSKFDFHFSDTSSYRDISGFYKEVEQQGYKLTFRNVSVSYINRLVEEGKLYLFQIYNKDFSEYSKGTPNLHTLYWKMLFDPENLKDVVYKLSGEAEVFFRKKSLDVSHPTHPKNEPIEKKNKNNKGEKSLFSYDLIKDRRFTVDKFQFHVPITMNFKGEQGDRVNQMVQSYVRNNKGLNVIGIDRGERNLLYLVVINEHGEILEQFSLNEIRNAYNGKEHKIDYHTLLEERSKKRQDARQSWQTIEGIKDLKTGYLSQVIHVITQLMVKYNAIVVLEDLNLGFKSSRQKFEQSVYQQFERKLIDKLNFLVNKKAAPNEMGGLLNAYQLTAPFESFRKMGKQNGFLFYVPAWHTSKIDPRTGFVNLLDTRYENVAKAKEFFAKFESITYNPEKKWFEFAFDYKAFGNRADGSRTKWTICSYGERIETFRNPKNNNQWDTKSVPLTERLTELFSKYGIDYTTNLKEQILNQTDKAFFVELLGALRLTLQLRNSRKSTGEDFLFSPVADENGCFFDSRKANDNEPKDADANGAYHIALKGLWALDTIRNTEEGKNPKLAITNKEWLSFAQAKPFAHE

SEQ ID NO: 101 - protein, 1275 aa, Unknown
  Description of Unknown: uncultivated organism sequence
  Category: MG13 effectors
  Description: MG13-67 effector
MNNLNDLTGQYPVSKTIRFDLQPIGKTKENIEKGGILQQDEQRAEDYKTVKGFIDEYHKQFIKDRLWNFRLPLISEGHLDSLEEYQTLYLLAKRNDAQEAEFKEVKDNLRSIIARRLTEKGSAFERIFKKELIREDLIDFVEKPEDKDLVKSFADFTTYFTEFHKNRANMYTAEEKSTAIAYRLIHQNLPKFMDNIKAFAKIAQTSVAGHFVEIYNGSKEYLNVGSLEEVFQLDYFSDTMTQPHIEVYNSIIGKRVLEDGTEIKGINEYVNLYNQQQKDKRQRLPLLVPLYKQILSDREKLSWLAQEFDSDKKMLAAINETFIHLREILMGEDSESLRSILTHLKDFDLTQINITNDLSLTDISQHLFKRFDVFSNGIKAKIRSITPKKKKESDEELEDRVSKIFKTQKSFSIAFLDNLPQPEMEDGKRRSVADYFTALGAVNNEVTQKENLFAQIEIAYEDARDVLQMTETGDTLSQDKPAVAKIKALLDALKDLQHFIKPLRGSGEENEKDELFYGSFLMMWDELDTVTPLYNKVRNWLTRKPYSTEKIKLNFDSPTLLNGWPNPQTNSGAIFRDEEGLYYLAILDAQNRACLNELSSNVNGNEDHIEMMKYLQGGDMGKNVQNLMVIDGEVRKVNGRKETSGEFAGQNLRLENAKHQYLPKNINEIRLKQSYLTSSPTFNKKDLVSFIEYYIPLVEAYYSDYVFHFRKSSEYKSFADFTEHINQQAYQVQFKPVSKTSLYSLVEEGKLYLFRIWNKDFSEFSKGTPNLHTLYWKMLFDERNLADVVYKLNGQAEVFYRKASIKPENKIVHPANRAIANKNELNKKRTSSFDYDIIKDRRYTVDKFQFHVPITINFKATGQTNVNPIVQDTIRRGGFTHIIGIDRGERHLLYVSLIDLKGNIVKQMTLNEILNEYKGLTHKTNYHDLLAKREGERTDARRSWDTIENIKELKEGYLSQVVHIISKMMVEYNAIVVLEDLNPGFMRGRQKIERQVYEKFEKMLIEKLNCYIDKKAEPIEIGGLLHPLQLSCDIKKWKKSHQCGCLFYIPAWNTSKIDPVTGFVNLFDTHYETREKARSFFSKFQRIHFNSEKNWFEFTFDYGNFTTKAEGTRTQWTLCSYGTRIRNFRNPLKNHQWDDEEVELVDEFKHLFDKYSIDIFGNLKESICNQTDAQFYKELMGLMKLLLQMRNSRTNSEVDYLLSPVADEQGHFFDSREGIGSLPDNADANGAFNIARKGLWIIRKVQGTPSDEKMSLAISNKEWLQFAQNRPYLND

SEQ ID NO: 102 - protein, 1249 aa, Unknown
  Description of Unknown: uncultivated organism sequence
  Category: MG13 effectors
  Description: MG13-68 effector
MKNFESFTNLYPLSKTLRFELRPIGRTLENIQANGLLEQDNHRAESYKLVKAIIDRYHKVFIDEALSHCVLPVENSGNKNSLSEVYQYLTTKDHSEKETNDFNKTQDNLRKMIVSALKKDTHFGRIFKKELIREDLLNNDLQGFDLNEEEYDLIKEFRDFTTYFVGFNENRANMYSEEAKSTAIGYRLIHENLPKFIDNMVIFQKVKVSPVSEYFANIETKMEDMLQGIKVEDIFDLNFFNQVLVQRFIDLYNAVIGGQVASEEDHRKGLNQYINEYNQVQKDKKDRLPKFKPLFKQILSDRIHASWQIDNFESDNEVLKAIENAYETLDEEVISRKDSNLPLLFASISDFDLSGIYVSAKAITDFSQQIFKDWNAIDSALEAACRRSNQPKKKETEEKYAERIKKQRSHIDSYSVGEIIESLVAFQPNPEKSILDYLGGMGRREDKPSIIESIKSAYRDVEELLKTEYPANKNLALDKDNISKVKALLDAIKELQFFIKPLLGTGKESGKDERFYGEFVDYWQTLDIITPLYNKVRNYATRKPYSTAKFKLNFENSTLLNGWDVNKEPDNTSVLLRKDGLYYLAIMKKSCNRVFAVDQYDTVGDCYEKIDYKLLPGANKMLPKVFFAKSRIDEFAPSREVLDIYKRGSFKKGEEFCKADLHTLIDFYKASITKHEDWKKFGFEFSPTSSYDDISGFYREVEQQGYQIRFRKVSCTYIDSLVDQGQIYLFQIYNKDFSPFSKGTPNMHTLYWKMIFDERNLKDVVYKLNGQAEIFFRKSSLPVETPTHPANQPIANKNPLNRKKESLFTYDIVKNRRYRYDKFQFHVPITMNFKSIGSEYINDQVQDYIRQSKDLHFIGIDRGERHLLYLTVIDSKGIIEEQFSLNVINNEYNGTTYSTNYHDLLEERGDDRTKARREWLAIESIKELKEGYLSQVVKKITDLMIKYNAIVVLEDLNMGFKRGRQKVESSAYQQFEHKLIDKLNYLAGKTAPIDKVGGLLKAYQLATPYQNEMGFQNGFVFYIPAWNTSKIDPVTGFTNLFDLHIETMEQAKKFFSKFDYIRWNAANNWFEFAFDYKNFTEKADGSRTQWTLCTQGTRIRTFRNPEKNSEWDNVEVDLTDQFLSLFKSKNIDIKSDLKTQILAQNEKDFFMSLLLCLKLTLQMRNSISNSEVDYLISPVADANGDFFDSRKVDSSLPANADANGAYNIARKGLWMARRIKKSRPEDKVSLKITNKEWLNFAQNKPYLTD

SEQ ID NO: 103 - protein, 1249 aa, Unknown
  Description of Unknown: uncultivated organism sequence
  Category: MG13 effectors
  Description: MG13-69 effector
MKQFTNLYPVSKTLRFELQPIGKTKENIEKKGILTRDEKRAKDYQIVKGFIDEYHKQFIKDRLWNFKLPLASEGNLDSLEEYQMFYEMPRRDDAQETDFSEVKDNLRAIIANRLRESGSAYDRIFKKELIREDLVEFLSDEDDKNIVRQFADFTTYFSGFHENRRNMYSAEEKSTAIAYRLIHQNLPKFMDNMKAFTKIAKTSVAEHFADIYAGWKEYLNVGSIEEVFRLDYFSETLTQPHIEVYNYIIGKKVLEDGKEIKGINEYINLYNQQQKDKSKRLPFLVPLYKQILSDREKLSWLAEEFDSDEKMLAAIDKLYTHLHELLMGEENESLRSLLMHMKDYDLSQINITNDLSLTDISQHLFNRYDVYTNGVKEQLKGITPRKKKENDEDFEDRISKIFKTQKSFSISLLNGLPHPEIEDSQPRRIEEYFMAMGAVNTATTQRENLFSKIESAYEDARAFLQMKDTGDSLSQNKPAVAKIKALLDAFKDLQHFIKPLLGSGEELEKDELFYGSFQMIWDELDTVTPLYNKVRNWLTRKPYSTEKIKLNFDNSQLLGGWDVNKEPDCTGVLLRKDGFFYLGIMDKRYNHIFEADLPHSDDDCYDKVDYKLLPGANKMLPKVFFSKSRIDEFAPSAAIVSSYKRGTHKKGKNFDLSDCHRLIDFFKQSIQKHADWCKFGFHFSDTQTYEDISGFYREVEEQGYMLSSHQVPSSYINELVDGGKLYLFRIWNKDFSENSKGTPNLHTLYWKMLFDKRNLSDVVYKLNGQAEVFFRKASIKPENRVVHKANQSITNKNALNKKTTSTFEYDIIKDRRYTVDKFQFHVPITINFKASGQTNINPIVQETIRQGGFKHIIGLDRGERHLLYLSLIDLNGNIVKQMTLNDIVNEYNGQTYKTNYHDLLTKREGERTDARRSWDTIETIKELKEGYLSQVIHIISKMMVEYKAIVVLEDLNTGFMRGRQKIERQVYEKFEKMLIEKLNCYIDKKADATDATGLLHPLQLTCDAKKWNRSHQCGCLFYIPAWNTSKIDPVTGFVNLLDTRYETREKAHLFFSKFQRISFNQKKGWFEFAFDYADFTTKAEGTRTQWTLCTYGERIRTFRNPQKNNQWDNERIVLTDEFKRIFDEKGIDIFGNLKDAICNQRDAKFFKDLLGLMKLLLQMRNSITNSEEDYLLSPVADEKGHFFDSREGISSLPIDADANGAYNIARKGLWVIRKIQETPENERPSLSITNKEWLQFAQTKPYLKE

SEQ ID NO: 104 - protein, 1249 aa, Unknown
  Description of Unknown: uncultivated organism sequence
  Category: MG13 effectors
  Description: MG13-70 effector
MEQFTNLYQVSKTLRFDLQPIGKTQENIEKNGILARDEQRAKDYLLVKGFIDDYHKQFIKERLWDFKLPLESEGRLDSLQEYQELYELSKRDDAQEAAFTEIKDNLRSIIAKRLTESGSAYERIFKKELIREDLVEFLEKEEAKDIVRQFADFTTYFSGFHENRRNMYSAEEKSTAIAYRLIHQNLPKFLDNMKAFAKIAETSVAKHFADIYDGWKEHLNVGSIEEIFRLDYFSETLTQTHIEVYNYIIGKKIFEDGTEIKGINEYVNLYNQQQKDKSQRLPFLVPLYKQILSDREKLSWMAEEFDSDEQMLSAINESYNHLHDLLMGDENDSLRSLLLHIKDFNLSQINITNDLSLTDISQHLFSRYDVFTNGIKDELRIITPRKKKESDEDFEDRISKIFKTQKSFSVAFLDNLPQPVMDDGKSRSVEDYFMSLGAVNTETTQKENLFAQIENAYEDARHILQMIDTGDTLSQNKPAVAKVKALLDSLKDLQHFIKPLLGSGEENEKDELFYGLFQMIWDELNTVTPLYNKVRNWLTRKPYSTEKIKLNFDNAQLLGGWDVNKEPDCTGVLLQHDGFYYLGIMNKKANHIFDADVTPSDGDCYDKIDYKLLPGANKMLPKVFFSRSRIDEFAPSETIVNSYKRGTHKKGTGFSLSDCHRLIDFFKTSISKHEDWSKFGFRFSDTKTYEDISGFYREVEQQGYMLSSHPVSTSYIHQLVEDGKLYLFRIWNKDFSEFSKGTPNMHTLYWKMLFDERNLADVVYKLNGQAEVFYRKASIKLENRIVHPSNRPIANKNELNKKRTSTFEYDIIKDRRYTVDKFQFHVPITINFKAAGQTNINPIVQDAIRRGGFKHIIGIDRGERHLLYLSLIDLKGNIVKQMTLNDIVNEYKGITYRTNYHDLLAKREGDRTEARRSWDTIETIKELKEGYLSQVIHIISKMMVEYNAIVVLEDLNTGFMRGRQKIERQVYEKFEKMLIEKLNCYIDKQADPSEITGLLHPLQLTCDAQKWKRSHQCGCLFYIPAWNTSKIDPVTGFVNLLDTRYDTREKARLFFSKFQRISFNAKKDWFEFAFDYNDFTTKAEGTRTNWTLCTYGERIRTFRNPQKNNQWDDERIVLTDAFKQLFDKYNIDIIGNIKESISAQSDTQFFKELLGLMKLLLQMRNSITNSEEDYLLSPVADQNGHFFDSRESNDSLPNNADANGAYNIARKGLWIIEQIKQTEDLSKLKLAVSNKEWLQFAQNKPYLND

SEQ ID NO: 105 - protein, 1220 aa, Unknown
  Description of Unknown: uncultivated organism sequence
  Category: MG13 effectors
  Description: MG13-71 effector
MNTLKDFTNLYQVSKTLRFELKPVGKTLEHIQNNGILENDEHRAESYILVKKIIDEYHKHFIEDAFQGFKLDSNDLSEYYLYFQIRNREESQQKAFETVQSKLRKQISKSFDTKRLFGKELIREDLPDFVNEETDKQLVQEFKDFTTYFTGFHENRKNMYSHEDKSTAIAYRLIHENLPKFINNMTVFDKIKQPLANNLQTLYVDFKEYLNDREIAELFTLNYFSEVLAQTQIDVYNLMIGGKTLEDGTKIKGLNEYINLYNQQQTNRNARLPKFTPLFKQILSDRETISWLPEMFANDNELLESIEKVYQEIPFGEIKSIIEKLHEYDLSKIYVRNDLGITDISQHLLGNYAAIPNAIKENIKQSNPQKRTENQENYEERINKLFKSRGSFSIELINKVIPEKSLTTYFKDYNKTEENPDLLNRIQNCYLQVKNLLNTDYPADKSLKQDKQNVEKIKQLLDNIKEVQQFIKPLLGKGDEADKDAIFYAEFEKLWHKLDNITPLYNMVRNYITQKPYSTGKIKLNFENSTLLDGWDVNKERNNSSIILRKGGLYYLAIMNKKHNTVFLKENTPSTGSCYEKMEYKLLPGANKMLPKVFFSESRIDEFNPSKQLLDNYNNETHKKGEKFNLQDCRSLIDFFKQSINKHEDWENFGFQFSDTSTYQDLSGFYREVEQQGYKITFRNISEDYINQLVDEGKLYLFQVYNKDFSPFSKGTPNMHTLYWRMLFSPENLQNVVYKLNGQAEVFFRKKSLNYTDETWQKGHHYDKLKNKFAYPIISKRRYALDKFQFHVPVTMNYKAVGNERINELVNQFIKNNGIEHIIGIDRGERHLLYLSLIDLNGKIVKQFSLNEIVNEYKDNIYKINYRDLLDKKETERDDARKSWNEIETIKELKEGYLSQVIHKITQLIIEYKAIVVLEDLNFGFMRGRQKVEKQVYQKFEKMLIDKLNYLVDKKKQVADEGGLLNAYQLTNKFESFKKEGKQNGFLFYVPAWNTSKIDPVTGFVNLFSVKYESVSKAQEFFKKFDCIRFNQIDDNNCRFDFYFDYKNFTDKAEGSQTKWTLCSSNDTRYRWNKSLNQGKGAQEEVKVTEALKLLFSDKDYNIAYGDGKDLRERISNQTSAKFFKELMSLLSTLLSMRHNNGKKCDEEQDFILSPVEPFFNSLHATDEHPKDADANGAYNIARKGLWAIEQIKRANDLKNVSLAISNKQWLQFVQQSFEL

SEQ ID NO: 106 - protein, 1249 aa, Unknown
  Description of Unknown: uncultivated organism sequence
  Category: MG13 effectors
  Description: MG13-72 effector
MEQFTNLYPLSKTLRFELIPHEKTKELLERTDYLAQDEKRAESYKIVKGIIDRYHKSFIEDVLSKPIEDQGEKRPILKYAKESTKNCDSLEEFYELYSKSQKSETEKNTLEIIQNNLRKQIVYALTQDARFKNLDKKELIYQDIYAIAKPEEIPFIKEFEGFATYFVGFHENRMNMYSSEAKSTAIGNRLINENLPIFTDNMGTFQKLLNSPVSEHFDTICKDMEDILPYDNIEEIFMLHNYNDFLTQKQITVYNAIIGGRVLEDGTKIQGINEYVNLYNQQQPTRETRLPKLKTLFKQILSDKESVSWLAEEFTSDAEMLKSIRDYYTSFKNNASQQMIDILTNIKSYDIDHIFIPNDISLTTISKKVFKDWEAINKSIIKRLKEDNPQKGREKDENYEERMSKAFKSYDSFSLGLINSCTATDDVCIYFSKIAKTDEETGLSHNLLDNIEEAYDKAKEYLNNGYPSNLNLAQDKSTVQKIKTLLDSIKDLQKFIKPLLGSGTEAVKDERFYGDISLVWEIIDQITPLYNKVRNRMTRKAYSTEKIKLNFENSTLLAGWDLNKERDNTSIILKKDGLYYLAIMRKEFNKVFQNAPRQTSDEDSFEKMEYKLLPGANKMLPKVFFSKSRIDEFAPSDVLIEKYKKGTHKKGSNFNIDDCHNLIDFFKSSIQKHDDWSKFNFKFSPTNSYEDMSGFYREVEKMGYKITFKKIPADYIEELVTTGKIFLFKIYNKDFSQYSKGTPNLHTLYWKMVFDDNNLKDVVFKLNGEAEIFYRKKSLSYKSPTHPAHQPIRNKNPYNAKEESNFAYDLIKDKRYTLDKFHFHIPITINFKSEGVSNINSLVCKYLRENDDIHFIGIDRGERHLLYVSVIDSRGRIKEQFSLNQIINEYKGNSYSTDYHKLLEERDEKRAKERQSWDSIESIKELKQGYLSQVIHKIASLVVKYNAVVVLEDLNIGFKRGRQKVESSIYQQFEKALIDKFNYLVDKNVAPEQPGGLMKGYQLTNKFSSFRDMGKQNGFLFYIPAWNTSKIDPVTGFVDMLHPKYESVEKAREFFTKFNKISYNQEKGWFEFLFDYNDFTTKAEGTRTVWTLCTFGKRIETFRNKNKNSMWDNKEIDLTSAFISLCEKYNVPLSCDMKNDIVAQTEKDFYVELIRILRLTLQMRNSITGTDVDYLISPVADENGNFYDSRNADSTLPENADANGAYNIARKGLWAAMQIRSCTDPDLKVNLAISNKEWLTFAQTKPYTK

SEQ ID NO: 107 - protein, 1249 aa, Unknown
  Description of Unknown: uncultivated organism sequence
  Category: MG13 effectors
  Description: MG13-73 effector
MKQFTNLYPVSKTLRFELQPIGKTKENIEKNGILMRDEKRAKDYKIVKEFIDDYHKQFIKERLWDFKLPLNSEGKLNSLEEYQALYELSKRDEVQEAEFTEVKDNLRSIIAKRLTESGSAYERIFKKELIREDLVDFLENEEDKDIVRQFADFTTYFSGFHENRHNMYVAEEKSTAIAYRLIHQNLPKFMDNMKAFAKIAETSVAEHFADIYEGWKEHLNVESIEEVFRLDYFSETLTQPHIEVYNYIIGKKILEDGTEIKGINEYVNLYNQQQKDKSKRLPFLVPLYKQILSDREKLSWLAEEFDSDEKMLSAINESYSHLHDLLMSNENESLRSLLLHLKEFNLSHINIANDLSLTDISQHLFSRYDVFTNGIKDELRIITPRKKKESDEDFEERITKIFKTIKSFSIDFLDNLPQPVMEDGKRRSIENYFMTLGAVNTETTQKENLFAQIENAYEDARNILQLKDTGDTLSQNKPAVAKIKALLDALKDLQHFIKPLLGSGEENEKDELFYGSFMMMWDELDTITPLYNKVRNWLTRKPFNTEKIKLNFDNAQLLGGWDVNKEPDCTGVLLRKDGFYYLGIMNKKSNRIFESEVTPSDGECYDKIDYKLLPGANKMLPKVFFSKSRIDEFAPSEAVVSSYKRGTHKKGANFNLSECHRLIDFFKQSINKHEDWSKFGFHFSPTDTYEDISGFYREVEQQGYMLSSHPVSSSYINQLVDEGKLYLFRIWNKDFSEFSKGTPNLHTLYWKMLFDERNLADVVYKLNGQAEVFYRKASIKPENRIIHKANQPIANKNELNEKRTSTFEYDIIKDRRYTVDKFQFHVPITINFKAAGQTNINPIVQDVIRQGGFSHIIGIDRGERHLLYLSLIDLKGNIIKQMTLNEIINEYKGQTYKTNYHTLLAKREGDRTNARRSWETIETIKELKEGYLSQVVHIISKMMVEYNAIVVLEDLNTGFMRGRQKIERQVYEKFEKMLIEKLNCYIDKHADPSEDAGLLHPLQLTSDIQKWKRSHQCGCLFYIPAWNTSKIDPVTGFVNLLDTRYDTREKARVFFSKFQRISFNTQKGWFEFAFDYNDFTTKAEGTRTQWTLCTQGERIRTFRNPQKNNQWDDERIVLTDAYKQLFDKYNIDINGNIKEAISAQTDAQFFKELLGLMKLLLQMRNSITNSEEDYLLSPVADNTGHFFDSREEIYSLPIDADANGAYNIARKGLWVIRKIQETPNGEKTSLSITNKEWLQFAQTKPYLND

SEQ ID NO: 108 - protein, 1249 aa, Unknown
  Description of Unknown: uncultivated organism sequence
  Category: MG13 effectors
  Description: MG13-74 effector
MKQFTNLYPVSKTLRFELQPIGKTKENIEKNGILLRDEKRAEDYKIVKGFIDDYHKQFIKERLWSFKLPLNSEGHLNSLEEYQALYEVSKRNEVQEAEFSEVKDNLRSIIAKRLTESGSAYERIFKKELIREDLIDFLESKEDKDIVRQFADFTTYFSGFHENRKNMYVAEEKSTAIAYRLIHQNLPKFMDNMKTFAKIAETSVAEHFSDIYEGWKEYLNVGSIEEIFRLDYFSETLTQPHIEVYNYIIGKKILEDGTEIKGINEYVNLYNQQQKDKSKRLPFLIPLYKQILSDREKLSWLVEEFDSDEIMLAAINESYNHLHDLLMGRENESLRSLLLHIKDFDLSQISITNDLSLTDISQHLFSRYDVFTNGIKDELRIITPRKKKESDEDFEDRISKIFKTQKSFSIDFLDKLPQPVMEDGKTRSIEDYFMTLGAVNTETTQKENLFAQIENAYEDARFVLQLKDTGDTLSQNKSAVAKIKALLDALKDLQHFIKPLLGSGEENEKDDLFYGSFQMMWDELDTITPLYNKVRNWLTRKPFSTEKIKLNFDNSQLLGGWDVNKEPDCTGVLLRKDGLFYLGIMDKKSNHIFETDVIPTDGECFDKIDYKLLPGANKMLPKVFFSKSRIDEFAPSESIITSYKRGTHKKGVGFNLAECHRLIDFFKQSINKHEDWSKFGFHFSDTKTYEDISGFYREVEQQGYMLSSRPVSSSYIDTLVSEGKLYLFRIWNKDFSEFSKGTPNLHTLYWKMLFDERNLSDVVYKLNGQAEVFYRKASIKPENRIVHKANQPVANKNELNTKIASTFEYDIIKDKRYTVDKFQFHVPITINFKAAGQTNINTIVQDAIRQEEFSHIIGIDRGERHLLYLSLIDLKGNIVKQMTLNEIINEYKGQTYKTNYHDLLAKREGDRTNARRSWETIETIKELKEGYLSQVVHIISKMMVEYNAIVVLEDLNTGFMRGRQKIERQVYEKFEKMLIEKLNCYIDKQVSPTAKGGLLNPLQLTCDAQKWKRSHQCGCLFYIPAWNTSKIDPVTGFVNLLDTHYDTREKARVFFSKFQRISYNAQKGWFEFAFDYNDFTSKAEGTRTQWTLCTQGERIRTFRNPQKNHQWDDERIALTDAYKQLFDKYDIDINGNIKEAISAQTDAQFFKELMGLMKLLLQMRNSITNSEEDYLLSPVADDAGHFFDSREGISNLPIDADANGAYNIARKGLWIIRKIQETPSGERISLSITNKEWLQFAQTKPYFND

SEQ ID NO: 109 - protein, 1249 aa, Unknown
  Description of Unknown: uncultivated organism sequence
  Category: MG13 effectors
  Description: MG13-75 effector
MKNFESFTNLYPLSKTLRFELRPIGRTLENIQANGLLEQDNHRAESYKLVKAIIDRYHKVFIDEALSHCVLPVENSGNKNSLSEVYQYLTTKDHSEKETDDFNKTQDNLRKMIVSALKKDTHFGRIFKKELIREDLLNNDLQGFDLNEEEYDLIKEFRDFTTYFVGFNENRANMYSEEAKSTAIGYRLIHENLPKFIDNMVIFQKVKVSPVSEYFANIETEMEDMLQGIKVEDIFDLNFFNQVLVQRFIDLYNAVIGGQVASEEDHRKGLNQYINEYNQVQKDKKDRLPKFKPLFKQILSDRIHASWQIDNFESDNEVLKAIENAYETLDEEVISRKDSNLPLLFASISDFDLSGIYVSAKAITDFSQQIFKDWNAIDSALEAACRRSNQPKKKETEEKYAERIKKQRSHIDSYSVGEIIESLVAFQPNPEKSILDYLGGMGRREDKPSIIESIKSAYRDVEELLKTEYPANKNLALDKDNISKVKALLDAIKELQFFIKPLLGTGKESGKDERFYGEFVDYWQTLDIITPLYNKVRNYATRKPYSTAKFKLNFENSTLLNGWDVNKEPDNTSVLLRKDGLYYLAIMKKSCNRVFAVDQYDTVGDCYEKIDYKLLPGANKMLPKVFFAKSRIDEFAPSREVLDIYKRGSFKKGEEFCKADLHTLIDFYKASITKHEDWKKFGFEFSPTSSYDDISGFYREVEQQGYQIRFRKVSCTYIDSLVDQGQIYLFQIYNKDFSPFSKGTPNMHTLYWKMIFDERNLKDVVYKLNGQAEIFFRKSSLPVETPTHPANQPIANKNPLNRKKESLFTYDIVKNRRYRYDKFQFHVPITMNFKSIGSEYINDQVQDYIRQSKDLHFIGIDRGERHLLYLTVIDSKGIIEEQFSLNVINNEYNGTTYSTNYHDLLEERGDDRTKARREWLAIESIKELKEGYLSQVVKKITDLMIKYNAIVVLEDLNMGFKRGRQKVESSAYQQFEHKLIDKLNYLAGKTAPIDKVGGLLKAYQLATPYQNEMGFQNGFVFYIPAWNTSKIDPVTGFTNLFDLHIETMEQAKKFFSKFDYIRWNAANNWFEFAFDYKNFTEKADGSRTQWTLCTQGTRIRTFRNPEKNSEWDNVEVDLTDQFLSLFKSKNIDIKSDLKTQILAQNEKDFFMSLLLCLKLTLQMRNSISNSEVDYLISPVADANGDFFDSRKVDSSLPANADANGAYNIARKGLWMARRIKKSRPEDKVSLKITNKEWLTFAQNKPYLTD

SEQ ID NO: 110 - protein, 1249 aa, Unknown
  Description of Unknown: uncultivated organism sequence
  Category: MG13 effectors
  Description: MG13-76 effector
MKEFTNYYPVSKTLRFELQPIGKTKENIEKSGILARDEQRAKDYMIVKGFIDEYHKQFIKERLWNFELPLKSEGHLDSLEEYKTFYDLPKRSEAEEVSFTEIKNNLRSIITKRLTESGVAYDRIFKKELIREDLVDFLKDEEDKKIVRQFADFTTYFSGFHENRRNMYSSEEKSTAIAYRLIHQNLPKFMDNMKAFAKIAESTVSEHFADIYGGWKEYLNVERLEDVFQLDYFSETLTQPHIEVYNYIIGKKILEDGTEIKGINEYVNLYNQQQKDKGERLPLLVPLYKQILSDRDKLSWMAEEFDSDEKMLAAINDSYSHLRDLLMGEENESLRSLLFQIKDFDLDKINITNDISLTGISQHLFGRYDVLTNGIKEQLRVITPRKKKESDEDFEDRISKIFKTLKSFSIAFLNKLPQPVMEDGIPRKVEEYFMSLGAVNTETTQKENLFVQIENAYVDAGSILNTRDTGNKLSQNKQAVAKIKTLLDALKDLQRFIKPLLGSGEENEKDELFYGSFQMMWDELDTVTPLYNKVRNWLTRKPFSTEKIKLNFDNAQLLGGWDVNKEPDCTGVLLQKDGFYYLGIMNKKANRIFDTDVTPSDGDCYDKIDYKLLPGANKMLPKVFFSKTRIEEFAPSEAIVNSYKRGTHKKGADFSLSDCHRLIDFFKASIYKHEDWSKFNFHFSDTQTYEDISGFYREVEQQGYRLTSHPVSTSYINNLVEEGKLYLFRIWNKDFSEYSKGTPNLHTLYWKMLFNERNLADVIYKLNGQAEVFFRKASIKPENRIIHPAHCPIANKNELNEKRTSTFEYDIIKDRRYTVDKFQFHVPITINFKAIGQTNINPIVQDSIRRSGFSHIIGIDRGERHLLYLSLIDLKGNIVKQMTLNDIVNEHNGVTYKTDYHNLLVKREGDRTDARRSWDTIETIKELKEGYISQVIHIISKMMVEYNAIIVLEDLNIGFMRGRQKIERQVYEKFEKMLIEKLNCYIDKHAEPKEAGGLLQPLQLTSEAKNWKRSHQCGCLFYIPAWNTSKIDPVTGFVNLFDTRYDTREKAKLFFSKFQRISFNSKKDWFEFTFDYSDFTTKAEGTRTEWTLCTYGERIRTFRNPQKNHQWDDEHIILTVEFKQLFEKYNIDIRGNLKEAISTQSDAQFFRELLGLMKLLLQMRNSITNSEEDYLLSPVADGNGHFFDSRENIGTLPNNADANGAYNIARKGLLLIRKLQESKEGEKLSLAISNKEWLLFAQTKPYLSD

SEQ ID NO: 111 - protein, 1275 aa, Unknown
  Description of Unknown: uncultivated organism sequence
  Category: MG13 effectors
  Description: MG13-77 effector
MKEFTNLYPVSKTLRFELQPIGKTKEHIEKNGILQRDEKRAEDYKIVKGFIDEYHKQFIKERLWSFKLPLHSEGRLDSLEEYQALYELSKRNDAQEAEFTEIKDNLRSIIAKRLTESGSAYERIFKKELIREDLIDFLESEEDKDIVRQFADFTTYFSGFHENRRNMYVAEEKSTAIAYRLIHQNLPKFMDNMKAFAKIAETSVAEHFKDIYEGWKEYLNVGSIEEIFRLDYFSETLTQIHIEVYNYIIGKKILEDGTEIKGINEYVNLYNQQQKDKSKRLPFLVPLYKQILSDRDKLSWLAEEFDSDEKMLAAINESYNHLHDLLMGNENESLRSLLLHIKDFNLSQINITNDFSLTDISQHLFGRYDVFTSGIKDELRIITPRKKKESDEDFEDRISKIFKTQKSFSIDFLDKLPQPVMEDGKPRRIEDYFTSLGAVNTKTTQKENLFAQIENAYEDARAILQMKDTGDTLSQNKSAVAKIKALLDALKDLQHFIKPLLGSGEENEKDELFYGSFQMMWDELDTVTPLYNKVRNWLTRKPFSTEKIKLNFESPTLLKNMAVPQTSSAAIFRDRQGYYYLGILDSNSRNCLNELLSLSADHSGFDFMQYHQGGDMGKNVQNLMVINGEVCKKNGRKERSGQFVGQNLILEKLKNEYLPKDVNEIRLKQSYLTSSSTFSKKDLVRFVEYYIPLVKAYYSEYSFVFKTPSEYKSFADFTDHINQQAYQLSFTPISKDSIDNLVEEGRLYLFRIWNKDFSKFSKGTPNLHTLYWQMLFDERNLQNVVYMLNGQGAEVFYRKASIKPENRIVHKANQPIANKNELNTKRASTFEYDIIKDKRYTVDKFQFHVPITINFKAAGQTNINPIVQDAIRQGGFSHIIGIDRGERHLLYLSLIDLKGKIIKQMTLNEIINEYKGQTYKTNYHDLLAKREGDRTDARRSWETIETIKELKEGYLSQVVYIISKMMVEYNAIVVLEDLNTGFMRGRQKIERQVYEKFEKMLIEKLNCYIDKQLSPTDEGGLLHPLQLTCDAQKWKRAHQCGCLFYIPAWNTSKIDPVTGFVNLINTSRYDTREKARGFFSKFQRISFNEKKDLFEFTLDYNDFDYIAKAEGTRTQWTLCTQGERIRTFRNPQKNHQWDDERIVLTDAFKQLFDKYDIDINGNLKEAISAQTDAQFFKELLGLTKLMLQMRNSITNSEEDYLLSPVADITGHFFDSREGISSLPIDGDANGAYNIARKGLLVIRKIQETPDGEKPSLTITNKEWLLFAQTKPYLND

SEQ ID NO: 112 - protein, 1252 aa, Unknown
  Description of Unknown: uncultivated organism sequence
  Category: MG13 effectors
  Description: MG13-78 effector
MKQFTNLYQVSKTLRFELQPVGKTKENIEKGGLLEQDETLARNYLIVKGFIDEYHKQYIKDRLWNFELPLKSEGNHDSLEEYKTLYEVSQRNADQEEEFQEVKDNLRAIIAKRLTEKGSQFDRIDKKELIREDLLHFLTNEEDREIVSQFADFTSYFTGFHENRRNMYSSEEKSTAIAYRLIHQNLPKFMENMKAFAKIAQTPVAEHFIDIYTGWEEFLNVRSIEDMFRLEYFSQTLTQPHIEVYNYIIGKKIQEDGSEIKGINEYVNLYNQQQKDKTQRLPLLVPLYKQILSDREKLSWLADEFDSDAKMLTAISEIYAHLYDVLRGEETENLHSLITHLKDYNLSRIYVSNDLSLSDISQHIFGRYDVFSTGIKENLKTAYPQKNKENAEAYEERIGKLFKARKSFSLDELNNLPQPDMGDSKLRRLEDYFRTLGAVNSESVQKENLLAQIEIAYDEVLPVLQQSKNDNNLSQNKDAVAKIKKLLDALKDLQHFIKPLLGSGEENEKDELFYGLFQTIWDELDAVTPLYNKVRNWLTRKPYSTEKIKLNFENAQLLNGWDVNKEPDCTGVLLCKNGFYYLGIMNKKANHIFAYDSLTTNSDDSFEKIEYKLLPGANKMLPKVFFSKSRIDEFAPTPKIIENYKKGTHKKGSSFSLDDCHQLIEFFKDSISKHEDWSKFNFHFSDTDSYNDISEFYHEVEQQGYKLSTRPISATWINQMVEEGKLYLFRIWNKDFSEYSKGTPNLHTLYWKMLFDEKNLADVVYKLNGQAEIFFRKASINPKNRIVHPANQAIKNKNTLNEKQTSTFGYDIIKDRRYTVDKFQFHVPITINFKAAGQSNINPIVHETIRKNGFTHVIGIDRGERHLLYLSLIDLHGNIVKQMTLNEIINEYKGKKYVTNYHDLLAKREGERTDARRSWSTIETIKELKEGYLSQVVHIIARMMVEYNAIIVLEDLNMGFMRGRQKIERQVYEKFEKMLIEKLNCYIDKQADPEVEGGLLHPLQLTNEFKSFRKLGKQSGCLFYIPAWNTSKIDPVTGFVNLFDTRYETIGKSRSFFSSFKRIWFNSDKDWFEFSFDYNDFTAKAEGTRSQWTLCSYGTRIRNFRNPQKNNQWDNEEVVLTEQFKKLFAYYHIDVNSNLKEAIIGQTEAKFFQSLMGLMKLLLQMRNSKINSDVDYLLSPVADEDGRFFDSRSASESLPENADANGAFNIARKGLWVIRKIKNATASDEKLSLAVSNKEWLQFAQTKPYRND

SEQ ID NO: 113 - protein, 1252 aa, Unknown
  Description of Unknown: uncultivated organism sequence
  Category: MG13 effectors
  Description: MG13-79 effector
MKQFTNLYQVSKTLRFELQPVGKTKENIEKGGLLEQDETLARNYLIVKGFIDEYHKQYIKDRLWNFELPLKSEGNHDSLEEYKTLYEVSQRNADQEEEFQEVKDNLRAIIAKRLTEKGSQFDRIDKKELIREDLLHFLTNEEDREIVSQFADFTSYFTGFHENRRNMYSSEEKSTAIAYRLIHQNLPKFMENMKAFAKIAQTPVAEHFIDIYTGWEEFLNVRSIEDMFRLEYFSQTLTQPHIEVYNYIIGKKIQEDGSEIKGINEYVNLYNQQQKDKTQRLPLLVPLYKQILSDREKLSWLADEFDSDAKMLTAISEIYAHLYDVLRGEETENLHSLITHLKDYNLSRIYVSNDLSLSDISQHIFGRYDVFSTGIKENLKTAYPQKNKENAEAYEERIGKLFKARKSFSLDELNNLPQPDMGDSKLRRLEDYFRTLGAVNSESVQKENLLAQIEIAYDEVLPVLQQSKNDNNLSQNKDAVAKIKKLLDALKDLQHFIKPLLGSGEESEKDELFYGLFQTIWDELDAVTPLYNKVRNWLTRKPYSTEKIKLNFENAQLLNGWDVNKEPDCTGVLLCKNGFYYLGIMNKKANHIFAYDSLTTNSDDSFEKIEYKLLPGANKMLPKVFFSKSRIDEFAPTPKIIENYKKGTHKKGSSFSLDDCHQLIEFFKDSISKHEDWSKFNFHFSDTDSYNDISEFYHEVEQQGYKLSTRPISATWINQMVEEGKLYLFRIWNKDFSEYSKGTPNLHTLYWKMLFDEKNLADVVYKLNGQAEIFFRKASINPKNRIVHPANQAIKNKNTLNEKQTSTFGYDIIKDRRYTVDKFQFHVPITINFKAAGQSNINPIVHETIRKNGFTHVIGIDRGERHLLYLSLIDLHGNIVKQMTLNEIINEYKGKKYVTNYHDLLAKREGERTDARRSWSTIETIKELKEGYLSQVVHIIARMMVEYNAIIVLEDLNMGFMRGRQKIERQVYENFEKMLIEKLNCYIDKQADPEVEGGLLHPLQLTNEFKSFRKLGKQSGCLFYIPAWNTSKIDPVTGFVNLFDTRYETIGKSRSFFSSFKRIWFNSDKDWFEFSFDYNDFTAKAEGTRSQWTLCSYGTRIRNFRNPQKNNQWDNEEVVLTEQFKKLFAYYHIDVNSNLKEAIIGQTEAKFFQSLMGLMKLLLQMRNSKINSDVDYLLSPVADEDGRFFDSRSASESLPENADANGAFNIARKGLWVIRKIKNATASDEKLSLAVSNKEWLQFAQTKPYRND

SEQ ID NO: 114 - protein, 1252 aa, Unknown
  Description of Unknown: uncultivated organism sequence
  Category: MG13 effectors
  Description: MG13-80 effector
MKQFTNLYQVSKTLRFELQPVGKTKENIEKGGLLEQDETLARNYLIVKGFIDEYHKQYIKDRLWNFELPLKSEGNHDSLEEYKTLYEVSQRNADQEEEFQEVKDNLRAIIAKRLTEKGSQFDRIDKKELIREDLLHFLTNEEDREIVSQFADFTSYFTGFHENRRNMYSSEEKSTAIAYRLIHQNLPKFMENMKAFAKIAQTPVAEHFIDIYTGWEEFLNVRSIEDMFRLEYFSQTLTQPHIEVYNYIIGKKIQEDGSEIKGINEYVNLYNQQQKDKTQRLPLLVPLYKQILSDREKLSWLADEFDSDAKMLTAISEIYAHLYDVLRGEETENLHSLITHLKDYNLSRIYVSNDLSLSDISQHIFGRYDVFSTGIKENLKTAYPQKNKENAEAYEERIGKLFKARKSFSLDELNNLPQPDMGDSKLRRLEDYFRTLGAVNSESVQKENLLAQIEIAYDEVLPVLQQSKNDNNLSQNKDAVAKIKKLLDALKDLQHFIKPLLGSGEENEKDELFYGLFQTIWDELDAVTPLYNKVRNWLTRKPYSTEKIKLNFENAQLLNGWDVNKEPDCTGVLLCKNGFYYLGIMNKKANHIFAYDSLTTNSDDSFEKIEYKLLPGANKMLPKVFFSKSRIDEFAPTPKIIENYKKGTHKKGSSFSLDDCHQLIEFFKDSISKHEDWSKFNFHFSDTDSYNDISEFYHEVEQQGYKLSTRPISATWINQMVEEGKLYLFRIWNKDFSEYSKGTPNLHTLYWKMLFDEKNLADVVYKLNGQAEIFFRKASINPKNRIVHPANQAIKNKNTLNEKQTSTFGYDIIKDRRYTVDKFQFHVPITINFKAAGQSNINPIVHETIRKNGFTHVIGIDRGERHLLYLSLIDLHGNIVKQMTLNEIINEYKGKKYVTNYHDLLAKREGERTDARRSWSTIETIKELKEGYLSQVVHIIARMMVEYNAIIVLEDLNMGFMRGRQKIERQVYENFEKMLIEKLNCYIDKQADPEVEGGLLHPLQLTNEFKSFRKLGKQSGCLFYIPAWNTSKIDPVTGFVNLFDTRYETIGKSRSFFSSFKRIWFNSDKDWFEFSFDYNDFTAKAEGTRSQWTLCSYGTRIRNFRNPQKNNQWDNEEVVLTEQFKKLFAYYHIDVNSNLKEAIIGQTEAKFFQSLMGLMKLLLQMRNSKINSDVDYLLSPVADEDGRFFDSRSASESLPENADANGAFNIARKGLWVIRKIKNATASDEKLSLAVSNKEWLQFAQTKPYRND

SEQ ID NO: 115 - protein, 1202 aa, Unknown
  Description of Unknown: uncultivated organism sequence
  Category: MG13 effectors
  Description: MG13-81 effector
MRQKYDGFESCYGISKVIRTGLIPQGATLEHIEKKGLLLLEAKRAEDYTKVKKIIDRYHRKYIDNQLKDAELSGVEESYSLYCKTNRTEKENTDLKKDLEKLRKQVSNFLTLSAEFKRIDKKELIEKDLLNFVQGDEEEEELVKSFKGFTTYFKGFHKNRKNMYSHEEKSTAIAYRVINQNMFRYFDNIRSISKFILANSENNIAELESIYSDKLNGKTLEEFFSVDNYSFFISQSGIDTYNMIIGGYSVDEKTKVKGINEYINLFNQENHEKFGTLKPLYKQILAERTTESFLPEKFENDKEVIESLAVFNHNISDTLSELMQIFSKMGEYDASGIYLKYDSLKDISTCVFSDWSAITNALWEQYDVQYTGKKKKETKAYFEEKRKYFKNLKSISASEINTAMGENVLIPYSDAAKSLFEKICVAEENIRELINLDYPDDKELSKDKAAVKDIKAYLDSVKALQHHMKPLLGNQDESGKNEFFYGNFSGLWDELDALTPLYNKVRNYVTKKPYSTEKIKLNFDNSTLLNGWDLNKEEANTAILMQREGFLYLGIMDKKHNKLFRNIANTDCEDCYQKMEYRQLPGAYKMLPKVFFSKKGIDTFKPPLKILEIYRSETFKKGTNFNIDDCHKIIDFYKKAINEHESWKRFKFKFSETKDYRDISEFYQEVDVQGYNISFKAIPKKIIDEYVEKGWLYLFKIWNKDFSEYSKGTPNLHTLYLKMLFDPRNLENAVYKLNGEAEIFYRKASIQPKDIIKHPANEAIKNKNPLNQKQSSTFKYDLIKDRRYTADKFEFHVPITLNFKARGKENINTEVREYIKRSKNLYVIGIDRGERNLLYVSVVDADGSIVEQYSLNDIVNEYKGVQYRTDYHALLDTKEKNRDKARKEWTEIQNIKELKEGYISQVVHKICELMMKYEAIIALEDLNGGFKNSRKKVEKQVYQKFEKMLIEKLNYLVDKKADINEPTGLLHALQLTSKFEGFNKLFGQSGFVFYVPAWNTSNIDPCTGFTNLFFSKDLRYSGVENSLEFWKRFDSVAYDDRKDMFAFAFDYNNFNQRAEGSKSKWTVYSYGDRLETFRNPDLNQQYDSREVKLTEAFKELFKKYGISYKSCEIKENILNCKERGFHEKLLHLFKLTLQLRNSKTGTMIDYMTSSVISVDGNFFDSRTASSKLPQDADANGAYNIARKGLWLIEKLQRCTKGT

SEQ ID NO: 116 - protein, 1278 aa, Unknown
  Description of Unknown: uncultivated organism sequence
  Category: MG13 effectors
  Description: MG13-82 effector
MKKFTNKFQLSKTLRFELIPQGKTLENIKSKGLIAKDDQRAISYKKMKKSIDEYHKYFIGLALSNVKLSKLQDFADLYFETNADKKKEDAYKKSLEKIQTDLRKEIVKGFKEGDAKEIFGKLNKKELFTELLEEWKQEKGDFYFDEEFKTFTTYFTGFNKNRANMYSDEAKSTAIAFRLIHENLPKFLDNIKVFEKAKSIPQLQENCKLLYKEIEEYLNISKIDEVFELGYFNEALTQNDIDVYNLIIGGRTAKEGVQKIQGLNEYINLYNQKQDKKNRIPKLKVLYKQILSDRENISFLPEKFNDSNEVLEAIENFYKSNLLEFQTGDMEHSENVLASLKTLVGEIANFDTSKIYLRNDKSITDISQTIFGDWGIIKSALEFSFIQGLIIGKKGISIKQEVEKDKYLSKQSYYSIAEIENALMLYKDQNELLKELKPTDLPVANYFKNHFKIKVKKDDNSEKEFDLITNIEDKYRCIKGILANDYPEDKDLKSTNNPDTLNIKLFLDSLMEFLHFIKPLALPKDTVLEKDEHFYNPFVIGYEQMQLLIPLYNKVRNYATQKPYSEEKFKLNFENSTLLSGWDVNKEETNTSILFIKEGIYYLGVMDKDHNKIFRDIPKARSNSVYQKINYKLLPGASKMLPKVFFSDKNISFFNPSDEIQNIRNHGTHTKGGSPQEGYSKLDFNVNDCRKMIDFFKTSIEKHPEWKNFGFQFSDTSTFDSIDAFYREVEAQGYTISYSNLDKDYIDQLVSEGKLYLFKIYNKDFSSYSKGQPNMHTMYWKALFDKDNLKDVVYKLNGQAELFYRKKSINYDEKTMKQGHHYNELKDKFSYPIIKDKRFTEDKFHFHVPITLNFKASGNDYINADVLTYLKNNPDVNIIGLDRGERHLIYLSLINQKGEVLKDKNGNPIQYSLNEIINEHKGKTYPTNYQTLLDSKEKERDSARKNWGEIENIKELKEGFISQVVHKIAQLMIDFNAIVVMEDLNFGFKRGRFKVEKQVYQKLEKMLIDKLNYLVFKDKEPTEIGGIYNALQLTNKFKSFKEMGKQSGFLFYVPAWNTSKIDPTTGFVNLFNTKYETIEKAQEFFSKFNDIRFNEMENYFEFVVDDYTKFNLKAEGTRLDWTVYTNEDRILTFRNPETNNNWDNKKVVLTDEFVKFFTENQIEYKTNLQTQILEKTEGKFFKDLFHLYKLTLQKRNSITNSEVDYLISPVKNNDSYFYDSRKADNTLPQDADANGAYHIAKKGLWVLEQINQYEKDDNWKKLQLAISNKKWLNFVQKK

SEQ ID NO: 117 - protein, 1251 aa, Unknown
  Description of Unknown: uncultivated organism sequence
  Category: MG13 effectors
  Description: MG13-83 effector
MKQFTNLFQVSKTLRFELQPVGKTKEHIEQGGILTRDEQRAENYKKVKGFIDEYHKQFIKDRLWTFQLPLSDEGRHDSLEEYQALYELSKRDEAQEAAFTEVKDNLRHIIAKRLTEKDSAYDRIFKKELIREDIVEFLDNEEDKDIVRQFADFTTYFTGFHENRKNMYSPDEKSTAIAYRLIHQNLPKFMDNMKSFAKIAQTAVAEHFIDIYEGWKEYLNVESLEAIFRLDYFSETLTQPHIEVYNYIIGKKILEDGTEIKGINEYVNLYNQQQKDKSQRLPLLVPLYKQILSDREKLSWLAEEFDSDEKMLAAINETYNHLHDLLMGEENESLRTLLAHLKDFDLTQINITNDQSLTDISQGMFGQYDVFTRGIKDELRQITPRKKKESDEDFEARISKIFKTQKSFSIDVLDRLPQPVMEDGKQRFIADYFMTLGAVNTDTIQKENLFAQIENAYEDVRPILQMSDTGGDTLSQNKSAVAKIKTLLDVFKDLQHFIKPLLGSGEENEKDELFYGGFQMIWDELDTVTPLYNKVRNWLTRKPYSTEKIKLNFDNAQLLGGWDVNKEPDCTGVLLRKDGFYYLGIMNKKANRIFDADITPSDGICYEKIDYKLLPGANKMLPKVFFSKSRIGEFAPSDAIVSSYKRGTHKKGADFSLSDCHRLIDFFKASINKHEDWSKFGFHFSDTQTYEDISGFYREVEQQGYRLTSHYVSQSYVDQMVDEGKLFLFRIWNKDFSEFSKGTPNLHTLYWRMLFDERNLADVVYKLNGQAEVFYRKASIKQENRIVHPAHQAIANKNELNPKDKSTFGYDIIKDRRYTIDKFQFHVPITINFKATGRDNINPIVHETIRQGGFTHIIGIDRGERHLLYLSLIDLQGNIIKQMTLNEIINEYNGLTHKTNYHDLLVKREGERTAARRSWDTIENIKELKEGYLSQVIHIISKMMVDYNAIVVLEDLNMGFMRGRQKIERQVYEKFEKMLIDKLNCYIDKQANPESVGGMLHPIQLANKFESFRKLGKQSGCLFYIPAWNTSKIDPVTGFVNLFDTRYETREKARLFFSRFQRIGYNAGNDWFEFSFDYDDFTTKAEGTRTQWTLCSYGTRIRNFRNPLLNHQWDDEEIVLTEEFKKLFCKYDVDFQGNLKEAINAQTDAQFFKDLMGLMKLLLQMRNSRSNSEVDYLLSPVADERGQFFDSRKGIASLPDNADANGAYNIARKGLWAIRKVQETPDGEKLSLAITNKEWLQFAQTKPYLND

SEQ ID NO: 118 - protein, 1063 aa, Unknown
  Description of Unknown: uncultivated organism sequence
  Category: MG13 effectors
  Description: MG13-84 effector
MRDFNEFVGLYPISKTLRFELKPIGKTLEHIQRNELLEDDAVRADDYVKVKKIIDKYHKCLIDEALSGFTFDTEADGRSNNSLSEYYLYYNLKKRNEQEQKTFKTIQNNLRKQIVNKLTQSEKYKRIDKKELITTDLPDFLTNESEKKLVEKFKNFTTYFTEFHKNRKNMYSKEEKSTAIAFRLINENLPKFVDNIAAFEKVASSPLAEKINALYEDFKEYLNVEEISRVFRLDYYDELLTQKQIDLYNAIVGGRTEEDNRTQIKGLNQYINEYNQQQTDRSNRLPKLKPLYKQILSDRESVSWLPPKFESDKDLLIKIKECYDALSEREKVFDKLESILKSLSTYDLSKIYISNDSQLSYISQKMFGRWDIIGKAIREDCAKRNPQKSRESLEKFAERIDKKLKAIDSISIGDVDECLAQLGEPYVKRVEDYFAAMGASDMVEGQTDATSFKKNIEGAYKSVKELLNNADNITDNNLMQDKGNVEKIKTLLDAIKDLQRFIKPLLGKGDEADKDGVFYGEFTSLWTKLDQVTPLYNMVRNYLTSKPYSTKKIKLNFENSTLMDGWDLNKEPDNTTVIFCKDGLYYLGIMGKKYNRVFVDREDLPHDGECYDKMEYKLLPGANKMLPKVFFSETGIQRFRPSEELLGKYERGTHKKGAGFDLGDCRALIDFFKKSIERHDDWKKFDFKFSDTSTYQDISEFYREVEQQGYKMSFRKVSVDYIKSLVEEGKLYLFQIYNKDFSAHSKGTPNMHTLYWKMLFDEENLKDVVYKLNGEAEVFFRKSSITVRTPTHPANSPIKNKNKDNQKKESKFKYDLIKDRRYTVDKFLFHVPITMNFKSVGGSNINQLVKQHIRSATDLHIIGIDRGERHLLYLTVIDSRGNIKEQFSLNEIVNEYNGNTYRTDYHELLDTREGELTEARRNWQTIQNIRELKEGYLSQVIHKISELAIKYNAVIVLEDLNFGFMRSRQKVEKQVYQKIEKMLINKLNYLVDKKKPVAETGGLLRAYQLTGEFESFKTLGKQSGILFYVPAWNTSKIDPVTGIIVKTKSTSFQNEKYKKIPFS

SEQ ID NO: 119 - protein, 1205 aa, Unknown
  Description of Unknown: uncultivated organism sequence
  Category: MG19 active effectors
  Description: MG19-2 active effector
MKGYKIHIKRINQSNGEIIRTIKYLLTPINQNNSQEIFFSNFIFDDLKVRGISSITDFIKHNSNYDLFDFWIDTLKAGVIFQPTKKSLEYFIKVIKNEKNDAELIFDKSSEIIKKYFKKEDFIQIIILSNAKRTRSKKSAFLNELFKMIKDEFKDNKNKIIVDKQLNDTVNFIINSFYNEDGDLKLEGEEKQIQFWKTNFAIDKTLLNKNKFKENSVGDITNFILPEIIKINESISIEELINIRINLAEKYLSLINRKTDKFNIVESFLGLGNDFNSLSNYLNNFYNYLLSKKIDEIIKSYKKIINLNEPEIAMIKEALKYLSDKAQLLEKPRFINKSWQEYRKVFGGKIQSWYSNYVNRLSKSSENYKKIIGNIDQIISIINKYKTTENENYLNKIIEKTLQLKDIMTKNTDILQVPYKFDIFSDLLADLKIDLNYFYQTYIKKNDDDQINKDPIFKFLFDEIEKPINFYGHSKKQILNKIVNQTAIRINEGFKIIRFLLEEYKNLRRSDFKKSFPELLENYFDKLAKKTVYSKFFYSKYKDILKNYILSTENINDIFNNPEKYTFFKNNFERQKSILIKTINIENNDYLILDLHEKFYNFLINIDQNLLINNPDTSIEYLETAKTFISFCIENNNKKEFQLESNLYNNFEGIKNYIKLFKQDKLNNKDYSKILNQYFFSELKGDLTLSSKKNYIAKYTLQIMNSDKVFPLIIKFKNNQISKNQLLTNSKEIINYPHQYFIVFDLGLKFKKINSEVEKTDTFLINKNGITPIKNLGFTNNLLYKISSSRYQIQFLDRLIYKPRNWQQIAIKIREPSFILEVNNNIKFDIINNKISLSEKSKKFYASIPFEIKSINNTSINANKNNKLYLGIDAGEYGVAYSLVDFENEKNPRIINSFYIKSKNIRRIKDHYQKIQEKSKKGVFLSSSNLLNKIRENSINEIRNNIHDIFLKYSPKMIVYEYSISNFETGSGRVTKIYDSIKKSDVHPDNEADKSIIKHIWGRDYNYIRIGTNASAYASSYTCTHCGRSIFSIIENINNNQIFITQRLTENGLKNIVEISTPYGKLYGYTSEKKYINGYLFKNTQESKKELKKILQNFARPPLDKSEVLLTFKKLDKNILRKIKIKRGNSSIFVCPFSDCLHVFDADLQASFIMAVRGYIKDINQNNKNLNIFEETLKYLKKIEDLNYKMLEIPDLASLPQSKNQ

SEQ ID NO: 120 - protein, 1240 aa, Unknown
  Description of Unknown: uncultivated organism sequence
  Category: MG19 active effectors
  Description: MG19-3 active effector
MKIKGYRLHKERIKFTSGTTIRSIKLPIKEFSLNEDKKELILKIKKQVKNDDLLLKGDVNLNDYAQKGFRGNPSYNFFDFWVDSLRAGVIWKKTTNELIDFVNGKLSKKDIIGEILIKASDKFLKYFDIANQDLKNFFKLSEVRANKNKQSLSRSLVSYLKQDYKKKKDKYDYEIINSDAQNLINFIVNSFFDNQSLLKLKGPQKQNQFWLKNFGIDKTKLKQFRPQGELGNISFVIVPQLISIDKDINIVDLIEKRIHFLERLNLNNDNEIKSILGLENNFSALSNYLGIIFKKLYQGEIEEIFQALVFIYKDLEDYKNVAFKSLNFLKEKAKLLSPEPSLEFISNWADYRSLLGGKIESWLSNYLRRKKEINQQINDFFNGLDLTKKFLIENKNYKKELKDNDLDSILKIIKEINQFGNKDLNNKKNYEIFDSFLSILKSDLNLFYQKYLIDEKNEIKVDEFSPFEAIYKKIYKPVSFYGEIKRENNDKNLRLVLPIIKTGLEFSKLMINELTENFSFNDDDDAEIFFRKLLNFYHQKILTKSINSNDFKNFFIDILVHYISEEDKKNIFKKNRVFYKSDYSKGTQSLFKLINTEFSQEFKKLIFKIKDFLASFENDYILINKDLLLDWIETFKNLSSILIKFSINNDFDSKIFEPLLKNYLKIKIYYDVFNPPDFDKNLFTKLWQQFFLSEFKGAAILYSKKTYLARYVSQFIGSENKIKIFFYSSNQDLLEKINDFENIDNDVSKNLVNKRKYLISFDENLKLSTKRKLETDVCLIKLSKNLNQFKKVYIKKESFDNLFEITSSYYQLQFLDRLFYKPKDWRNVDIKLSEWNLILEQDYEINWKLEANKAEFIKKENSKKNKLYINIPFEISSKNLVIKFKQLDNNRFAYPICGIDVGEYGLAYCLIKVGGNQTNIIDKGFFEDKNIANIKDKFAKIQERSRKGIFNETDSTIVQVRENAIGALRNQIHDLVVKYNASPVYEYSISNFETGSGRTTKIYNSVKRSDVFEEGSEVSVFLKTQIWGIKKTIGRNVSSYASSYTCINCKRSLYELNFQKKHLENGEVIIVVQKRQGNIIYFQINNNLIICGYSDKNKFVNNYQLKTRQDLDDFNKALKDFTRPPVKSNSEVLVKFANDLTMKKLKKEDKELSFIDVFRKRRGNSSIFVCPFDDCHFVADADIQAAFIMAIRGYIKFLKGANNNNQNNDKNRQKIDYFKETLIFLKKLQLQEDIFYPSID

SEQ ID NO: 121 - protein, 1256 aa, Unknown
  Description of Unknown: uncultivated organism sequence
  Category: MG19 active effectors
  Description: MG19-4 active effector
MTKRKSSLAGYRLHRERILFSGGQVIRTIKFPLTPLNPSKETALFLKDFEKAIIADDLKIRGDLNINDYFVYTAKWKPPYTLFDFWVDSLRAGVIWMPKVTKLIDFLTSQYNITSPFDMVWEKASHRIAVIFQKDKFKDIFLSAPIRNTSTRNSFYERILKSLKDDLVRKNDIISTDAKKEVDLIVNSFFNDDGKLILKGKDQLDFWKREYNLDRSTIESLKPKGAYTDITFVNIPELMHNLDAKQSFEELINKREIWISDKKLLSSILGLSDNFNGFSNYLGVVLKGLQKKDGDIEALYEAQKTIFPRLGNYEDEILNALDFLSQKAKLLGETSLPLVNGWHDYRSVFGGKLQSWFTNSQNRKKELNGQISQFREGLSQVKNYLQKGNFGEEADKEKKDILSFLSLLENFFTDEQKSIKVEVNYQLFESLLALIRRRLNFFYQKYIQKEGNETKVNKYKEFEGLYKTIYKPVAFYGYTAKRANEKFVNKTIPILEDGVENTIKLISYLRDSFSVQKTFESVKQEKEKVDDLYRKFLQFFWNKYVDASINSRLFLEKYEKIIKENIEDSKWKEISDKNRKGRYVFYKSPYAKGSLEKIQIKTNDYLQQLQASVLELAEFILSFKKDTLLSDAILLLDWIELSKNTISLLIRFNTKETYKLDGLLLDIFSQAKRYKELFRRENYPRNEFSFIIQSLILSEIRGAATLYSKKEYIASYSVQVIGADDRYKLYYIPKKEISINADTIKSKPSSIERKQLMKSHNFAIALDKVYEKNKNKTFNAILLSKSGITAVYLPSESLQKLFRLSSSPYQLQFLDKYIYLPDGWENIDISLSEWSFIVEKRYKIDWDLQTKKPTLLPITGSEQAKKNKIYLAIPFNLIPNKQAVQSAPLKVIAKGKETIEKDFSRLNFPILGIDVGEYGIAYCLVRFIFDKNTYKITGVELGSYKEEILGFIEDKNIGNIKDKFAEIQQKARQGAFDEEDNVVARIRENAIGHLRNKIHVIVTQEKSSSVYEDSITNFETGSGRTTKIYNSVKRADTESNTEADKQIHNHVWGEKTKWIGRNIGAYASSYTCLSCLKSLYQIKKEDLAKMIINQKEGRVVTISSRHGNIKGYVSKEEKYDMGYQFKGTDEDLKKIRKIVQDFARPPVTNHSEVLEKYAKKILETGRIEEWRKSRGNSSIFVCPFCQYVADADKQAAFMMAVRGYLRFSGIVPSQSSKKKQGQEEEKTTGESFLEQTQKQLKDIDRSGIKNAFSVRI

SEQ ID NO: 122 - protein, 1222 aa, Unknown
  Description of Unknown: uncultivated organism sequence
  Category: MG19 active effectors
  Description: MG19-5 active effector
MKKVRGYRLHLKRILFSGGEIVRTIKFPIVARNLSKNDNDYLEIFKKNLIEDDIKIRGDLNLNDYLLYTSSNKHIYTLLNFWIDSLKSGIIWADKAASLIDFINDLYQFEDSPVDIIWNNASEDIKKFFDKDKFKEIIISDPLRATTKKESFKKRLISYLNNIYLEKNHEIKSKEAELLIEKIINNFFDEKGNLILDGKGQNDFWLRNFNLDKSIIDNAKPKGELADITFIIIPELIEDLNCYYTVEYLVKKRIDFLSEKINTSKKLEFILGLSNNFNGYSNFFGKGLRLFQERKINIIFDSMAKVNPFLNRSEYKDKVINSLKFLSDKSKNIPNEPSVPNIGNWANYRSFFGGKIQSWYTNGQKRKTELRQQLYNLEYSLNKAFDFIEKNFSSKEKDEEKEYFFESIKQSIERLKQIIVKFINFLDKGKSQEDIYSLFYDVFSSFKLDLNLYFHKYLKSEENETIDKNQYFSGIFKKIYKPVNFFGESKKEYNKKIIEKTIVTIEHGIDIVFNLLKKLKDSFVPKEKIGEKENSEIIFRDFLDFYWNKLKNKMINSSYFIDLITKIINESLINCNLEKINQKRNWNRYTFKINEYQKGTLVVFELKKINYLDVFEDKVFEIIDFLISFEKNRLLSDKNILIDWIEVSKNIISKLIKFNRSETFDLDQFNFNLENFPKAANYISIFQLKKLNKKDFLFFIQSLIFSEFKGAAVVFSKEKYLAKYTIQVIDTDEKFKLLYKPKDNKIDKNVDRKGLLKLHEYFICLDEVKNINKKNHQFNFIILEKNNFKPTFIDDNYLSKIYKIESSKYQIQFLDKFLSMPDKYKNIGVKLSEWGFILEQEYKIIWDLEKKRPKFQLIENSRRNKLYLSIPFIFYFKGEKSKVLLHSVLNNSTKYPVLGIDVGEYGLAYALVDFSQKNIIKILKIGFIEDRNIANIKDKFTQIQLKSRRGIFNEADNIVSQVKENAIGNLRNQVHFVLTDGMGASLIYEHSISNFETGSGRVTKIYNSVKRADTKFESKADEQIHNHVWGKNTKYIGKELSAYASSYTCVSCYNSIYQFKKEDLNDINIVKREGNIIFFSSSSYKKTFCGYSKEKKYQPGFKFENKEKNFNTFLKICKDFARPPIGKDKSEVLEKYFIFNQERRNKIEDFRKKRGNSAIFVCPFCQFVADADIQAAFIMAIRGFLKFSEKENLKEKKELIFEKTIKFLKATGFRPQEQFSPF

SEQ ID NO: 123 - protein, 1264 aa, Unknown
  Description of Unknown: uncultivated organism sequence
  Category: MG19 effectors
  Description: MG19-6 effector
MAKRKNRLAGYRLHKERVLFSGGKVIRTIKYPLVPLGPSEETAQFLKDFERAIIADDLKIRGDLNINDYLACTVEGKSLYTLFDFWVDSLQAGIIWMPKGTKLIDFLASQYNTASPFDGVWKKASPRITAIFKKDKFKGIFLSDPIRNTSTKNSFYKRILESLKDDLVKENIIISTDAKEEVELIVNSFFNNDGQLILDGESQFDFWEKEYNLDKGIIESAKPKGKYTDITFVIIPELISNLNTKQTLEDLINKRATWLSNRELDEDNKLLASILGFSDNANGFSNYLGVVLRGLQEEDGDKEALYEAQKTIFPRLENYRDKVLESLDFLSQKAKLLGETSLPLVNCWHDYRSVFGGKLQSWFTNFQKRKEELDGQISQFKESLFKAKSYLQKENFGEEADKEKEDILSFLSLLGNFFTDEQKSIKIEENYQLFEPLIALIRRRLNFFYQKYIQKEGDETKVNKFKEFEGLYKTIYKPVAFYGYSAKRANEKFVNKTVPILEDGIENIKKIIFYLQDSFSVQKTFEDVKQEREEIDDPYRKFLQFFWNKYLDASINSYLFLGKYEEIIKENVEDNKWKEISDKNKKGRYVFYKSPYTKGTLEKIPIKANSYLDKLQVSVLELVEFILSFKKDTLLSDSALLLDWVELSKNIISLLLKFNTKETYKLDGLLLENFSQAKKYQELFKREDYPKNEFSFIIQSLVLSEIRGAATLYSKREYIASYSVQVVNSDEKFKLYYIPKEEIPITPDTIKSKPDSIERKQLMKPHCFVVALDKVSEEKKNQNFNAILLSKSNTTAVFLPDESLQKLCKLSSSPYQLQFLDKYLFRPAGWENIDISLGEWNFVVEKGYKINWDLQTKKPKLLPITDSEQAKKNKIYLAIPFNLSPNNQIKQSAPLKSIAKGNEKKEKDLSRLNYPILGVDVGEYGLAYCLVKFDFDKNTYKITGIKLGSDEKETFGFIEDKNIGNIKDKFSEIQQKARQGAFDEEDTIVARVRENAIGHLRNRIHIVVTQEKSSSVYEDSITNFETGSGRTTKIYNSVKRSDTESGTKADEQIHNHILGEKTKLVGRNVSAYASSYICVNCLKSLYQIKKEDLTKMTITQKDGRSRVVTISSPYGDIKGYVSKEEKYDVGYQFRGNDEDLKKLRKIVQDFARPPVSNRSEVLEKYAKPILETGRIEEWRKRRGNSSIFVCPFCQYVADADIQAAFMMAVRGYLRFSGIVPSLSNKNKQDQEKEKTAGESFLEQTQKQLKNIDINKIKSAFSIRI

SEQ ID NO: 124 - protein, 1194 aa, Unknown
  Description of Unknown: uncultivated organism sequence
  Category: MG19 effectors
  Description: MG19-7 effector
MKSYKIHIKRLKTTKGETTRSIKFLLKPVNQTDAYEKIIENFVNDDHKVRGIANLIDIKSENQYSLLDFWVDTLKCGIVFQSKGKKIRYFIQSIRGKKTMEEIIFDQADEKIKNYFKKVDFIKNIIISDAKRSSSTKKSFFNTLFDILNNEFKNEKEKIIINSDANKLVNFITNSFYDEEGKLILDSEEKQNQFWKNNFNIDKNLLNGKTNNELGELTSFILPELIRLNGDIKLEELINLRFDLVKKYLKINSIEPNEKIINEQTASLLGLSDNFNAFSNYFNNFFNVLLEGNIEVIINYYKTIIDLSNQEEEKIKESLIYLAEKSRLLGKPKFISYSWQEYRSVFGGKLESWFSNYLNRLTKSQENYNKIKGEISKIIAYFDRLQILDKKFSEDNDFQKSKLKIKNQLVNLKNLLEQNPDLLNIPGKYSIFSDYLAEIKTDLNFFYQKYLKISEDDMINNDKNFKFLYEKFEKPINFYGQSKKESLLKIIEKSKLKVIDGFKIIRILLDESKSLKDNDFKKTLSEILNVFFEKLSKKILSNQSIFFNDYKKIIDYYISEENNKKEIYNQPQKYAFYISKFSNNNSLKIIKIKNFDNQDSQITNLIRSLYSFLKNINHNLLLKDVQSAIEYLEITKSFLSFVIENNKKNEFIVDKNLFSNFEGVLNFINLHKSNCLINQEFNRLLNQYFFADLKGTLNILSKKYDLAKYTLQILKSDERFPILINFKDIKVSLKQLLTESKKIINYSHRYLIVIGDKINDYFEFKKLNQEDQTDYFIITKQGIRPILITNLNKNHVFQIHSSRHQLQFLDRLIYKPYYWQNISISISEPSFILEIKHQIDLEKFVFKKESQNLYLSLPFQINSEEPQKKLNEKIYLGIDAGEYGVAYCLTDFTEDIPKIIESSYIKNKNVRKIRDKFEIIKQRARGGVFIQSENVVRKVRENAINEIRNQIHKVFLKYKVPIIYEYSISNFETGSGRITKIYNSIKKSDVDSKANKPIIKHIWGSNSINIGLNLSAYASSYTCSVCGRSIFEVVNDFDTSQATVVSRLKTDGLKNVIEIKTTHGNLYGYTQNKKFIENYRFQNTKQEKEEFLKIIKNFARPPLEKSEVLLTLKKLDPLKLKEIKKQRGNCAVFICPFVDCGKIFDADLQAAFNMSVRGYVKNNLKNNQEVNIFEETIRYLKNHKPINYKMLEIV

SEQ ID NO: 125 - protein, 1069 aa, Unknown
  Description of Unknown: uncultivated organism sequence
  Category: MG20 active effectors
  Description: MG20-1 active effector
MANISLKKALQQFPQTTLSKVTNPKTGKVQTRNVLKTMQCGLAISLTPKQRKVELEELSPDKKKLLDEYIDTFENKKQLILEDFYHYYEKSIWDFLIYCSRIKDTTETTYIVIPELPEITTKIKKSDGTYLKVKAYKGISNTTGNIHKTLYWFADDIDTKDGCTKVQFQYTEQRKEYITTDNYEKYNFDPALFELQPDTQQISNRISFFYMTNAQKKDKNGIYHETPKYQEYKKKGISIKGIVDDIEIDIKEPLRTKTAAVLKAFVDKLQESIKEIESVISEKNERIALLNKEDPKNNFPEFFVTNLKEDDKKLLSELTQLQIEDRDVKKFSELYNTLAKSFNQILNNAIQTYISIKLKESKIKQSDKEQEGKRLWDTYHLNHLKGIPSFPQMKNESQGKITAEMIYHFIQEQLQQYKNFSAFDHLLLDKNDFIFTDQKRKLSEDTVEQEQEWKEQWKTIKEKENNSFILTLRKILWRKNNIPGKKLMHYAHYLVQQGKITTNSAIVKALIEYALQELLKKQEHLSCEQFSSDQKAKREFCDYARIIISFIAYQLKKEEKRKEARNLELQIDDMSGNYKGTAFDLLKKGESNILPLSGFDFDNHGTKKGACLVFRNTTDHGNIRTHWYFALNLYNKIHFEEFDQQYDHPLEYPVDQYFVLASKGNDKTVSHHIYQLSPKEFDPGSKTMLIPLLLGTRQLREYITNFEISPFKNLLYFNSAEIQRIRNHKEEQYFLNLVTTRPEVEAYELTQEKKKGLIGIDRGENTVAWAALVNTQGNPLFEGKDERNFIELAPKFGKKFREEYKEISKRQSHGSVKKLNIQGRVKKVIEGVGAKIISNALEYGLQIVLENLDRGFGRHGKNTFVGVRQFTHLQKFIESKLKQNNISFKKDSILQTVPAAYTSKMCSNCGVINSLTGKEDFIAAVIEQFKDHPQQKDPKISCNKLCINLDQEITSWDRNKKREVVENSFEKIKAIFSNTKIQKHEAYVEIILKKLLNPRKEKADLFKCNFCGHTCHADKQAALNIARFSLLPYRSESEKKKGITAISKLEEEYQQRLNDGIFQRGSLIL

SEQ ID NO: 126 - protein, 845 aa, Unknown
  Description of Unknown: uncultivated organism sequence
  Category: MG26 effectors
  Description: MG26-2 effector
ENKKDITLQKKYWDFIIDEETWRYKKQNKNYMTMWTLWNKNFIRPYFEELLTNNLNSNKKLENLNRQENLLARKSDISFEIQKINSKDFLWNLYILLEWWYLDHKNDVNVIKELKKQLSKIKELINDLLLLLKPSQSFWIVVDNISLNYYTRKKTPKDYDEEIRKKEVWLKNKYNWKLWKLYWINENQWIKELYEEMKTFKANQKSVFLQLLQDKSSYIDFTKLFLEKEDKNKKYFTFKDNKEIEHKNFELKLFDDISKENYDKMLNLTNQIEKESDKQKRTKLKEKRGRHFMSKSSCAKYINFCNEYKKVAMEYGKRKALVLSLQREQIESQKERWWGIISTDWKNHFLNTISIKNTEIAKNIFQKEIYRKQDEIKYYTFSSITLRALEKLCFKKESKFISNIINSLNTEFKVFVDFWKEKKDILNFDFINESEKNKIDFLNNILENQNTLWIIYRDLEKSKDILKKSKTIDEFEINLKKETYVLDTYFMSKIDFEENIKKIDWKVYEITSWDLIEKRNNSEFQTKTWFEFWSKENKENKFPIRINPEINIWYIEKNETWQKEEKNKNQTNNRRNRNRFLMMSTVSYKADKKYINNAFIKDEERIDNIQKFNEIFNENNKYDYFYWLDKWVLELVTLWIYKKVKDKIEPIKLDKINIYKITERWFNFEKNITNKNWDIKTHYLKNNPSIFIEEYINDNAIFEKLNITSCIWDLSCAKVIKWNIILNADINTYNKLQEINIKRLLYKAITEWKCISDNINYDKEKNIFSYTFENRWKNEERIISCYWKNINIEIFEKDLNNYMQFVRNKNSDTDVSITKINNLKNAICANIVWVIIELQKNILDL

SEQ ID NO: 127 - protein, 1086 aa, Unknown
  Description of Unknown: uncultivated organism sequence
  Category: MG26 effectors
  Description: MG26-3 effector
HSIPDYELELSELLDSYKGLIENLINFFYSEKEVVESKKSKFSNLKWFKEAFANFDFDEAEEKVFDLKNKEFSKMPRFKHMFFKENFKEDWYAIKDRLIKKNKTKNYEILDSLPFFQKVLKDFFEKSEQLYKELDEIISSPDNASKRKSDLRFVLQKISWNEVFKKIIKLFSLWFVDHKNDVEIVWKISEELWEFSEKIQNAIELLRVNDSFWFPVEYLSLNYYTINKTPKEYDKEITEKQNNLEKLYEWGLSELYWIDKNQTIEQLRNDMKMFKARQKSAFLQQLQNWVPFEEFQKLDFTDNKWELHKDYEILLFNDIGNDKYGEMLEITEKIAKEQDKDKRKGLKEKRWKYFIHHCKKYNKFCDEFKKVAIQYMKLKAEKLSLEREREQARFERWLAILSKDLDWNYYINSFSNNDSKNAFEKLKNINSTSGDYSYFIMKSITLRALQKLCWKENFKKTVVNKISEKFTKVNENDTGRQVRKFKSFEEIGNNIVEFYVDILDKQRTLDVSYRSWYEEWLKKLKWAKDLDELEILLKQETYTLEEHKISKNDFEEILEDYNWNSYKITSEDLEKNIETNNFTKWWNIFWTTENKEHKYISRLNPELVISLRAWEKVFKDRKKHRKSDKSFLLTMSYSHYTDKSYIDDAFIKDEERKSSLEQFNKHYNENHKFDYIYWLDKWTNELVTLWIFKKVWDKLEKVNISEKIPVYRITEKWLKYSKKYSTIVEWLNWEREIFLYKNPSLFIDEIDNEELFEKVDIDSCIWNLNCAKLIKWNIILNWDINWFLSLSKIAAKRKLYLAITEWKIRWDTVVFGYENGNKYIWYKYENRWKIDENPVFFLESFTDIVSEREFEIEFNEYIKLVKNHNSKEDVSISWINKKRVAISWNIVWIMMKLQEFFPWYIAWEAITIKTNEEDSKKNHSFLWNMVNDKIYQKLMLSLDVPPILKKYRSEIKDKEYLQHGKIFYVNKESTSSACPNCNNTLTITNNWWQFEDKTEEYVSKLFWHISQYENEMHHINDKSDQNYEKKWESWILEDGSICDYNMKHNPKWFDFIRSWDDLATYNIAKKAKEYLEFLEKQKNNNS

SEQ ID NO: 128 - protein, 996 aa, Unknown
  Description of Unknown: uncultivated organism sequence
  Category: MG26 effectors
  Description: MG26-4 effector
LRFVLQKISWNEVFKKIIKLFSLWFVDHKNDVEIVWKISEELWEFSEKIQNAIELLRVNDSFWFPVEYLSLNYYTINKTPKEYDKEITEKQNNLEKLYEWGLSELYWIDKNQTIEQLRNDMKMFKARQKSAFLEFLQMKNEFSELEELKTYLNDIEKKYKQKKWSKYNFYEELQNNTFELDSSDVDTDIDKVFKAFSLILFLETEKDDYEKLLNLTKKIEKSSTLSERTSYKIERWEFFKGKNENWIFSEDRDTSYDWFCSEFKKVAISYWRLKAEKLSLEREREQARFERWLAILSKDLDWNYYINSFSNNDSKKAFEKLKNINSTSGDYSYFIMKSITLRALQKLCWKENFKKTVVNKISEKFTKVNENDTGRQVRKFKSFEEIGDNIVEFYVDILDKQRTLDVSYRSWYEEWLKKLKWAKDLDELEILLKQETYTLEEHKISKDDFEGILEDYKWNSYKITSEDLEKNIETNNFTKWWNIFWTIENKEHKYISRLNPELVISLRAWEKVFKDRKKHRKSDKSFLLTMSYSHYTDKSYIDDAFIKDEERKSSLEQFNKHYNENHKFDYIYWLDKWTNELVTLWIFKKVWDKLEKVNISEKIPVYRITEKWLKYSKKYSTRVDWLGWEREIFLYKNPSLFIDEIDNEELFEKVNIDSCIWNLNCAKLIKWNIILNWDINWFLSLNKIAAKRHLYDAITKGFMLKDKITFDEVKNNFYYEHTLAWKKFNKVVFYLDSFESITTKDEIEKELNNYIKLVIEHKSEEDVSIDWINKKRVAISWNIVWIILKLQEKFPWYIVWEALNLDQNNKNISSNHAFLWNLINDKIYQKLMISLDVPPILKKYRSELTKDTLTQHGKVFYINENLTSKACPSCNDTLTIEVNWTLKEKDPNKHKVKVYQLFWHLTEYENEMHHLTDEEYDNLYDNDKNFKKFHSNDKWNKKQNSYLAWENCDYNMKHNPKWFDFIRSWDDLATYNIAKKAKEYLEFLEKQKNNNS

SEQ ID NO: 129 - protein, 1187 aa, Unknown
  Description of Unknown: uncultivated organism sequence
  Category: MG26 effectors
  Description: MG26-5 effector
MEKFKNLYEVRKTIRFNLLPVKHNYKKITDGQFKSDLKSFLKKYKQVVDNLSELVFIQNEDDDQILNENTRVSIAWLKEYEKQEFHKNKEKLVKRNKRGNKTGNYVSLRDTDFLLEKFQLWILRNWQEKNEEGKKIGILNNLEILSGQPLESQERNADFAYHIHQIYRRTNFEFIYEFFKNAQGAKSDALIIEIIPVLEDCKNLLKNLENYLRPKQSFGHVIEQSSLNYYTVNKKPKDYPREIKKWEEKKDEKYLSLSFYDSNVGKKKNFFFPDDFQSHLENLIESLNEEKNDEKKIKKEFGDISEINNWKLEQTYKNFKLYKAKQKSQFYEYVYQILEKYDADSEYVFFESHLQDIPTPLFANITDDKFKNLVEESKIIRDKSTKYNNSKDKKLKEAIISLKKKRGDTYFNVQNKPCPFSRYETFCGLFKEIAMTYGKIKAEVRSLEKEQIEAERLQSWAILLEKENQHYVMTIPRDRKILINNKNEYQLPSVYKKIKQLKDTTYSEYWTLFLFESLTLRALEKLCFGMDKNTFITDTNLINELKKKFKNFFITNKRGRQNLKRKDQFLEDGKELIKFYQAVLSLEETKKMILVEEYLPNEITKENICDGEFESLRDFQIALEKTCYIRQEIKISDHKKEELENKYGANVYQITSYDLFEKRKSEKEHTKIWKKFWKQDKNSGYTTRLNPQFSISYVEKREDSIKDKSGNEVERNRRKQAEYILSTTISENNDKPKFDMAFADKDRIKQNIEDFNKEFNKKAKSDPYSLYYYGIDRGQEELLTLGLFKFENQDITFTHPSDSSKSGTYKKPLPVDLEVWELPKGKLLEVVPYETKNGTKFTEAYKSISYAEKAGILEKKIISSCIDLTSAKLVNGKIVLNGDVSTLINLKLENAKRKILEIVNSLALVKKNKKGIMPAKIIFREKNKSNPERFVVNINVDGETIEKNIYFPSSNFFDFEKGQVEDGLNKILNESLQKIKEQGYCSINIPITKINHLRDAICANAVGILNFLQQKYFGIISFEDLPIDGGGSKNEHFSQNNANLGSRIEFMLLNKFKTLGLVPPNYKMVMSMQSKKEIEQLGIITYIKTEGTSSNCPHCSQGIDKKTQREHKWKHHKFKCCNNGKSCGFNTYSQEEIDKNKSSDKWNFTADKKGLDFLNSSDDVATYNIAKRGLQFIKSSNSKDKTS

SEQ ID NO: 130 - protein, 882 aa, Unknown
  Description of Unknown: uncultivated organism sequence
  Category: MG26 effectors
  Description: MG26-6 effector
MLENFKDLYEVRKNASFRLEPQENAVTNENLYNQDVDLSEILNKYKNFVYDLKNLLYIEGEKVTEEESDEEPSFTSKPFSRIFANLDLWVLQSNTENKEKDNDLSVDKLDSSNVVHINHKYLSKYFSKEFFENYDRIVKRNKHWAKTKNWTTIGNNDFLEVFFRSFFNDAFENINKLQELIDTKENEQKRKADIAFEVRRLLSRNHLWKIFPLFKGGYLTHKNDIKTIPELTDQAKELKELLDNAKIYFLEDSNFWVQVEHISLNYYTRNKTQKEYDELIKGKKKLLDSPYNKDISKLYWIDRNLPIKQLYEEMKMFKARQKSAFFQQLQNKTPFEKFKEPFTFIDNEWIKHKEFRTELFFDVEEKYYNEMLSLTKKIEKSGSKELKKERWNFLMFQDKWIKSFKWWSWFCSEYKKVAMEYWKRKAESLSLEREKILAEQERWWWVFSKVNNEFYINTFPIDKVKDAYQSLSKKQNDWELSYFILSSITLRALNKLCFSKDSKFINKEILIKLDNEFLKEKEYNNKTKEIVLRKKSDLTELELIKLYYNVLELQDSLWISYINKDSLSKLKSSKNLEEFELNLKNETYKLEEIKTTEDEFNKILKSNEWKSYKIINKEKWNFEKWWKNFWNSSKDWEIRINPELNISLRKWNEDYNDKISFHRKKDDVYLLNVNFSHFANRSYIDSSFIEDDHRKENLKKFNNLYNENIILNYFYWLDKWTNELITLGLFKKEWGKINSVNISKEIPVYRITKKWLLHSKITLKKAPKEWQNPETIHTLYKNPSLFIDELDNEEIFEKVNIESCLWNLNSAKLIKWNIILNWDILTNLNLHKLSAKRQLYIAITEWKTIIENIWFDEKEQENWAFFYEYINKGKTEKNMFFI

SEQ ID NO: 131 - protein, 1151 aa, Unknown
  Description of Unknown: uncultivated organism sequence
  Category: MG26 effectors
  Description: MG26-7 effector
MLENFKDLYEVRKNASFRLEPQENAVTNENLYNQDVDLSEILNKYKNFVYDLKNLLYIEGEKVTEEESDEEPSFTSKPFSRIFANLDLWVLQSNTENKEKDNDLSVDKLDSSNVVHINHKYLSKYFSKEFFENYDRIVKRNKHWAKTKNWTTIGNNDFLEVFFRSFFNDAFENINKLQELIDTKENEQKRKADIAFEVRRLLSRNHLWKIFPLFKGGYLTHKNDIKTIPELTDQAKELKELLDNAKIYFLEDSNFWVQVEHISLNYYTRNKTQKEYDELIKGKKKLLDSPYNKDISKLYWIDRNLPIKQLYEEMKMFKARQKSAFFQQLQNKTPFEKFKEPFTFIDNEWIKHKEFRTELFFDVEEKYYNEMLSLTKKIEKSGSKELKKERWNFLMFQDKWIKSFKWWSWFCSEYKKVAMEYWKRKAESLSLEREKILAEQERWWWVFSKVNNEFYINTFPIDKVKDAYQSLSKKQNDWELSYFILSSITLRALNKLCFSKDSKFINKEILIKLDNEFLKEKEYNNKTKEIVLRKKSDLTELELIKLYYNVLELQDSLWISYKNKDSLSKLKSSKNLEEFELNLKNETYKLEEFKTTEDEFNKILKSNEWKSYKIINKEKWNFEKWWKNFWNSSKDWEIRINPELNISLRKWNEDYNDKISFHRKKDDVYLLNVNFSHFANRSYIDSSFIEDDHRKENLKKFNNLYNENIILNYFYWLDKWTNELITLGLFKKEWGKINSVNISKEIPVYRITKKWLLHSKITLKKAPKEWQNPETIHTLYKNPSLFIDELDNEEIFEKVNIESCLWNLNSAKLIKWNIILNWDILTNLNLHKLSAKRQLYIAITEWKTIIENIWFDEKEQENWAFFYEYINKGKTEKKHVFYINEEFLTIISLDELKNELNEYIKYIKNEPNEYKKYMWNNALDTDISILAINKIKNALCANIIGIIMKLQEKFPGYVCFESLSNDNNNRDMEKEHSFLWNLINDKLYSKLNINVSVPPILKKFRSELKNSYYQYGQVIYVNEDSTSSACPVCNDKFIKWINKKWNLEEYEKNKLYGHLTESESSMHHLTDDEYNKKYDNNEKFREKHTNDKGKKKDNIYGSWNWCNYHMKDNPKWFDFIKSWDDLATYNIAKKALEYLEYLKSLNSDETK

SEQ ID NO: 132 - protein, 906 aa, Unknown
  Description of Unknown: uncultivated organism sequence
  Category: MG26 effectors
  Description: MG26-8 effector
MLENFKDLYEVRKNASFRLEPQENAVTNENLYNQDVDLSEILNKYKNFVYDLKNLLYIEGEKVTEEESDEEPSFTSKPFSRIFANLDLWVLQSNTENKEKDNDLSVDKLDSSNVVHINHKYLSKYFSKEFFENYDRIVKRNKHWAKTKNWTTIGNNDFLEVFFRSFFNDAFENINKLQELIDTKENEQKRKADIAFEVRRLLSRNHLWKIFPLFKGGYLTHKNDIKTIPELTDQAKELKELLDNAKIYFLEDSNFWVQVEHISLNYYTRNKTQKEYDELIKGKKKLLDSPYNKDISKLYWIDRNLPIKQLYEEMKMFKARQKSAFFQQLQNKTPFEKFKEPFTFIDNEWIKHKEFRTELFFDVEEKYYNEMLSLTKKIEKSGSKELKKERWNFLMFQDKWIKSFKWWSWFCSEYKKVAMEYWKRKAESLSLEREKILAEQERWWWVFSKVNNEFYINTFPIDKVKDAYQSLSKKQNDWELSYFILSSITLRALNKLCFSKDSKFINKEILIKLDNEFLKEKEYNNKTKEIVLRKKSDLTELELIKLYYNVLELQDSLWISYKNKDSLSKLKSSKNLEEFELNLKNETYKLEEFKTTEDEFNKILKSNEWKSYKIISKEKWNFAKWWKNFWNSSKDWEIRINPELNISLRKWNEDYNDKISFHRKKDDVYLLNVNFSHFANRSYIDSSFIEDDHRKENLKKFNNLYNENIILNYFYWLDKWTNELITLGLFKKEWGKINSVNISKEIPVYRITKKWLLHSKITLKKAPKEWQNPETIHTLYKNPSLFIDELDNEEIFEKVNIESCLWNLNSAKLIKWNIILNWDILTNLNLHKLSAKRQLYIAITEWKTIIENIWFDEKEQENWAFFYEYINKGKTEKKHVFYINEEFLTIISLDELKNELNEYKIY

SEQ ID NO: 133 - protein, 1119 aa, Unknown
  Description of Unknown: uncultivated organism sequence
  Category: MG26 effectors
  Description: MG26-9 effector
MLESFKDLYEVRKNASFRLEPQENAATNENLYNQDVDLSEILSKYKNFVYDLKNLLYIEGEKVTEKEKDNDLSVDKLDSSNVVHINHKYLSKYFSKEFFENYDRIIKRNKHWAKTKNWTTIGNNDFLEVFFRSFFNNAFENINKLQELIDTKENEQKRKADIAFEIRRLLSRNHLWKIFPLFKGGYLTHKNDIKTIPELTNQAKELKELLDNAKIYFLEDSNFWVQVEHISLNYYTRNKTQKEYDELIKGKKKLLDSPYNKDISELYWIDRNLPIKQLYEEMKMFKARQKSAFFQQLQSKTPFKKFKEPFTFTDNEWIKHKEFRTELFFDVEEEYYNKMLDLTKKIEKSGSNKFKKERWDFLLFQDKWTKSFKWWSWFCSEYKKVAMEYWKRKAESLSLEREKILAEQERWWWVFSKVNNEFYINTFPIDKVKDAYQSLSKKKNDWELSYFILSSITLRALNKLCFSKDSKFINKEILIKLDNEFLKEKEYNNKTKEIVLRKKSDLTELKLIKLYYNVLELQNSLRISYKNSDSFDKLKSSKNLEEFELNLKNETYKLEEFKTTEDEFNKILKSNEWKSYKIINKEKWNFEKWWKNFWNSSKDWEIRINPELNISLRKWNEDYNDKISFHRKKDDVYLLNVNFSHFANRSYIDSSFIEDDKRKENLKKFNDLYNKNIKLNYFYWLDKWTNELITLGLFKKEWGKIKSVNISKEIPVYRITRKWLLHSKVTFKKAPKEWQNPKTIHTLYKNPSLFIDELDNEEIFEKVNIESCLWNLNSAKLIKWNIILNWDILTNLNLHKLSAKRKLYIAITEWKTIIKNIWFDEKEQENWAFFYEYINKGKTEKEPVFYINEEFLTIVSLDELKNELNEYIKYIKNEPNEYKKYMWNNALDTDISMLAINKIKNALCANIIGIIMKLQEKFPGYVCFESLSNDNNNRDMEKEHSFLWNLINDKLYSKLNINASVPPILKKFRSELKNSYYQYGQVIYVNEDSTSSACPVCNDKFIKWINKKWNLEEYKKNKLYGHLTESESSMHHLTDDEYNKKYDNNDKFREKHTNDKGKKKDNIYRSWNWCNYHMKDNPKWFDFIKSWDDLATYNIAKKALEYLEYLESQNNDETK

SEQ ID NO: 134 - protein, 1151 aa, Unknown
  Description of Unknown: uncultivated organism sequence
  Category: MG26 effectors
  Description: MG26-10 effector
MLESFKDLYEVRKNASFRLEPQENAVTNENLYNQDVDLSEILSKYKNFVYDLKNLLYIEGEKVTEEESDEEPSFTSKPFSRIFANLDLWVLQSNTENKEKDNDLSVDKLDSSNVVHINHKYLSKYFSKEFFENYDRIIKRNKHWAKTKNWTTIGNNNFLEVFFRSFFNDAFENINKLQELIDTKENEQKRKADIAFEIRRLLSRNHLWKIFPLFKGGYLTHKNDIKTIPELTNQAKELKELLDNAKIYFLEDSNFWVQVEHISLNYYTRNKTQKEYDELIKGKKKLLDSPYNKDISELYWIDRNLPIKQLYEEMKMFKARQKSAFFQQLQNKTPFEKFKEPFTFIDNEWIKHKEFRTELFFDVEEKYYNEMLILTKKIEKSGSKELKKERGNFLMFQDKWTKSFKWWSWFCSEYKKVAMEYWKRKAESLSLEREKILTEQERWWWVFSKVNNEFYINTFPIDKVKGAYQSLSEKQNDWELSYFILSSITLRALNKLCFSKDSKFINKEILIKLDNEFLKEKEYNNKTKEIVLRKKSDLTELVLIKLYYNVLELQNSLRISYKNSDSFDKLKSSKNLEEFEINLKNETYKLEEFKTTEDEFNKILKSNEWKSYKIINKEKWNFEKWWKNFWNSSKDWEIRINPELNISLRKWNEDYNDKISFHRKKYDVYLLNVNFSHFANRSYIDSSFIEDDKRKENLKKFNDLYNKNIKLNYFYWLDKWTNELITLGLFKKEWGKIKSVNISKEIPVYRITRKWLLHSKVTFKKAPKEWQNPKTIHTLYKNPSLFIDELDNEEIFEKVNTESCLWNLNSAKLIKWNIILNWDILTNLNLHKLSAKRKLYIAITEWKTIIKNIWFDEKEQENWAFFYEYINKGKTEKEPVFYINEEFLTIVSLDELKNELNEYIKYIKNEPNEYKKYMWNNALDTDISMLAINKIKNALCANIIGIIMKLQEKFPGYVCFESLSNDNNNRDMEKEHSFLWNLINDKLYSKLNINASVPPILKKFRSELKNSYYQYGQVIYVNEDSTSSACPVCNDKFIKWINKKWNLEEYKKNKLYGHLTESESSMHHLTDDEYNKKYDNNDKFREKHTNDKGKKKDNIYRSWNWCNYHMKDNPKWFDFIKSWDDLATYNIAKKALEYLEYLESQNNDETK

SEQ ID NO: 135 - protein, 1112 aa, Unknown
  Description of Unknown: uncultivated organism sequence
  Category: MG26 effectors
  Description: MG26-11 effector
MNKFTKPYEVRKSIKFKLIPEIQKRPHSIPDYELELSELLDSYKGLIENLINFFYSEKEVVESKKSKFSNLKWFKEAFANFDFDEAEEKVFDLKNKEFSKMPRFKHMFFKENFKEDWYAIKDRLIKKNKTKNYEILDSLPFFQKVLKDFFEKLEQLYKELDEIISSPDNASKRKSDLRFVLQKISWNEVFKKIIKLFSLWFVDHKNDVEIVWKISEELWEFSEKIQNAIELLRVNDSFWFPVEYLSLNYYTINKTPKEYDKEITEKQNNLEKLYEWGLSELYWIDKNQTIEQLRNDMKMFKARQKSAFLQQLQNWVPFEEFQKLDFTDNKWELHKDYEILLFNDIGNDKYGEMLEITEKIAKEQDKDKRKGLKEKRWKYFIHHCKKYNKFCDEFKKVAIQYWKLKAEKLSLEREREQARFERWLAILSKDLDWNYYINSFSNNDSKNAFEKLKNINSTSGDYSYFIMKSITLRALQKLCWKENFKKTVVNKISEKFTKVNENDTGRQVRKFKSFEEIGNNIVEFYVDILDKQRTLDVSYRSWYEEWLKKLKWAKDLDELEILLKQETYTLEEHKISKNDFEEILEDYNWNSYKITSEDLEKNIETNNFTKWWNIFWTTENKEHKYISRLNPELVISLRAWEKVFKDRKKHRKSDKSFLLTMSYSHYTDKSYIDDAFIKDEERKSSLEQFNKHYNENHKFDYIYWLDKWTNELVTLWIFKKVWDKLEKVNISEKIPVYRITEKWLKYSKKYSTIVEWLNWEREIFLYKNPSLFIDEIDNEELFEKVDIDSCIWNLNCAKLIKWNIILNWDINWFLSLSKIAAKRKLYLAITEWKIRWDTVVFGYENGNKYIWYKYENRWKIDENPVFFLESFTDIVSEREFEIEFNEYIKLVKNHNSKEDVSISWINKKRVAISWNIVWIMMKLQEFFPWYIAWEAITIKTNEEDSKKNHSFLWNMVNDKIYQKLMLSLDVPPILKKYRSEIKDKEYLQHGKIFYVNKESTSSACPNCNNTLTITNNWWQFEDKTEEYVSKLFWHISQYENEMHHINDKSDQNYEKKWESWILEDGSICDYNMKHNPKWFDFIRSWDDLATYNIAKKAKEYLEFLEKQKNNNS

SEQ ID NO: 136 - protein, 1112 aa, Unknown
  Description of Unknown: uncultivated organism sequence
  Category: MG26 effectors
  Description: MG26-12 effector
MNKFTKPYEVRKSIKFKLIPEIQKRPHSIPDYELELSELLDSYKGLIENLINFFYSEKEVVESKKSKFSNLKWFKEAFANFDFDEAEEKVFDLKNKEFSKMPRFKHMFFKENFKEDWYAIKDRLIKKNKTKNYEILDSLPFFQKVLKDFFEKSEQLYKELDEIISSPDNASKRKSDLRFVLQKISWNEVFKKIIKLFSLWFVDHKNDVEIVWKISEELWEFSEKIQNAIELLRVNDSFWFPVEYLSLNYYTINKTPKEYDKEITEKQNNLEKLYEWGLSELYWIDKNQTIEQLRNDMKMFKARQKSAFLQQLQNWVPFEEFQKLDFTDNKWELHKDYEILLFNDIGNDKYGEMLEITEKIAKEQDKDKRKGLKEKRWKYFIHHCKKYNKFCDEFKKVAIQYWKLKAEKLSLEREREQARFERWLAILSKDLDWNYYINSFSNNDSKNAFEKLKNINSTSGDYSYFIMKSITLRALQKLCWKENFKKTVVNKISEKFTKVNENDTGRQVRKFKSFEEIGNNIVEFYVDILDKQRTLDVSYRSWYEEWLKKLKWAKDLDELEILLKQETYTLEEHKISKNDFEEILEDYNWNSYKITSEDLEKNIETNNFTKWWNIFWTTENKEHKYISRLNPELVISLRAWEKVFKDRKKHRKSDKSFLLTMSYSHYTDKSYIDDAFIKDEERKSSLEQFNKHYNENHKFDYIYWLDKWTNELVTLWIFKKVWDKLEKVNISEKIPVYRITEKWLKYSKKYSTIVEWLNWEREIFLYKNPSLFIDEIDNEELFEKVDIDSCIWNLNCAKLIKWNIILNWDINWFLSLSKIAAKRKLYLAITEWKIRWDTVVFGYENGNKYIWYKYENRWKIDENPVFFLESFTDIVSEREFEIEFNEYIKLVKNHNSKEDVSISWINKKRVAISWNIVWIMMKLQEFFPWYIAWEAITIKTNEEDSKKNHSFLWNMVNDKIYQKLMLSLDVPPILKKYRSEIKDKEYLQHGKIFYVNKESTSSACPNCNNTLTITNNWWQFEDKTEEYVSKLFWHISQYENEMHHINDKSDQNYEKKWESWILEDGSICDYNMKHNPKWFDFIRSWDDLATYNIAKKAKEYLEFLEKQKNNNS

SEQ ID NO: 137 - protein, 1112 aa, Unknown
  Description of Unknown: uncultivated organism sequence
  Category: MG26 effectors
  Description: MG26-13 effector
MNKFTKPYEVRKSIKFKLIPEIQKRPHSIPDYELELSELLDSYKGLIENLINFFYSEKEVVESKKSKFSNLKWFKEAFANFDFDEAEEKVFDLKNKEFSKMPRFKHMFFKENFKEDWYAIKDRLIKKNKTKNYEILDSLPFFQKVLKDFFERSEQLYKELDEIISSPDNASKRKSDLRFVLQKISWNEVFKKIIKLFSLWFVDHKNDVEIVWKISEELWEFSEKIQNAIELLRVNDSFWFPVEYLSLNYYTINKTPKEYDKEITEKQNNLEKLYEWGLSELYWIDKNQTIEQLRNDMKMFKARQKSAFLQQLQNWVPFEEFQKLDFTDNKWELHKDYEILLFNDIGNDKYGEMLEITEKIAKEQDKDKRKGLKEKRWKYFIHHCKKYNKFCDEFKKVAIQYWKLKAEKLSLEREREQARFERWLAILSKDLDWNYYINSFSNNDSKNAFEKLKNINSTSGDYSYFIMKSITLRALQKLCWKENFKKTVVNKISEKFTKVNENDTGRQVRKFKSFEEIGNNIVEFYVDILDKQRTLDVSYRSWYEEWLKKLKWAKDLDELEILLKQETYTLEEHKISKNDFEEILEDYNWNSYKITSEDLEKNIETNNFTKWWNIFWTTENKEHKYISRLNPELVISLRAWEKVFKDRKKHRKSDKSFLLTMSYSHYTDKSYIDDAFIKDEERKSSLEQFNKHYNENHKFDYIYWLDKWTNELVTLWIFKKVWDKLEKVNISEKIPVYRITEKWLKYSKKYSTIVEWLNWEREIFLYKNPSLFIDEIDNEELFEKVDIDSCIWNLNCAKLIKWNIILNWDINWFLSLSKIAAKRKLYLAITEWKIRWDTVVFGYENGNKYIWYKYENRWKIDENPVFFLESFTDIVSEREFEIEFNEYIKLVKNHNSKEDVSISWINKKRVAISWNIVWIMMKLQEFFPWYIAWEAITIKTNEEDSKKNHSFLWNMVNDKIYQKLMLSLDVPPILKKYRSEIKDKEYLQHGKIFYVNKESTSSACPNCNNTLTITNNWWQFEDKTEEYVSKLFWHISQYENEMHHINDKSDQNYEKKWESWILEDGSICDYNMKHNPKWFDFIRSWDDLATYNIAKKAKEYLEFLEKQKNNNS

SEQ ID NO: 138 - protein, 752 aa, Unknown
  Description of Unknown: uncultivated organism sequence
  Category: MG26 effectors
  Description: MG26-14 effector
NIMEKMQNLYEVRKSLRFELKPISDNIKFLESNKSIVLDNFGTLILEHKKFINLLSETLFYKEVENLIEKEEKIQNVFWKFFSENNFEINKEIEENKQEDFSEYEIYKTVYFKYQWVQKIFKSEWIENKKDITLQKKYWDFIIDEETWRYKKQNKNYMTMWTLWNKNFIRPYFEELLTNNLNSNKKLENLNRQENLLARKSDISFEIQKINSKDFLWNLYILLEWWYLDHKNDVNVIKELKKQLSKIKELINDLLLLLKPSQSFWIVVDNISLNYYTRKKTPKDYDEEIRKKEVWLKNKYNWKLWKLYWINENQWIKELYEEMKTFKANQKSAFLQLLQDKSSYIDFTKLFLEKEDKNKKYFTFKDNKEIEHKNFELKLFDDISKENYDKMLNLTNQIEKESDKQKRTKLKEKRGRHFMSKSSCAKYINFCNEYKKVAMEYGKRKALVLSLQREQIESQKERWWGIISTDWKNHFLNTISIKNTEIAKNIFQKEIYRKQDEIKYYTFSSITLRALEKLCFKKESKFISNIINSLNTEFKVFVDFWKEKKDILNFELINESEKNKIDFLNNILENQNTLWIIYRDLEKSKDILKKSKTIDEFEINLKKETYVLDTYFMSKIDFEENIKKIDWKVYEITSWDLIEKRNNSEFQTKTWFEFWSKENKENKFPIRINPEINIWYIEKNETWQKEEKNKNQTNNRRNRNRFLMMSTVSYKADKKYINNAFIKDEERIDNIQKFNEIFNENNKYDYFY

SEQ ID NO: 139 - protein, 1283 aa, Unknown
  Description of Unknown: uncultivated organism sequence
  Category: MG26 effectors
  Description: MG26-18 effector
MSHLFNRFTNLYSLSKTLRFELKPVGETQKMLEDAKIFEIDKVRKEKYEATKPYFDRLHREFVEKALENAEISNLSGYFEIFKKWKKDKKAHEKELQNKEKTLRKEVVSLFDAQAKSWTEKYPGLKKKDIGILDEEGVFEQILKVRYGSEDESFLREADGNFILDDEGEKISIFDEWKGFTGYFKKFFETRKNFYKSDGTSTALATRIIDQNLKRFCDNMENFEKIKKKIDFSEVEKDFGESMNEVFSVSFYNSCLLQEGIDFYNKVLGGETLKNGEKLKGLNELINKYRQDHKGEKIPFFKLLDKQILSEKEKFIDEIERDDQLLEVLKDFYQSAEQRTKVLKALFKDLVSHEKNYDLSQVYLSKEALNTISHKWTGETELFEGQLYEVLRKSKEDSVKPKKKDRGYSFPDFIPLCYIQEALQKISAKKFWKERYYNEISGFSEENIWKQFLAILDFEFSSLFKRKVTNSETGEVMQLGYDVFKNDFKPLLQNFKNDQKAKVIIKNFADEVLRIYQMAKYFALEKKRKWERKWVGDDHKPGNFYDDPDFGFKINFYDNAYEEIVQPYNKLRNYVTKKPYSEEKWKLNFENPTLADGWDKNKESDNSAVILKKGEKYFLGLMAKGYNKIFDDRFSEEFSENITQEKYEKMNYKLLPGANKMLPKVFFGKSNIDFYNPSEKVLEIRNHSSHTKSGAPQKGFEKKEFNLNDCHILIDFFKKSIAKHPDWKVFDFHFSETSKYSDISDFYREVEEGGYKISFQDISGAYINQKNEAGELYLFQIKNKDWNEGSTGRKNLHTLYFESLFSKENIQQNFPFKLNGQAEIFYRPKTDVQKLGTKKDKRGKEVINHKRYNENKIFFHVPLTLNRTQGDARQFNSKINQFLANNPQINIIGVDRGEKHLAYYSVINQKGGILDSGSLNKITGVNYAEKLEEKAKSREQARKDWQTVEGIKDLKKGYISQVVRKLADLAIEHNAIIVFEDLNMRFKQIRGGIEKSVYQQLEKALIEKLNFLVNKGEKDPNQAGHLLKAYQLAAPFTTFKEMGKQTGILFYTQAAYTSKIDPITGWRPHLYLKYASAEKAKKDIDKFSKIEFKQGRFEFTYDIKKFRELKKSPKNTIWTVCSNVERFRWNRHLNNNKGDYDHFKGVTDKLMKLFNEYKIDFQRGDILGQVDSLETKGNEKFFKDFIFLFNLICQIRNTDDSEKAKREGKDDFILSPVEPFFDSRKENGANLPKNGDDNGAYNIARKGVILLNKLSEHLKKDPDFKKYPELYISNTEWDDFARK

SEQ ID NO: 140 - protein, 1302 aa, Unknown
  Description of Unknown: uncultivated organism sequence
  Category: MG26 effectors
  Description: MG26-19 effector
MKKEKQFSPFEKFTNLYSLSKTLRFELRPTEETKTMLEEAQVFAKDEVIQKKYEATKPYFNRLHREFVDEALLNVKINGLSYYFQTLQEWQKDKKNKDSKKIYEKKTQELRKQIVKFFDDKANEWASYYDKRQIEYADKKAIKIKFVDDSGKKISGTKIFSSKGVLGILLDKFPEAKNDLYVFCDGFFGYYDKFKKTRENFYKDDGTSTALATRMIDQNLKRFCDNLALFENIKEKVDFSEVEQNFGVVLTQVFSLEYYNQCLLQNGIDGYNDILGGKPLKNGKKKKGLNECINLYKQKTGEKLSFFKTLDKQILSEKERFLDEIKSDEKLLEVLKNFEKTAEEKIPLLKNLFADFVENNENYDLSQIYIEKKQFDPNSCKWIDKSSIDNFQQSLYEVMKKEKLAKYDKKEESYKFPDFIALSYIKTALENGKSEGNFWKEKYYEISGFSEKTFWEQFLAIFSFEFSSLLGREITNQETGEKKMTGYNPFKRTFEALLQNFKVDQNAKIVIKDFADSVLTVYQMAKYFAVEKKRAWLAEYDLDSFYTHPEMGHLKFYDNAYEDIVQVYNDLRNYLTKKPYSEEKWKLNFENPTLANGWDKNKESDNSAIILRKNGEYYWGLMVKGYNKIFDDRYQEKFTDGLNEGKYEKIVYKFFPDQAKMFPKVCFSAKGLEFFKPSEEIWNIYQNDEFKNGDTFSVQSMQKFIDFYKDCLAKYEGWECYDFCHLKSTKSYQDNIGEFFRDVAEDGYKITFQDISEKYINEKNQKGELYLFEIRNKDWNLDKAREGKIKTTQKNLHTLYFESLFSAENIARNFPMKLNGQAEIFYRPKTEQGKLGIKKDKQGKEVTNHKRYNENKIFFHIPLTFNRTKNDPYRFNAQVNNFLAQNPSINIIGVDRGEKHLAYYSVITQNGEILDSGSLNSIGGVNYAEKLEEKAKNQEQAQKDWQAVEGIKDLKKGYISQVVRKLADLAIKHNAIIVFEDLNMRFKQIRGGIEKSVYQQLEKALIEKLSFLVNKGETNATKAGHLLKAYQLSAPFTTFQDVGKQTGIIFYTQAAYTSRIDPISGWRPHLYLKYSSADKAKEDILKFSKIEFINNRFEFTYDIKKFQQAKEYPKNTVWTVCSNIERFRWDKNLNNNKGGYTHYPNITDGKSENRNPKSTKPNNFKELFEKYVIDIARDIKEQIRLLEPKGNEKFFEHFIFFFNLICQIRNTDDSEQAKKTGKDDFIFSPIVPFFDSRKENEKNLPKNGDDNGAYNIARKGILILQKISEFYKEKGGCEKMNWGNLYVSNNDWDDFIKIKPHN

SEQ ID NO: 141 - protein, 1293 aa, Unknown
  Description of Unknown: uncultivated organism sequence
  Category: MG28 effectors
  Description: MG28-1 effector
MKAFENFTGLYSLTKTLRFELKPIGKTLEYIEKNGLLDRDRHRANSYVEVKKIIDRYHKQFIEDSLRNFKLTYENEGKKDSLEEYFYHYKLRNRDDKQKKDFDEIQKNLRKQIASQFKKQDRFKRIDKKELIKEDLLEFVDNNEKKFIDEFRDFTTYFTGFHENRQNMYSEEEKSTAIAYRLIHENLPKFIDNISVFERVAVTDVANCFVQIYSDFEEYLNVNDISEIFRLDYYTEILTQAQIDVYNLIIGGCSQGDVKIKGLNEYINLYNQQQKDKSQRLPKLKPLFKQILSDRNAISWLPESFKSDNELLENLENCYQSYNEANVDKKSIFLRLKELLVSMSNYEIDKIFVRNDSQLTDISQKMFGNYNVISKSLLEDLKRSEPRKSKKETDESFEERLRNIIKNEESFKIERINSSLQKMDIDEYKKSVCDYYAGLAVDDKGNDIFDRIEKAYSEVKDLLNSPYPSDKNLIQEDKDIDKIKNLMESIKELHRFVKPLCGKGNEPDKDDRFYGEFTILYEELDKITPLYNMVRNYLTRKPYSTEKVKLFFENNGAMLNGWVDSKTENSDNGTQYGGYLFRRKNGIEEYDYYLGISSDVKLFRKDTIIAEHDKSDFERLDYYQLKSQTFYGSAYKGDYELETQNVIKAIDNFISKNGETDISEKIISDRANKNSKTGTAKGYLNFIKNTSIYDDLLNDDIFKNANDQLINSLKKTLMSFERLSTARKIANDNFNLFSDLMDAVDVLMQEKVFTYNAVSINEFESTINRDKKPLLLFKITNKDLSFADTFLSGKRKSRGVENLHTLYFKALMSGKQNVFDIGTGSVYFREKSIRYSEEKMKYGHHYDMLKDKFQYPIISNKRYVYDKFQFHLSMVQNYNGNKNLDINTIANDYIKKSDDLHVIGIDRGERHLLYLTVIDMKGNIKKQFSLNEIVNNYNGNTYRTNYRDLLDDREKKRDEERKSWRTIETIKELKEGYLSQVIHKISELMIEYNAIIVLEDLNLEFMRGRQKVEKSVYQKFEKMLIEKLNYLADKKKDPEDLGGILKAYQLTNELKKDGKQSGFLFYTQAWNTSKIDPVTGFVNLFDTRYENIAKSKTFFEKFDSIRFNTEKNWFEFSFDYNEFTTKAEGTKTKWTICTYGKRIESYRNPDKNLQWDGKEINLTEEFKLFFEKYGININSNLQSEIVKQDKKDFFEGLLHLLKLTLQMRNSKTGTDIDYMQSPVADENGIFYNSDECGKSMPENADANGAYNIARKGLMIIDKIKKSKDIKKIDLKISNKEWLSFAQNKPYLND

SEQ ID NO: 142 - protein, 846 aa, Unknown
  Description of Unknown: uncultivated organism sequence
  Category: MG28 effectors
  Description: MG28-2 effector
DSFSMAQINNWLTDYMGDTYKSIESYFIALGAEDDGNTQKPNLFIRIENAYTEAKSLLTKVYPKDRKLSQDKINVEKIKNLLDAIKNLQHFVKPLLGRGTESEKDSRFYGDFTPLWETLEQITPLYNMVRNRMTEKPYSDEKIKLYFDNNGSFLNGWVDSKTESDNATQYGGYLFRKLNSIGEYDYYLGVSAATKLFRSFNPVADNDKSCFERLDYYQLKGKTFYGALYKGDYETESANIRHSIDDVVCRSGSTLIKEKINIERQKKQPKISTAIGYLKFIRQQDGELYSTLLKDDIFEEANQAIMVSMKATLSSLDRIPFAKEYALRHYILFADMMDDIEVLLQGKVFSYFPISQNELDEAVTRISKPLYLFKITNKDLSFAETHEKGLRKSRGIENLHTMYFKALMSGCQDVFDIGSGSVFFREHKISYTDEQMKRGHHYEMLKDKFNYPIISNKRYAIDKFQFHISITMNYNADKSKDINYITNAYLKKSNDTHIIGIDRGERHLLYLSLIDLQGNIIDQFSLNEIVKEYNGKTYCTNYHALLDAKENQRDEARRSWQTIENIKELKEGYMSQVIHKIVDLMIKYNAIVVLEDLNLGFKRGRQKVEKQVYQKFEKMLIDKLNYLVDKKLDANEAGGVLRAFQLTNKFESFQKLGKQSGFLFYIPAWNTSKMDPTTGFVNLLDTRYENMAKAKAFFGKFKSIRFNNSKNWFEFSFDYNDFTTKAEGTKTQWTICTYGTRIENKRDPMQNNNFVSEEFELTNRFKDLFANTKYNIDLNGNLIEQICSQSDASFFKELLHLMNLTLQMRNSVVGTLIDYMISPVSNANGEFYDSRKCGKNLPENAD

SEQ ID NO: 143 - protein, 898 aa, Unknown
  Description of Unknown: uncultivated organism sequence
  Category: MG28 effectors
  Description: MG28-3 effector
LKSRIFEGDDSLRNLLKNLGEYDLEHVFIPVDIHLTEISQKYYGNWSLIKKAMEDDVKAKNPQKRNETTEKYEERIEKLLKTNESCSLAQINRLMKFYLGDEFKPIELYFVGLGAEDNENGQKPNVFVLIENAYAEASSLLTSPYPTDRKLSQDKISVDKIKTLLDAIKDLQHFVKPLLGKGGESEKDNRFYGEFTPLWEILDQITPLYNMVRNRMTQKPYSEEKVKLNFDNSTLLAGWDLNKEADNTCTILRKDGNYYLAIMDKKYNKVFRQECLVASGDCYEKMEYKLLPGANKMLPKVFFSKSRINEFNPSDKLMQNYEKETHKKGENFNVDDCRALIDFFKKSIDKHEDWSKFDFHFSDTKKYDDLSGFYREVEQQGYKISFRNVSVAYINRLVDEGKIYLFQIYNKDFSTYSKGTPNLHTMYWKMLFDERNLADVVYKLNGEAEVFFRKHSIDVDKPTHPANVPIDNKNKLNAKKSSVFEYDLIKDRRYTVDKFQFHVPITLNHKAAGYSSINSLVNTYLKESKATHIIGIDRGERHLLYLSLIDMNGNILEQYSLNEIVNEYKGNTYRTNYHDLLDAKEKQRDEARRSWQTIENIKELKEGYMSQVIHKVAELMVKYNAIVVLENLNTGFMRGRQKVEKQVYQKFEKMLIDKLNYLVDKKCDPNELGGVLNAYQLTNKFESFQKVGKQSGFLYYIPAWNTSKMDPTTGFVNLLDTRYENLPKAKSFMGKFKSIRFNPTKNWFEFAFDYNDFTTKAAGTRTQWTLCTYGTRIETKRDPKQNNMFVSEEFDLTNRFKQLFADMDLNGNLMEQISSQNDVAFYKELLHLLHLTLQMRNSITGTEVDYMISPVMNDQGEFYDSRNCGKSLPENADANGAYNIARKGLWIIDQIKRA

SEQ ID NO: 144 - protein, 779 aa, Unknown
  Description of Unknown: uncultivated organism sequence
  Category: MG28 effectors
  Description: MG28-4 effector
LWETLEQITPLYNMVRNRMTEKPYSDEKIRLYFDNNGSFLNGWVDSKTDSDNANQYGGFLFRKLNSIGEYDYYLGVSAATKLFRSFNPIDDSDKSCFERLDYYQLKGKTFYGALYKGDYETESANIRHSIDDVVCRSGSTLIKEKINIERQKKQPKISTAIGYLKFIRQQDDELYNILLKDDIFEEANQAIMVSMKATLSSLDRIPFAKEYALRHYILFADMMDDIEVLLQGKVFSYFPISQNELDEAVTRISKPLYLFKITNKDLSFAETHEKGLRKSRGIENLHTMYFKALMSGCQDVFDIGSGSVFFREHKISYTDEQMKRGHHYEMLKDKFNYPIISNKRYAFDKFQFHISITMNYNADKSKDINYITNAYLKESNATHIIGIDRGERHLLYLSLIDLQGNIVEQFSLNEIVKEYNGNTYCTNYHALLEAKENQRDYARRSWQTIENIKELKEGYMSQVIHKIVDLMIKYNAIVVLEDLNLGFKRGRQKVEKQVYQKFEKMLIDKLNYLVDKKLDANEAGGVLRAFQLTNKFESFQKLGKQSGFLFYIPAWNTSKMDPTTGFVNLLDTRYENMAKAKAFFGKFKSIRFNNSKNWFEFAFDYNDFTTKAEGTKTQWTICTYGTRIENKRDPMQNNNFVSEEFELTNRFKDLFANTKYNIDLNGNLIEQICSQSDASFFKELLHLMNLTLQMRNSVVGTTIDYIISPVANANGEFYDSRNCGKNLPENADANGAYNIARKGLWIINQIKQTEDLTKVKLSISNKEWLQYAQKQINNT

SEQ ID NO: 145 - protein, 1303 aa, Unknown
  Description of Unknown: uncultivated organism sequence
  Category: MG28 effectors
  Description: MG28-5 effector
MHTYSEFTGLYQLSKTLRFELKPIGKTKENIERNGILERDKERDVAYKKVKKVIDEYHKAFIEQMLDDFELNLKNEGNMDSLEEFYFLYHLPTTDPKRKDDLNNVQEALRKQISERFTKSEQYKRLFGKELIREDLINEFVNTTKGSAYIRAQNGNETLGDDEVLQKQEELATEVARFKDFTGYFDGLKKNRENMYVADDETTSIAHRMITENLPKFIDNMDVFEKIVASEVATHFDEVYKVFEPYMNVYSINEMFRLDYFSMVLTQKQIDVYNAIIGELNKHTNLYNQQQKNNNLPKLKPLFKQILSERNAISWLPDEFGSDNEMLQSIGKCYQDLKERVFGSLKTLLENIKDYELEQIYLPNDLQLTDIAQKHFGSWEVIKNAVREETKKLNPQKNRESTEKYEERIGKLLKANESYSIGFINSLLKNRIDDFKPLEEYFTEMGAEDNGNEQKLNHFSRIENAYTEVKTLLNVDYPEGKTLSQDKANVEKIKNLLDAIKDLQHFVKPLLGKGTESEKDPLFYGEFVPLWESLDQITPLYNMVRNRMTQKPYSDEKIRLYFDNNGYFLRGWVDSKTESDKATQYGGYLFRRRNSIGEYDYYLGVSSATKLFRSFNLVTEEDKSSFERLDYYQLKGNTFYGSLYKGNYEQESSNIKHALDVFVSKHGCAFVKQKINVEKGKKQPKVSTASGYLKFIEQLDIELYDSLLKDEVFKKSNQEIMSSLRATLLSLDRIPSAKEYAHKKFTVFSEMMDDIDIMLRGKVFSYFPISRKELDEAVNRKTKPLYLFKITNKDLSFAETYEKGLRKSRGAENLHTMYFKALMSGNQNVFDIGSGSVYFREHKIDYSEEQLKKGHHYEMLKDKFAYPIISNKRYAYDKFQFHLSVTMNYNADKNKDINPLVNAYLKESKATHIIGIDRGERHLLYLSLIDLKGNIVEQYSLNEIVNEYNGGFYRTNYHDLLDSKEKQRDEARRSWQTIENIKELKEGYMSQVIHKIAQLMVKYNAIVVLEDLNPGFMRGRQKVEKQVYQKFEKMLIDKLNFLVDKKLDAEEIGGVLNAYQLTNKFESFQKQGKQSGFLFYIPAWNTSKMDPTTGFVNLLDTRYENMEKTKVFFGKFDSIKYNSAKDWFEFAFDYDNFTTKAEGTKTKWTLCTYGTRIETKRDPKQNNSFVSKELDLTSRFKELFADNHIDLNSNLKEHICSQSDAAFFKGLLNLVHLTLQMRNSITGTETDFLISPVMNAKGEFYDSRKCGKNLPENADANGAYNIARKGLWIIEQIKQTEDLSKLKLAISNKEWMRYTQGLE

SEQ ID NO: 146 - protein, 780 aa, Unknown
  Description of Unknown: uncultivated organism sequence
  Category: MG28 effectors
  Description: MG28-6 effector
MKEFTKLYPLSKTLRFELKPIGKTKDNIEKNGILERDSERAVAYKAVKKVIDEYHKSFIELKLADFELMQSQLEEFYLLYLLPTSEQKRKTDLPKVQESLRKQISDRFTKDDYYKRLFGKELIREDLTEFVNTPYYENIIRSIPGNEQLTDEEVKEIQENTQREISQFNDFTTYFVGFYDNRRNMYVAEDKATSIAHRMIDENLPKFVDNMDVFEKIAASDVAQHFGELYKAMEPYLNVCEIADLFKLNYFSMVLTQTQIDVYNAIIGGKTLDDGTKIQGLNEYVNLFNQQQKDKANRLPKLKPLFKQILSERNAISWLPDEFENDNEMLQSIEKCYQDLKAQVFEGEHSLKILLGSIGDYDLEHIYLPNDLQLTDISQKHFGSWSAIKNAVVEDIQSANPKKKTESGEKYDERISKLLKENDSFSIAYINRLMHSALDDSKPIESYFAQMGAEDNENCQKLNHFARIENAYTEIKSLLNTEYPSGKSLSQDKANVEKIKNLLDAIKDLQHFVKPLLGSGRESEKDNRFYGEFVPLWETLDQITPLYNMVRNRMTKKPYSEEKIKINFDNSTLLAGWDLNKESDNTCTLLRKDGNYYLAIIDKRHNKVLKPENLISDGECYEKMEYKLLPGANKMLPKVFFSKSRIAEFNPSETLVKNYENETHKKGDKFNLDDCHALIDFFKESIKKHEDWSKFGFKFSDTSSYEDLSGFYREVEQQGYKITFRNVSARYIDQLVDEGKIYLFQIYNKDFSPFSKGTPNMHTLYWKALFDERNLTDVVY

SEQ ID NO: 147 - protein, 1339 aa, Unknown
  Description of Unknown: uncultivated organism sequence
  Category: MG28 effectors
  Description: MG28-7 effector
MKNLKQFVGLYPVSKTLRFELKPVGNTKENIERNGILEKDNQRAVGYKAIKKVIDEYHKAFIEQMLNEFELNLSNDGNLDSLEEFFLLYHLSSNDPTRDNITKVQESLRKKISERFTKSEQYKRLFGKELIREDLAQFVETPRYESFIRSQKGNENLSDDEVRQIQNEIIQEIGQFRDFTTYFSGFYENRKNLYVADDKATSIANRMINENLPKFIDNMDVFEKIAASEVAIHFDTLYKEMEAYLNVKSIEEMFQLDYFSIVLTQKQIDVYNSIIGGKTLEDGTKILGLNEYVNLYNQQQNNKDNRLPKLKPLFKQILSERNAISWLPDEFASDNEMLESIERCYQDLRKQVFEGENSLKELLKGIVDYDLEHIYLPDDLQLTNISQKHYGNWSVIKKAHEEYLRKEMQENLMVNKPQRRNESDENYQERIQELLKTKKYEESIEKQLKVNDSFSLAQINRLMSIYQGEDSKPIELYFATMGAEEIGNEKKPNLFIRIENAYTEVKTLLTTAYPKDRKLSQDKANVEKIKNLLDAIKNLQHFVKPLLGKGTEGEKDNHFYGEFTPLWEALDQITPLYNMVRNRMTQKPYSDEKIKLYFDNNGSFLNGWVDSKTESDNATQYGGYLFRKRNSIGEYDYFLGVSAATKLFRSFNSVEASDRSSYERLDYYQLKGKTFYGTLYKGNYETESANIRHAIDNLVYHAGSISIKEKINAERMKKQPKVSTAIGYLKYIMQQDCELYDILLKDDTFEKSNQAIMASMKATLLSLDRIPSAKEYAQRNYKLFSEMMDDIDMLLQGKVFSYFPVSQRELDETVNRTTKPLYLFKITNKDLSYAETHEKGLRKSRGSDNLHTMYFKALMSGCQDVFDIGSGSMFFREHKLVYTEDQLKKGHHYDMLKDKFNYPIVSKKRYAFDKFQFHLSVTMNYNSNKSKDINPMVNDYLKESNATHIIGIDRGERHLLYLSLIDLNGNIIEQYSLNKIANEYKGNIYRTDYHELLDAKEKQRDEARRSWMSIENIKELKEGYMSQVIHKIAELMVKYNAIVVLEDLNLGFMRGRQKVEKQVYQKFEKMLIDKLNYLVDKKIDANVLGGVQKAYQLANKFESFQKLGKQSGFLFYIPAWNTSKMDPTTGFVNLLDTRYENMAKAKAFFAKFKSIQFNAIKGWFEFAFDYDDFTTKAVGTKTQWTLCTYGTRVETKRDAKQNNMFVSEEFNLTSKFKELFVLYKIDLNENLREQICSQSEAIFFQKLLHLLRLTLQMRNSITGTEVDYLISPVMNASGGFYDSRKCGKNLPENADANGAYNIARKGLWIIEQIKQSNDLSKLKLAISNKEWLRYAQGVD

SEQ ID NO: 148 - protein, 1339 aa, Unknown
  Description of Unknown: uncultivated organism sequence
  Category: MG28 effectors
  Description: MG28-8 effector
MKNLKQFVGLYPVSKTLRFELKPVGNTKENIERNGILEKDNQRAVGYKAIKKVIDEYHKAFIEQMLNEFELNLSNDGNLDSLEEFFLLYHLSSNDPTRDNITKVQESLRKKISERFTKSEQYKRLFGKELIREDLAQFVETPRYESFIRSQKGNENLSDDEVRQIQNEIIQEIGQFRDFTTYFSGFYENRKNLYVADDKATSIANRMINENLPKFIDNMDVFEKIAASEVAIHFDTLYKEMEAYLNVKSIEEMFQLDYFSIVLTQKQIDVYNSIIGGKTLEDGTKILGLNEYVNLYNQQQNNKDNRLPKLKPLFKQILSERNAISWLPDEFASDNEMLESIERCYQDLRKQVFEGENSLKELLKGIVDYDLEHIYLPDDLQLTNISQKHYGNWSVIKKAHEEYLRKEMQENLMVNKPQRRNESDENYQERIQELLKTKKYEESIEKQLKVNDSFSLAQINRLMSIYQGEDSKPIELYFATMGAEEIGNEKKPNLFIRIENAYTEVKTLLTTAYPKDRKLSQDKANVEKIKNLLDAIKNLQHFVKPLLGKGTEGEKDNHFYGEFTPLWEALDQITPLYNMVRNRMTQKPYSDEKIKLYFDNNGSFLYGWVDSKTESDNATQYGGYLFRKRNSIGEYDYFLGVSAATKLFRSFNSVEASDRSSYERLDYYQLKGKTFYGTLYKGNYETESANIRHAIDNLVYHAGSISIKEKINAERMKKQPKVSTAIGYLKYIMQQDCELYDILLKDDTFEKSNQAIMASMKATLLSLDRIPSAKEYAQRNYKLFSEMMDDIDMLLQGKVFSYFPVSQRELDETVNRTTKPLYLFKITNKDLSYAETHEKGLRKSRGSDNLHTMYFKALMSGCQDVFDIGSGSMFFREHKLVYTEDQLKKGHHYDMLKDKFNYPIVSKKRYAFDKFQFHLSVTMNYNSNKSKDINPMVNDYLKESNATHIIGIDRGERHLLYLSLIDLNGNIIEQYSLNKIANEYKGNIYRTDYHELLDAKEKQRDEARRSWMSIENIKELKEGYMSQVIHKIAELMVKYNAIVVLEDLNLGFMRGRQKVEKQVYQKFEKMLIDKLNYLVDKKIDANVLGGVQKAYQLANKFESFQKLGKQSGFLFYIPAWNTSKMDPTTGFVNLLDTRYENMAKAKAFFAKFKSIQFNAIKGWFEFAFDYDDFTTKAVGTKTQWTLCTYGTRVETKRDAKQNNMFVSEEFNLTSKFKELFVLYKIDLNENLREQICSQSEAIFFQKLLHLLRLTLQMRNSITGTEVDYLISPVMNASGGFYDSRKCGKNLPENADANGAYNIARKGLWIIEQIKQSNDLSKLKLAISNKEWLRYAQGVD

SEQ ID NO: 149 - protein, 756 aa, Unknown
  Description of Unknown: uncultivated organism sequence
  Category: MG28 effectors
  Description: MG28-9 effector
MKQFTNLYQVQKTLRFELRPVGRTKENIEKNGILERDNLRAIGYKSIKKVIDEYHKAFIEMMLNDFKLNMADSGQFNSLEELYMLYHLPSNDPARKEKMVKVQEALRKSISDLFTKSEQYKRLFGKELIREDLEPFVRTLQFEEYIRSQKGNENLSDEEVHQIQDEVVQDIAQFRDFTTYFAGFYENRKNMYVADDKATSIANRMINENLPKFIDNMDIFEKIAASDVAKNFDVLYKEMEAYLNVNSIAEMFRLDYFSMVLTQRQIDVYNAIIGGKTEKDGRKIQGLNEYINLYNQQQKDKANRLPKLKPLFKQILSERNAISWLPDEFSSDNEMLESIGKCYQDLKAQVFDGESSLKALLKKINEYDLEHIYLPNDLQLTNVAQRWYGSWSVIQNAYTESLKTANPPKRNETTEKYEARIEKLQKAIDSLSLAQINRLMNGYLGEEYKPVEQYFSTMGAEDDGDVQKPNLFIRIENAYTEVQSLLRTSYPEGRSLSQDKANVEKIKNLLDAIKDLQRFVKPLMGRGTESEKDNRFYGDFAPLWETLDQITPLYNMVRNRMTQKPYSDEKIKLNFDNSTLLAGWDLNKETDNTCTLLRKDGLYYLVIINKQHNRVLMAENLSADGDCYEKMVYKQLGQISQQLPRIAFSNSWQQRISIPADVLRIKKTESFKTNNEDLQKLIAFYKYFISQHEEWNTFFKIKFTDKADYKNLPEFYSEVDSLFYSLNFSKVSVAYINQLVDEGKIYLFQIYNKDFS

SEQ ID NO: 150 - protein, 1271 aa, Unknown
  Description of Unknown: uncultivated organism sequence
  Category: MG28 effectors
  Description: MG28-10 effector
MKSYSDFTGLYLLSKTLRFELKPIGKTKENIERNGILERDNQRAVGYKAIKKVIDEYHKTFIEQMFDSFELKLEDEGRMNSLEEFYFLYHLPITDTKRKDNLSKVQEALRKQISERFTKSEQYKRLFGKELIREDLAEFVKTPKYEEIIRSQQGNENLTEEEIRKIQEEVEKTIDQFYDFTTYFVGFYDNRKNMYVADDKATSIAHRMIGENLPKFIDNMDVFEKIAASDVATHFEALYKAMEPYLNVNSISEMFQLGYFSMVLTQKQIDVYNAIIGGMVLDDGAKIQGLNEYVNLYNQQQKDKSNRLPKLKPLFKQILSECNAISWLPDEFESDNNMLESIEKCYQDLKNQVFEGENSLKNLLKNIGEYDLEHIYLPDDLQLTDIAQKHYGNWSMIKKALEEDVKAKNPQKRNETVEKYEERIEKLLKANECYSLAQINRLMKVYLGDEYKPIETYFAALGAEDNENGQKPNLSIRIENAHTEASNLLISTYPVDRKLSQDKANVERIKNLLDAIKDLQHFVKPLLGKGTESEKDNRFYGEFVPLWERLDQITPLYNMVRNRMTQKPYSEEKIKINFDNSTLLAGWDLNKEADNTCIILRKDGNYYLAIMDKRNNKVFETKNLVSEGDCYEKMEYKLLPGANKMLPKVFFSKSRMDEFKPSAQLLRNYERGTHKKGDNFSLDDCHALIDFFKESIEKHEDWSKFGFKFSDTKTYEDLSGFYREVEQQGYKISFRNVSVEYINRLVDEGKIYLFQIYNKDFSTYSKGTPNLHTLYWKMLFDERNLADVVYKLNGEAEVFFRKHSIEAEKPTHLANKPIENKNKLNEKKTSVFEYDLVKDRRYTVDKFQFHVPITMNFKAAGLNNINPLVNVYLKESNVTHIIGIDRGERHLLYLSLIDLQGNIVEQYSLNEIVNEYKGNTYRTNYHDLLDAKERQRDEARRSWQTIENIKELKEGYMSQVIHKIAELMVKYNAIVVLEDLNFGFMRGRQKVEKQVYQKFEKMLIDKLNYLVDKKCEADEMGGVFNAYQLTNKFESFQKLGKQSGFLFYIPAWNTSKMDPTTGFVNLLDTRYENMAKAKAFFGKFRSIRYNAAKGWFEFAFDNDDFNTKATGTRTQWTLCTYGTRIETKRDPKQNSNFVSEEFDLASRFKDLFDQYDIDLKGNLMEQICSQNDAAFFKELLHLLHLTLQMRNSITGTEVDYLISPVMNDNGEFYDSRKCGKNLPLNADANGAYNIARKGLWIIEQIKQTEDLSKLKLAISNKEWMRYAQGLE

SEQ ID NO: 151 - protein, 1271 aa, Unknown
  Description of Unknown: uncultivated organism sequence
  Category: MG28 effectors
  Description: MG28-11 effector
MKSYSDFTGLYLLSKTLRFELKPIGKTKENIERNGILERDNQRAVGYKAIKKVIDEYHKTFIEQMFDSFELKLEDEGRMNSLEEFYFLYHLPITDTKRKDNLSKVQEALRKQISERFTKSEQYKRLFGKELIREDLAEFVKTPKYEEIIRSQQGNENLTEEEIRKIQEEVEKTIDQFYDFTTYFVGFYDNRKNMYVADDKATSIAHRMIGENLPKFIDNMDVFEKIAASDVATHFEALYKAMEPYLNVNSISEMFQLGYFSMVLTQKQIDVYNAIIGGMVLDDGAKIQGLNEYVNLYNQQQKDKSNRLPKLKPLFKQILSECNAISWLPDEFESDNNMLESIEKCYQDLKNQVFEGENSLKNLLKNIGEYDLEHIYLPDDLQLTDIAQKHYGNWSMIKKALEEDVKAKNPQKRNETVEKYEERIEKLLKANECYSLAQINRLMKVYLGDEYKPIETYFAALGAEDNENGQKPNLSIRIENAHTEASNLLISTYPVDRKLSQDKANVERIKNLLDAIKDLQHFVKPLLGKGTESEKDNRFYGEFVPMWETLDQITPLYNMVRNRMTQKPYSEEKIKINFDNSTLLAGWDLNKEADNTCIILRKDGNYYLAIMDKRNNKVFETKNLVSEGDCYEKMEYKLLPGANKMLPKVFFSKSRMDEFKPSAQLLRNYERGTHKKGDNFSLDDCHALIDFFKESIEKHEDWSKFGFKFSDTKTYEDLSGFYREVEQQGYKISFRNVSVEYINRLVDEGKIYLFQIYNKDFSTYSKGTPNLHTLYWKMLFDERNLADVVYKLNGEAEVFFRKHSIEAEKPTHLANKPIENKNKLNEKKTSVFEYDLVKDRRYTVDKFQFHVPITMNFKAAGLNNINPLVNVYLKESNVTHIIGIDRGERHLLYLSLIDLQGNIVEQYSLNEIVNEYKGNTYRTNYHDLLDAKERQRDEARRSWQTIENIKELKEGYMSQVIHKIAELMVKYNAIVVLEDLNFGFMRGRQKVEKQVYQKFEKMLIDKLNYLVDKKCEADEMGGVFNAYQLTNKFESFQKLGKQSGFLFYIPAWNTSKMDPTTGFVNLLDTRYENMAKAKAFFGKFRSIRYNAAKGWFEFAFDNDDFNTKATGTRTQWTLCTYGTRIETKRDPKQNSNFVSEEFDLASRFKDLFDQYDIDLKGNLMEQICSQNDAAFFKELLHLLHLTLQMRNSITGTEVDYLISPVMNDNGEFYDSRKCGKNLPLNADANGAYNIARKGLWIIEQIKQTEDLSKLKLAISNKEWMRYAQGLE

SEQ ID NO: 152 - protein, 1270 aa, Unknown
  Description of Unknown: uncultivated organism sequence
  Category: MG28 effectors
  Description: MG28-12 effector
MNDLTQFTNLYSLSKTLRFELKPVGKTQENIEKNGILERDNQRAVGYKSVKKVIDEYHKAFIERILNDYERKLDDLQRSVWEDSLNEFYRLYHLPTSTPKRKDDLSKVQETLRKQISDCFKKDRQYGRLFGKELIREDLAEFVTTPLFEDYIISQKDNENLSADEIRKIQEGIIQDLSQFNDFTVYFSGFHENRRNMYVPDSKTTSIAHRMIDENLPKFIDNMDVFEKIAASEVAQHFGVLYKEMEPYLNVNEIPELFKLPYFSMVLTQNQIDVYNAIIGGMVLDDGTKIQGLNEYVNLYNQQQKDKTKRLPKLKPLFKQILSERNAISWLPDEFNSDNEMLQGIEKCYQDLREHVFEGDHSLKALLHNIGDYDLAHIYIPNDLQLTDISQKHFGSWSLIKAAIEEDLKSRTPVKRNESGEKYDERVAKTLKGIDSFSIADINRMMQAKVDDFKPVEAYFAQMGAEDNGNGQKLNHFARIENAYTDVKALLNTEYPKGKALSQDKKNVEKIKNLLDAIKDLQHFVKPLLGSGSESEKDSQFYGEFTPLWEMLNDITPLYNMVRNRMTSKPYSEEKIKVNFDNSTLLAGWDLNKEVDNTCTLLRKEGNYYLAIINKRHSRVLLPEYLVAEGDCYEKMVYKQLGQISQQLPRIAFSNSWQQKIKIPEEILKIKKTESFKTDKDDLQKLIAFYKFFLSQHEEWNSFFNIHFSNKTYYNNLAEFYSEVDSLFYSLSFTNVSVSYINQLVEEGKLYLFQIYNKDFSPYSKGTPNMHTLYWKMLFDERNLADVVYKLNGGAEVFFRKHSIKVDKPTHPANHPIANKNTQNKKKESVFAYDLIKDRRYTVDKFQLHVPITVNYKAIGLNNINPVVNAYLKDSKATHIIGIDRGERHLLYLSLIDLKGNIVEQYSLNEIVNEYNGNTYRTNYHDLLDAKEGKREEARRSWMEIENIKELKEGYMSQVIHKIAQLMVKYNAIVVLEDLNMGFMRGRQKVEKQVYQKFEKMLIDKLNYLVDKQCDAAELGGVLNAYQFTNKFESFQKMGKQSGFLFYIPAWNTSKMDPTTGFVNLLDTRYENMAKAKAFFGKFKSIRYNAKKVLFEFTFDYDDFTTKAADTRTQWTLCTYGTRIETKRDPKQNNNFVSEEFDLTDKFKELLAKHNIGIDGNLLEKICSQSDAAFFKELLHLLHLTLQMRNSITGTDTDYLISPVMNANGEFFDSRKCGKNLPENADANGAYNIARKGLWIIDQIKHSDDLSRLKLAISNKEWLQYAQKMV

SEQ ID NO: 153 - protein, 1280 aa, Unknown
  Description of Unknown: uncultivated organism sequence
  Category: MG28 effectors
  Description: MG28-13 effector
MNNFTNLYPVDLTLRNSLIPIGETFKNMTMHSYIEHDEQRAEAYKLVKGIIDDYHRAFIDSRLASFEFRIESHGTLDSIEEFTTLYNIKRDEKRDKEFTTVKQNLRKAISQRLTKCDAFARINKRELIREDLPYFIDSLDISEEEKAEKKKLVEQFAKFATYFSNFHTNRANMYVADEKSTSIAYRLINQNLPVFLDNMKVFAMLKALGFEDALSIIYSDMKEKLNVLSLDELFQQDYYSMLLTQRQITVYNEVIGGRSTKDGEKIKGLNEYINQYNQEHPIARIPFLRPLYKQILSDRVSMSWLPDSFINDEEMIRAINIFYQNIHPLLWGPMEDAGEPLKNILSQIDTFDTEHIFITNDSALTNISQRLFGQYNVITDALLSRLSQEMPRKRGRKPESDEAYNERLRKTFKAIKSFSISEINESLKSYMDEGTYIDISSYFRAMDERNDEYIQQANMFIRIENAYTEAKPFLNELRASNSSYNQDDDAIKYIKVLLDAYKSLQRFINPLVGSGEESSKDDMFYGEFMPIVEELKNLTPLYNKVRNWLTRKPYSDEKFKVNFDNSSFLSGWPQDYETKGGYIVEHNGLYYLFINEVKLDEAQVKFLCDHPDADNATRILLDFQKPDNKNIPRLFIRSKGENFAPAVEKYALPIASVLDIYDQGKFKTEYRSVNPDDYYRSLHKLIDYFKLGFTRHESYKHYSFQWKPTNEYKDISQFYHDVEVSCYQLKRVPINWNHLQELVIQGSVYLFQIYNKDFSTRSKGKGTPNLHTLYWRMLFDERNTKDLVYKLNGQAEIFFRRASIKPENQVIHQANQPIENKNPLRKAIKPNSTFSYKITKNRRFTLDHFEFHAPITMNFKAPGITNINPLVIDKIRKSEITHVIGIDRGERHLLYLSLIDLKGNIIKQMTLNTITNKWAGGEIATDYQALLDQKEGDRLEARRNWKTIENIKELKEGYLSQAIHLIAQLIVENKAILVLEDLNTHFMHGRQKVEKQVYQRFERQLITKLNYYVDKKKDADAAGGLLHALQLTNKFESFEKLGKQSGFLFYVPAWNTSKIDPVTGFVNLLNLHYETREKASLFFSKFKCISFNTEKNWFEFVMDYNEFTKKADGTRTNWTLCTFGERIETFRNPQANLQWDNRTINLTQAFKDLFQDYGIDIYGNLKNQICSQQKAKFFEQLLHLMKLMLQMRNSKKNSTSAEDDYILSPVADDNGVFYDSRFCSESLPRDADANGAYNIARKGLWIIKKIQASSADERLNLTITNKEWLNFVQIKQYLND

SEQ ID NO: 154 - protein, 1280 aa, Unknown
  Description of Unknown: uncultivated organism sequence
  Category: MG28 effectors
  Description: MG28-14 effector
MNNFTNLYPVDLTLRNSLIPIGETLKNMTMHSYIEHDEQRAEAYKLVKGIIDDYHRAFIDSRLASFEFRIESHGTLDSIEEFTTLYNIKRDEKRDKEFTTVKQNLRKAISQRLTKCDAFARINKRELIREDLPYFIDSLDISEEEKAEKKKLVEQFAKFATYFSNFHTNRANMYVADEKSTSIAYRLINQNLPVFLDNMKVFAMLKALGFEDALSVIYSDMKEKLNVLSLDELFQQDYYSMLLTQRQITVYNEVIGGRSTKDGEKIKGLNEYINQHNQEHPTARIPFLRPLFKQILSDRVSMSWLPDSFINDEEMIRAINIFHQNIYPLLWGPMEDAGEPLKNILSQIDTFDTEHIFITNDSALTNISQRLFGQYNVITDALLSRLSQEMPRKRGRKPESDEAYNERLRKSFKAIKSFSISEINESLKSYMNEGTYIDISSYFRAMDERNDEYIQQANMFIRIENAYTEAKPFLNELRASNSSYNQDDDAIKYIKVLLDAYKSLQRFINPLVGSGEESSKDDMFYGEFMPIVEELKNLTPLYNKVRNWLTRKPYSDEKFKVNFDNSSFLSGWPQDYETKGGYIVEHNGLYYLFINEVKLDEAQVKFLCDHPDADNATRILLDFQKPDNKNIPRLFIRSKGENFAPAVEKYALPIASVLDIYDQGKFKTEYRSVNPDDYYRSLHKLIDYFKLGFTRHESYKHYSFQWKPTNEYKDISQFYHDVEVSCYQLKRVPINWNHLQELVRQGSVYLFQIYNKDFSTRSKGKGTPNLHTLYWRMLFDERNTKDLVYKLNGQAEIFFRRASIKTENQVIHQANQPIENKNPLRKAIKPNSTFSYKITKNRRFTLDHFEFHAPITMNFKAPGITNINPLVIDKIRKSEITHVIGIDRGERHLLYLSLIDLKGNIIKQMTLNTITDKWAGGEIATDYQALLDQKEGDRLEARRNWKTIENIKELKEGYLSQAIHLIAQLIVENKAILVLEDLNTHFMHGRQKVEKQVYQQFEKQLITKLNYYVDKKKDADTAGGLLHALQLTNKFESFEKLGKQSGFLFYVPAWNTSKIDPVTGFVNLLNLHYETREKASLFFSKFKCISFNTEKNWFEFVMDYNEFTKKADGTRTNWTLCTFGERIETFRNPQANLQWDNRTINLTQAFNDLFQDYGIDIYGNLKNQICSQQKAKFFEQLLHLMKLMLQMRNSKKNSTSAEDDYILSPVADDNGVFYDSRSCSESLPRDADANGAYNIARKGLWIIKKIQASSADERLNLTITNKEWLNFVQTKQYLND

SEQ ID NO: 155 - protein, 1280 aa, Unknown
  Description of Unknown: uncultivated organism sequence
  Category: MG28 effectors
  Description: MG28-15 effector
MNNFTNLYPVDLTLRNSLIPIGETLKNMTMHSYIEHDEQRAEAYKLVKGIIDDYHRAFIDSRLASFEFRIESHGTLDSIEEFTTLYNIKRDEKRDKEFTTVKQNLRKAISQRLTKCDAFARINKRELIREDLPYFIDSLDISEEEKAEKKKLVEQFAKFATYFSNFHTNRANMYVADEKSTSIAYRLINQNLPVFLDNMKVFAMLKALGFEDALSVIYSDMKEKLNVLSLDELFQQDYYSMLLTQRQITVYNEVIGGRSTKDGEKIKGLNEYINQHNQEHPTARIPFLRPLYKQILSDRVSMSWLPDSFINDEEMIRAINIFHQNIHPLLWGPMEDAGEPLKNILSQIDTFDTEHIFITNDSALTNISQRLFGQYNVITDALLSRLSQEMPRKRGRKPESDEAYNERLRKTFKAIKSFSISEINESLKSYMDEGTYIDISSYFRAMDERNDEYIQQANLFIRIENAYTEAKPFLNELRASNSSYNQDDDAIKYIKVLLDAYKSLQRFINPLVGSGEESSKDDMFYGEFMPIVEELKNLTPLYNKVRNWLTRKPYSDEKFKVNFDNSSFLSGWPQDYETKGGYIVEHNGLYYLFINEVKLDEAQVKFLCDHPDADNATRILLDFQKPDNKNIPRLFIRSKGENFAPAVEKYALPIASVLDIYDQGKFKTEYRSVNPDDYYRSLHKLIDYFKLGFTRHESYKHYSFQWKPTNEYKDISQFYHDVEVSCYQLKRVPINWNHLQELVIQGSVYLFQIYNKDFSTRSKGKGTPNLHTLYWRMLFDERNTKDLVYKLNGQAEIFFRRASIKPENQVIHQANQPIENKNPLRKAIKPNSTFSYKITKNRRFTLDHFEFHAPITMNFKAPGITNINPLVIDKIRKSEITHVIGIDRGERHLLYLSLIDLKGNIIKQMTLNTITDKWAGGEIATDYQTLLDQKEGDRLEARRNWKTIENIKELKEGYLSQAIHLIAQLIVENKAILVLEDLNTHFMHGRQKVEKQVYQQFEKQLITKLNYYVDKKKDADTAGGLLHALQLTNKFESFEKLGKQSGFLFYVPAWNTSKIDPVTGFVNLLNLHYETREKASLFFSKFKCISFNTEKNWFEFVMDYNEFTKKADGTRTNWTLCTFGERIETFRNPQANLQWDNRTINLTQAFNDLFQDYGIDIYGNLKNQICSQQKAKFFEQLLHLMKLMLQMRNSKKNSTSAEDDYILSPVADDNGVFYDSRSCSESLPRDADANGAYNIARKGLWIIKTIQASSADERLNLTITNKEWLNFVQTKQYLND

SEQ ID NO: 156 - protein, 1259 aa, Unknown
  Description of Unknown: uncultivated organism sequence
  Category: MG28 effectors
  Description: MG28-16 effector
MNYSDFTGLYPLSKTLRFELKPIGKTKENIEKHGILERDSERAIAYKAVKKVMDEYHKVFIDSMLNDFELDMSTLDEFYYLYHLPSADQKRKTDLSKIQETLRKQISERFTKSEQYKRLFGKELIREDLAEFVKTPQYENVIREMPGNENLTDEAVKRFQESLQKDIAQFDDFTTYFVGFYDNRKNMYVADDKATSIAHRMIDENLPKFVDNMDVFDKIAASDVAMHFEELYKAMEPYLNVNEIAEMFRLDYFSTVLTQKQIDVYNAIIGGKVLNDGTKVQGLNEYVNLFNQSQKDKSKRLPKLKPLFKQILSERNAISWLPDEFESDNEMLHSIEKCYQDLKEHVFDLLKTLLGSVKDYNLEHIYLPNDLQLTDIAQKHFGSWSVIRNAVVEDLKANNPQKRKEDVEEYEKRMAKLHDSYSIAYLNGIMQGKVEDFKPIEDYFEGMGAEDNDNGQKLNHFARIWNAYTEIKSLLNTDYPKDKNLSQDKANVEKIKNLLDAIKDLQHFVKPLLGSGTESEKDSQFYGEFVPLWETLDQITPLYNMVRNRMTQKPYSNEKIKLNFDNSTLLAGWDLNKEADNTCTLLRKDDNYYLVIIDKRNNKVLKPENLVSEGDCYEKMEYKLLPGANKMLSKVFFSKSRIDEFKPSESVLRNYKNETHKKGDNFNLDDCHALIDFFKKSINKHEDWSKFGFRFSDTSSYEDLSGFYREVEHQGYKISFCNVSVDYINHLVEEGKIYLFQIYNKDFSPYSKGTPNMHTLYWRMLFDERNLADVVYKLNGKAEVFFRKRSIKVDQPTHPANKPIANKNFQNEKKESVFSYDLVKDRRYSVDKFQFHVPITMNFKAVGLNSINPLVNDYLKGSNATHIIGIDRGERHLLYLSLIDMKGNIVEQYSLNEIVNEYKGNTYRTNYHDLLDAKEKQRDEARRSWQTIENIKELKEGYMSQVIHKIAELMVRYNAIVVLEDLNMGFMRGRQKVEKQVYQKFEKMLIDKLNYLVDKKLDADEMGGVLNAYQLTNKFESFQKLGKQSGFLFYIPAWNTSKMDPTTGFVNLLDTRYENMEKSRVFFGKFDSIQYNSVKGWFEFVLDYNRFTTKAEGTRTRWTLCTYGTRIETRRNSEKNNEFDSVEFDLTTRFKELFSKYQIDLNGNLKEHICNQRDAAFFKEMLHLLHLTLQMRNSRINSDVDYLLSPVMNASGEFYDSRTCGKNLPENADANGAFNIARKGLWIIEQIKKTRDVDLAKIKLAISNKEWLRYAQGQD

SEQ ID NO: 157 - protein, 1256 aa, Unknown
  Description of Unknown: uncultivated organism sequence
  Category: MG28 effectors
  Description: MG28-17 effector
MSDFKEFIGLYPLSKTLRFELIPQGKTLQNFKASGILERDEHRAESYKKMKDIIDEYHRFVIDESMNCFKLKLDNVGKYDSLEDYYTYYVIGKKSETEKKKFTDIQSNLRKQIVDQLKSNPHFGNLFKKELIKNDLIEYLGEDNENLPTVKEFADFTTYFSGFNQNRANMYSSEEKSTSIAYRLINQNLPRFVDNIGVYDRIKTTSIAEELNKVYSSFVEYLNVNKLDELFQLSYYNTLLTQRQIDVYNAVVGGRVTQDGEKILGLNELINLYNQKKEKKDRVPKFKILYKQILSEREAISFLPQVFSSDQETLAAVKDFYNAVKVVVIDKIKDMLSNIDSYDMSHVFIKNDNMFLSEISQKLYSDWGYINKSIIAYYKSVNAQKGKESFEKYESRISKLIKVRDSFSLRELDEYIHKLNPSYPKVESYFSSLGAINNVEQQKEDIFLQIENAYSESETLLNNPYPAENNLASDKKNVELLKDLLDRIKALQWFVKPLLGNGDEFGKDATFYGEFDPLYKELNDITPVYDKVRNRMTRKPYSDEKIKLNFDNSMLLGGWDQNKEKDYMSIILEKDGLFYLGIMNKIHNKVFLQSEIKTEGPCYKKMVYKLIPGPNKELPHVFLSAKGINIYKPSQEMLENYEKGTHKKNSDNFNINDCRKLIDYFKASIEKNNDWNKFEFCFSDTSSYKDISEFYKEVHDQAYKMSFCDVAVSYVDKLVNEGKLFLFKIYNKDFSTYSKGTPNMHTLYWKSVFSPDNLKSIVYQLNGQAELFYRKSSIKGNDMIIHPSGKGIANKNISNEKRESKFNYDIIKDKRYTVDKFQFHVPITINYKGRDQLINESANQYIKDNNIKHIIGIDRGERNLLYLSLIDMNGHIVKQFSLNEIINDYADNKYIVDYHNLLDVKEGDREEARRNWQTIEGIKELKEGYLSQVIHRICNLMIDYNAIVVLENLNIGFMRGRQKVEKQVYEKFEKMLIDKLNYLVDKKVSPISDGGVLKGYQLTNKFVSFKAMGDQNGFLFYIPAWNTSKMDPVTGFVNLFDTHYENIDKTRSFFSKFDVILYNKEKNYFEFKFDYKNFTDRAEGTKSNWTLCTQGKRVETFRNPEKNSKWDSKNVNLTEQFKTLFGQYKIDYTGNLKESISLQSEKLFFEELLHLFRLTVQMRNSVSNSDIDYLISPVTNSNGNFFNSEVERKKGKDSKGDWISKLPVDADANGAYNIARKGLWVINQIKQANSGDKIKLAISNKEWLSFAQHFNG

SEQ ID NO: 158 - protein, 1256 aa, Unknown
  Description of Unknown: uncultivated organism sequence
  Category: MG28 effectors
  Description: MG28-18 effector
MSNFKEFIGLYPLSKTLRFELIPQGKTLQNFKASGILERDEHRAESYKKMKDIIDEYHRFVIDESMNCFKLKLDNVGKYDSLEDYYTYYVIGKKSETEKKKFTDIQSNLRKQIVDQLKSNPHFGNLFKKELIKNDLIEYLGEDNENLPTVKEFADFTTYFSGFNQNRANMYSSEEKSTSIAYRLINQNLPRFVDNIGVYDRIKTTSIAEELNKVYSSFVEYLNVNKLDELFQLSYYNTLLTQRQIDVYNAVVGGRVTQDGEKILGLNELINLYNQKKEKKDRVPKFKILYKQILSEREAISFLPQVFSSDQETLAAVKDFYNAVKVVVIDKIKDMLSNIDSYDMSHVFIKNDNMFLSEISQKLYSDWGYINKSIIAYYKSVNAQKGKESFEKYESRISKLIKVRDSFSLRELDEYIHKLNPSYPKVESYFSSLGAINNVEQQKEDIFLQIENAYSESETLLNNPYPAENNLASDKKNVELLKDLLDRIKALQWFVKPLLGNGDEFGKDATFYGEFDPLYKELNDITPVYDKVRNRMTRKPYSDEKIKLNFDNSMLLGGWDQNKEKDYMSIILEKDGLFYLGIMNKIHNKVFLQSEIKTEGPCYKKMVYKLIPGPNKELPHVFLSAKGINIYKPSQEMLENYEKGTHKKNSDNFNINDCRKLIDYFKASIEKNNDWNKFEFCFSDTSSYKDISEFYKEVHDQAYKMSFCDVAVSYVDKLVNEGKLFLFKIYNKDFSTYSKGTPNMHTLYWKSVFSPDNLKSIVYQLNGQAELFYRKSSIKGNDMIIHPSGKGIANKNISNEKRESKFNYDIIKDKRYTVDKFQFHVPITINYKGRDQLINESANQYIKDNNIKHIIGIDRGERNLLYLSLIDMNGHIVKQFSLNEIINDYADNKYIVDYHNLLDVKEGDREEARRNWQTIEGIKELKEGYLSQVIHRICNLMIDYNAIVVLENLNIGFMRGRQKVEKQVYEKFEKMLIDKLNYLVDKKVSPISDGGVLKGYQLTNKFVSFKAMGDQNGFLFYIPAWNTSKMDPVTGFVNLFDTHYENIDKTRSFFSKFDVILYNKEKNYFEFKFDYKNFTDRAEGTKSNWTLCTQGKRVETFRNPEKNSKWDSKNVNLTEQFKTLFGQYKIDYTGNLKESISLQSEKLFFEELLHLFRLTVQMRNSVSNSDIDYLISPVTNSNGNFFNSEVERKKGKDSKGDWISKLPVDADANGAYNIARKGLWVINQIKQANSGDKIKLAISNKEWLSFAQHFNG

SEQ ID NO: 159 - protein, 1261 aa, Unknown
  Description of Unknown: uncultivated organism sequence
  Category: MG28 effectors
  Description: MG28-19 effector
MSNLGQFTGLYPLSKTLRFELKPIGKTQENIEKHGVLERDNERAIAYESVKKVIDEFHKSYIETKLSRLQLELSLLEEFYELYHHQIFDQNRKNKILNVQDSLRKQISDCFTKDDYYKRLFGKELIREDLTEFVNTPYYENVIRSVPGNEHLTDKEIKQIQENKQKEIDQFGAFTTYFVGYYDNRKNMYVPEDKATSIAHRMINENLPKFVDNMDVFEKISKSEVAANFETLYKAMESYLNVNSIEEMFKLDYYSMVLTQKQIDVYNSIIGGMVLEDGTKIKGLNEYVNLFNQQQKDKTRRLPKLKPLFKQILSERNAISWLPEEFENDNEMLQSIEKCYRELKTKVFDGENSLKTLLNNLEDYDLRHIYLPYDLQLTDIAQKHYGNWSLIKKALEDNLKKENPIKRLESNENYEERIARLLKANESVSLAQINSMMGDGNKSIESYFTTMGAEDNEDGKKPNLFVRIETAYLEAEKLLNSTYPIDKSLSQDKDNVDKIKNLLDAIKDLQHFVKPLLGQGTESEKDPRFYGEFVPLWETLDQITPLYNMVRNRMTKKPYSEKKIKINFDNSTLLAGWDLNKEADNTCSILRKEGLYYLVIMDKQHNRVLKPENLPADGECYEKMEYKLLPGANKMLPKVFFSKSRIGEFKPSERIVRNYKNDTHKKGSNFNLDDCHALIDFFKESINKHEDWSKFGFKFSDTETYKDLSDFYHEVEQQGYKISFRKVSVDYINQLVEEGKIYLFQIYNKDFSPYSKGTPNLHTLYWRALFDEKNLADVVYKLNGEAEVFFRKHSLVAKKPTHPANQPIANKNAKNEKKESTFAYDIIKDRRYTVDKFQFHVPITMNFKAAGISNINPLVNAYLKESDAIHIIGIDRGERHLLYLSIIDLEGNIVDQFSLNEIVNEYKGNAYRTNYHDLLDTKEKQRDEARKSWQTIESIKELKEGYVSQVIHKIAELMVKYNAIVVLEDLNFGFIRGRQKVEKQVYQKFENMLIDKLNYLVDKKLDVTEAGGVLNAYQLTNKFESFQKLGKQSGFLFYIPAWNTSKMDPTTGFVNFFDTRYENVEKARLFFGKFKDICYNAKDNWFEFAFDYEDFTTKAAGTKTQWTLCTQGTRVETRRDPTQNNKFVSKELDLTSKFNELFAKYNIDFNGDLKGQICSQNEAQFFRDLLHLLHLTLQMRNSIAGTEEDYLISPVKNANGEFYDSRKCCDNLPINADANGAYNIARKGLWIVDQIKQSDDITKIRLAISNKEWLRYVQGVK

SEQ ID NO: 160 - protein, 1309 aa, Unknown
  Description of Unknown: uncultivated organism sequence
  Category: MG28 effectors
  Description: MG28-20 effector
MSNLNQFIGLYPLSKTLRFELKPIGKTKENIEKNGILERDTQRAVGYKVVKKVIDEYHKAFIERILNDFENKLGDDERNDWKNSLQEFYSLYLSPVSDNGRKDKLAKTQERLWKQIANAFKKDWQYNKLFADELIRKDLAEFVSTPFFENYIRSQKGNEDIPDSEVRAIQETITQDINCFRDFTTYFTGFNKNRENMYMADGKATSIAHRMINENLPKFIDNVEVFKKIADCDEIKIHFATLYKAMEQYLNVLTINEMFLLEYFPMVLTQKQIDVYNAVIGGLNEYINLYNQQQKDKSKRLPKLKPLFKQILSERNAISWLPDEFESDNEMLESIEKCYQDLTIQVFCGENSLKSLLINIRDYDLDHIYLPNDSSISTISQKLYGGWSIVGNAITEDIKVSNPQKKKESDEEYEERISKIRKGIECYSVGYLNGVLRDKIKIDNFKPIEDYFLLMGATDDKSDQKPNLFVRIEDAYAEARAILTSPYPEERNLSQDEESIEKIKNLLDTIKELQHFIKPLLGSGSESDRDNNFYGEFIPLWESLDQITALYNMVRNRMTQKPYTDEKIKLYFDNNATFLRGWVDSKTESSDNGTQYGGYLFRRQNAIGEYDYYLGVSKDIKLFRRFKEVEESDKSTYERLDYYQLKSKTFYGTLYKGNYEIESANIKRAIDNVVYLIGSAATKEKVNNEKGKRQPKINTAIGYLKFLQQQDKELYNILLKDKSFQECNKAIIASMKSTLLSLNRIPSAKDYAQKNYVLFSVMMDDIDTLLQEKIFTYFSVSKCELDNAVGRDLRPLYLFKITNKDLSFAETYENGLRKNRGTENLHTMYFKALMSGTQNVFDIGSGAIYFREHKISYTEEQLKRGHHYEMLKGKFSYPIISNKRYAFDKFQFHLSVNLNYNADKNVNINTLVNSYLKESNSTHIIGIDRGERNLLYLSLIDLHGNIVEQYSLNEIGDEYNRTNYHELLDKKENQRKEARLSWQTIESIKELKEGYMSQVIHKIVELMVKYNAIVVLEDLNGGFKRGRQKVEKQVYQKFEKMLIDKLNYLVDKKLAVTEPGGVLKAYQLANKFESSQKRDKQNGFLFYVPAWNTSKMDPTTGFVDLFDTRYVNIAKAKAFFGKFKSIRYDAEKGWIEFAFDYNDFTTKASGTRTQWTLCTQGTRIETKRDPSQNNQFISEEFDLTSRFIELFSQFKIDPDGNLMEQICSQTEATFYKSILHLLHVTLQMRNSKTGTDVDYLISPVMNSHGEFYDSRHCGKDLPNNADANGAYNIARKGLWIIEQIKQSEDFAHLKLAISNKEWLQYAQKE

SEQ ID NO: 161 - protein, 886 aa, Unknown
  Description of Unknown: uncultivated organism sequence
  Category: MG28 effectors
  Description: MG28-21 effector
MSNLNQFIGLYPLSKTLSFELKPIGKTKENIEKNGILERDTQRAVGYKVVKKVIDEYHKAFIERILNDFENKLGDDERNDWKNSLQEFYSLYLSPVSDNGRKDKLAKTQERLWKQIANAFKKDWQYNKLFADELIRIDLAEFVSTPFFENYIRSQKGNEDIPDSEVRAIQETITQDINCFRDFTTYFTGFNKNRENMYMADGKATSIAHRMINENLPKFIDNVEVFKKIADCDEIKIYFVTLYKAMEQYLNVLTINEMFLLEYFPMVLTQKQIDVYNAVIGGLNEYINLYNQQQKDKSKRLPKLKPLFKQILSERNAISWLPDEFESDNEMLESIEKCYQDLRSTVFDGNHSLQSLLSSINDYDLNHIYISNDSSISLISQKQYGGWGVIGNAIMENAKAANPQKRNESNEKYEERISKIQKGIDSYSIGYLNDVLRNKLDDFKPIEDYFLKMGGAVDNETEQKPTFFTRIENAYTEAHTLLTSPYPESRQLSQDKKNVEKIKNLLDAIKELQHFVKPLLGQGAESEKDNNFYGEFIPFWELLDQITVLYNMVRNRMTQKPYTDEKIKLYFDNNATFLRGWVDSKTESSDNGTQYGGYLFRRQNAIGEYDYYLGVSKDIKLFRRFKEVEESDKSTYERLDYYQLKSKTFYGTLYKGNYEIESSNIKRAIDNVVNSVGSTSIKGKLYNEKSKRQPKTATAIGYLKFIKQQDEELYNILLKDKSFQECNKAIIASMKSTLLSLNRIPSAKDYAQKNYVLFSAMMDDIDILLQEKIFSYFPVSQRELDEVVERNLRPLYLFKITNKDLSFAENYENGLRKNRGTDNLHTMYFKALMSGAQSVFDIGSGAIYFREHKISYTEEQLKRGHHYEILKDRFSYPIISNKRYAF

SEQ ID NO: 162 - protein, 1261 aa, Unknown
  Description of Unknown: uncultivated organism sequence
  Category: MG28 effectors
  Description: MG28-22 effector
MSNLVQFTGLYPLSKTLRFELKPIGKTQENIEKHGVLERDNERAIAYESVKKVIDEFHKSYIETKLSRLQLDLSLLEEFYELYHHQIFDQNRKNKILNVQDSLRKQISDCFTKDDYYKRLFGKELIREDLTEFVNTPYYENVIRSVPGNEHLTDKEIKQIQENKQKEIDQFRDFTTYFVGYYDNRKNMYVPEDKATSIAHRMINENLPKFVDNMDVFEKISKSEVAANFETVYKAMESYLNVNSIEEMFKLDYYSMVLTQKQIDVNNSIIGGMVLEDGTKIKGLNEYVNHFNQQQKDKTCRLPKLKPLFKQILSERNAISWLPEEFENDNEMLQSIEKCYRELKTKVFDGENSLMTLLNNLEDYDLRHIYLPYDLQLTDIAQKHYGNWSLIKKALEDNLKKENPIKRFESNEKYEERIAILLKANESVSLAQINSMMGDGNKPIESYFTTMGAEDNEDGKKPNLFVRIETAYLEAEKLLNSTYPIDKSLSQDKDNVDKIKNLLDAIKDLQHFVKPLLGQGTESEKDPRFYGEFVPLWETLDQITPLYNMVRNRMTKKPYSEKKIKINFDNSTLLAGWDLNKEADNTCSILRKDGLYYLVIMDKQHNRVLKPENLPADGECYEKMEYKLLPGANKMLPKVFFSKSRIGEFKPSERIVRNYKNDTHKKGSNFNLDDCHALIDFFKESINKHEDWSKFGFKFSDTETYKDLSDFYREVEQQGYKISFRKVSVDYINQLVEEGKIYLFQIYNKDFSPYSKGTPNLHTLYWRALFDEKNLADVVYKLNGEAEVFFRKHSLVAKKPTHPANQPIANKNAKNEKKESTFAYDIIKDRRYTVDKFQFHVPITMNFKAAGISNINPLVNAYLKESDAIHIIGIDRGERHLLYLSIIDLEGNIVDQFSLNEIVNEYKGNAYRTNYHDLLDTKEKQRDEARKSWQTIESIKELKEGYVSQVIHKIAKLMVKYNAIVVLEDLNFGFIRGRQKVEKQVYQKFENMLIDKLNYLVDKKLDVTEAGGVLNAYQLTNKFESFQKQGKQSGFLFYIPAWNTSKMDPTTGFVNFFDTRYENVEKARSFFGKFKDICYNAKDNWFEFAFDYEDFTTKAAGTKTQWTLCTQGTRIETRRDPTQNNKFVSEELDLTSKFNELFAKFNIDFNGDLKGQICSQNEAQFFRDLLHLLHLTLQMRNSITGTEEDYLISPVKNANGEFYDSRKCCDNLPINADANGAYNIARKGLWIVEQIKQSDDITKIRLAISNKEWLRYVQGVK

SEQ ID NO: 163 - protein, 1265 aa, Unknown
  Description of Unknown: uncultivated organism sequence
  Category: MG28 effectors
  Description: MG28-23 effector
MTMYTNFTRLYSLSKTLRFELKPIGKTKENIEKNGILKRDNERAVAYKAVKKVIDEYHKAFIEMMLNDFELQYEMLEEYNRLYQISNSSEPKKKEKLQKIQENLRKQISDRFTTSEQYKRLFGQELIKEDLSEFVNTSQFEHYIRTQKGNDLSDEEVRQIQKRTLEDIDQFKDFTTYFSGFHQNRKNMYVADDKATAIAHRVVMENLPKFIDNMNTFAEIAESDVAGHFADLYKEMEAYLNVNDIQEMFQLDYFSMVLTQKQIDVYNAIIGGKTLDDGTKIKGLNEYVNLYNQQQTRKEDRLPKLKPLFKQILSERNAISWLPEEFENDNEMLQSIEKCYQDLNAQVFGPLKDLLKNIKDSDLEHIYLPNDLQLTDISQKHFGSWAVINKAVEEDLKTANPQKNRESGEKYEERIAKLLKNTDSYSIGYINGLLKDRIEDFEPLEVYFSNIGAEDDGKQQKLNHFSRIENAYTEAKSLLTAEYPDDKRLSQDKGNVEKIKNLLDAIKDLQHFVKPLLGSGSESDKDSQFYGEFTSLWETLDQITPLYNMVRNRMTQKPYSIEKVKLNFDNSTLLSGWDLNKETDNTCTLLRKGGNYYLAIIDKRNNKVLKPENLVSSGDCFEKMEYKQIALPMGVGAFVRKCYGTAQNYGWRCPKNCLNKEGKIIIKDAEAQPNLIDIIDCYKDFFEKYEKDGFKYKDFRFKFSESSKYERLSDFFGDVESQGYIIRFKNVSVDYINQLVEEGKIYLFQIYNKDFSPYSKGTPNMHTLYWKMLFDEKNLADVVYKLNGEAEVFFRKSSVKENRPTHPANKPIANKNKQNEKKESTFAYDLIKDRRYTVDKFQFHVPITMNFKAKGMNDINLLVNQCLKESVETHIIGIDRGERHLLYLSLIDLQGNIVEQYSLNEIVNEYNGNIYRTNYHDLLDAKEKQRDEARSSWQTIENIKELKEGYMSQVIHKIAQLMLKYNAIVVLEDLNFGFMRGRQKVEKQVYQKFEKMLIDKLNYLVDKKRATNELGGVLNALQLTNKFESFQKLGKQSGFLFYIPAWNTSKMDPTTGFVNLLDTRYENMEKAKAFFGKFDSIRYNPQQDWFEFAFDYNSFHNKAEGTRTQWTLCTYGTRIETKRDAAQNNNFVSTEVDLTQKFKELFTEHQIDINGNLKDQICSQTDVAFFKSLLNLLRLTLQMRNSITGTETDYLISPVQNAKGEFYDSRKCGKNLPENADANGAYNIARKGLWVIEQIKQADDLSNIKLAITNKEWLWFAQRLK

SEQ ID NO: 164 - protein, 1266 aa, Unknown
  Description of Unknown: uncultivated organism sequence
  Category: MG28 effectors
  Description: MG28-24 effector
MTSFSKFCGLYPLSKTLRFELKPIGKTKENIEKNGILERDSERATAYKAVKKVIDEFHKSFIELQLNDFELEQSKLEEFYHLYHLPTSDQKRKNDLPKVQESLRKLISERFTKNDYYKRLFGKELIREDLTDFVNTPYYENIIRNVPGNEQLSDEKVKQIQENTIREISQFNDFTTYFVGFYDNRKNMYVAEDKATAIAYRMINENLPKFIDNMDVFEKIAASDVAQHFGELYKEMEPYLNVSEIAEMFHLNYFSTVLTQTQIDVYNAIIGGKTLDDGTKIQGLNEYVNLYNQQQKDKSKRLPKLKPLFKQILSERNAISWLPDEFKNDNEMLQSIEKCYQDLKEQVFGALKQLLTTIKDYNLQHIYLPNDLQLTDISQKQYGSWSVIKNAIIEDLKKTNQPKKKEDAEDFENRLSKLADSYSIAYINQVTGSNIENFKPIEDYFAKMGAEDNENGQKLNHFARIENAYTEIKQLLNSEYPTGKSLSQDKANVEKIKNLLDAIKDLQHFVKPLLGSGTESEKDNSFYGEFTPLWENLDQITPLYNMVRNRMTKKPYSEEKIKINFDNSTLLAGWDLNKEADNTCTLLRKDGNYYLAIIDKRHNKVLKAENLSSDGECYEKMEYKLLPGANKMLPKVFFSKSRIAEFKPSEKIIRNYENETHKKGDKFNLADCHALIDFFKESIKKHEDWSKFGFNFSPTNSYEDLSGFYREVEQQGYKISFRNISVNYINKLVDEGKIYLFQIYNKDFSPFSKGTPNMHTLYWKALFDEKNLADVVYKLNGEAEVFFRKHSLNGAKPTHPANQPIANKNAQNEKKQSTFAYDLIKDRRYTVDKFQFHVPITMNFKAAGINNINPLVNEYLKESNATHIIGIDRGERHLLYLSLIDLKGNIVEQYSLNEIVNEYNGNTYRTNYHNLLDAKEKQRDEARRSWQTIENIKELKEGYMSQVIHKIAELMVKYNAIVVLEDLNLGFMRGRQKVEKQVYQKFEKMLIDKLNYLVDKKLDADATGGVLNAYQLTNTYKVFHDQYKKQQNTIGKQCGFLFYIPAWNTSKMDPTTGFVNLFDTRYENMEKAKAFFGKFDSIRFNSVKGWFEWAFDYDKFTTKAEGTQTKWTLCTYGTRIETKRNPEKNNEFDSVEFDLTERIKELFAKYQIDANGNLKEQICSQTDATFFKELLHLLHLTLQMRNSITGTETDYLISPVMNAKGEFYDSRVCGKDLPENADANGAYNIARKGLWVIEQIKHADDLTKPKLAISNKEWMRYAQGLK

SEQ ID NO: 165 - protein, 1262 aa, Unknown
  Description of Unknown: uncultivated organism sequence
  Category: MG28 effectors
  Description: MG28-25 effector
MVKYSDFTGLYPLSKTLRFELKPIGKTKENIERNGILERDNKRAVGYKAVKKVIDEYHKAFIDMMLDDFKLNLTDKGKLDSLEEFYAIYHLSSNDTLRKVNITKVQDSLRKQISDRFTKSEQYKRLFGKELIREDLIEFVQTPQYNAFIRAQQGNDNLSDNDIQQIKEEIIQDISRFKDFTTYFIGFYENRRNMYVADDKATSIGHRMITENLPKFVDNIDVFEKIAASDVASSFKVLYKDMEPYLNVNSLDEMFRLDYYSMVLTQKQIDVYNAIIGGMVLDDGTKIKGLNEYVNLYNQQQKDKANKLPKLKLLFKQILSERNAISWLPEEFESDNDMLKSISQCYQDLKSQVFEGEGSLRVLLQNLNDYDLEHIYLPDDLKLTDIAQKLYGNWSVVKRALEEDFKTKNPQKKNETNEKFEERIDKLLKSNESFSIAQINNLVRASLGEDYKPLESYFMSLGEPNLFVRIQDAYTEVKSLLKTSYPEDKKLSQDKANVERIKNLLDAIKDLQHFVKPLLGKGNESEKDNRFYGEFTPLWEALDQITPLYNMVRNRMTQKPYSEEKVKLNFDNSTLLAGWDLNKEADNTCTILRKDDNYYLAIMDKKNNKVFMQENIVATGDCYEKMEYKLLPGANKMLPKVFFSKSRIGEFKPSDVLMQNYKKETHKKGENFNIDDCHALIDFFKKSIDIHEDWSKFDFHFSDTKKYEDLSGFYREVEQQGYKITFRNVSVDYVNSLVDEGKIYLFQIYNKDFSTYSKGTPNLHTMYWKMLFDERNLADVVYKLNGEAEVFFRKHSIEAVKPTHPANKPIENKNKLNAKKTSVFDYDLIKDRRYTVDKFQFHVPITMNFKASGLNNINPLVNAYLKESNVTHIIGIDRGERHLLYLSLIDMKGNIVEQYSLNEIVNEYKGNTYRTNYHDLLDAKERQRDEARRSWQTIENIKELKEGYMSQVIHKIAELMVKYNAIVVLEDLNLGFMRGRQKVEKQVYQKFEKMLIDKLNYLVDKKRDARETGGVLKAYQLTNKFESFQKLGKQSGCLFYIPAWNTSKMDPTTGFVNLFDTRYENMAKAKAFFSKFKSIRYNAAKDWFEFAFDYDDFTTKAAGTKTKWTLCTYGTRIETKRDPKQNNMFVSEEFKLTDRFKDLFAQYRIDLNENMMEQISLQNDATFFKELLHLLHLTLQMRNSITSTEIDYLVSPVMNAAGEFYDSRRCGKNLPENADANGAYNIARKGLWIIDQIKQADDLSKLKLAISNKEWMRYAQGV

SEQ ID NO: 166 - protein, 957 aa, Unknown
  Description of Unknown: uncultivated organism sequence
  Category: MG28 effectors
  Description: MG28-26 effector
NMDVFEKIAASEVAIHFDTLYKEMEAYLNVKSIEEMFQLDYFSIVLTQKQIDVYNSIIGGKTLEDGTKILGLNEYVNLYNQQQNNKDNRLPKLKPLFKQILSERNAISWLPDEFASDNEMLESIERCYQDLRKQVFEGENSLKELLKGIVDYDLEHIYLPDDLQLTNISQKHYGNWSVIKKAHEEYLRKEMQENLMVNKPQRRNESDENYQERIQELLKTKKYEESIEKQLKVNDSFSLAQINRLMSIYQGEDSKPIELYFATMGAEEIGNEKKPNLFIRIENAYTEVKTLLTTAYPKDRKLSQDKANVEKIKNLLDAIKNLQHFVKPLLGKGTEGEKDNHFYGEFTPLWEALDQITPLYNMVRNRMTQKPYSDEKIKLYFDNNGSFLNGWVDSKTESDNATQYGGYLFRKRNSIGEYDYFLGVSAATKLFRSFNSVEASDRSSYERLDYYQLKGKTFYGTLYKGNYETESANIRHAIDNLVYHAGSISIKEKINAERMKKQPKVSTAIGYLKYIMQQDCELYDILLKDDTFEKSNQAIMASMKATLLSLDRIPSAKEYAQRNYKLFSEMMDDIDMLLQGKVFSYFPVSQRELDETVNRTTKPLYLFKITNKDLSYAETHEKGLRKSRGSDNLHTMYFKALMSGCQDVFDIGSGSMFFREHKLVYTEDQLKKGHHYDMLKDKFNYPIVSKKRYAFDKFQFHLSVTMNYNSNKSKDINPMVNDYLKESNATHIIGIDRGERHLLYLSLIDLNGNIIEQYSLNKIANEYKGNIYRTDYHELLDAKEKQRDEARRSWMSIENIKELKEGYMSQVIHKIAELMVKYNAIVVLEDLNLGFMRGRQKVEKQVYQKFEKMLIDKLNYLVDKKIDANVLGGVQKAYQLANKFESFQKLGKQSGFLFYIPAWNTSKMDPTTGFVNLLDTRYENMAKAKAFFAKFKSIQFNAIKGWFEFAFDYDDFT

SEQ ID NO: 167 - protein, 1102 aa, Unknown
  Description of Unknown: uncultivated organism sequence
  Category: MG28 effectors
  Description: MG28-27 effector
QYKILFRKQLIRQDLAEFLKTPRCDAYIRSKNSKEILSEDEMKQIQDNIIQEIAQFRDFTTYFSGFYENRRNMYVPDAKATSIANRMINENLPKFVDNIDEFEKIASSEVATHFDTLYKEMEAYLNVNSIAEMFQLDYFSMVLTQKQIDVYNAIIGGKTLEDGTKIQGLNEYVNLFNQQQNEKANRLPKLKLLFKQILSERSAISWLPDVFESDTQMLDSIKKCYQDLRENVFEGRNSLKELLRGISDYDLEHIYLPNDVQLTNIAQKQYGDWSVIKRAFEKITKAQNPQRRNESNEKYEARIVKLQKTYDSFSMAQINNWLTDYMGDTYKSIESYFIALGAEDDGNTQKPNLFIRIENAYTEAKSLLTKVYPKDRKLSQDKINVEKIKNLLDAIKNLQHFVKPLLGRGTESEKDSRFYGDFTPLWETLEQITPLYNMVRNRMTEKPYSDEKIKLYFDNNGSFLNGWVDSKTESDNATQYGGYLFRKLNSIGEYDYYLGVSAATKLFRSFNPVADNDKSCFERLDYYQLKGKTFYGALYKGDYETESANIRHSIDDVVCRSGSALIKEKINFERQKKQPKISTAIGYLKFIRQQDGELYSTLLKDDIFEEANQAIMVSMKATLSSLDRIPFAKEYALRHYILFADMMDDIEVLLQGKVFSYFPISQNELDEAVTRISKPLYLFKITNKDLSFAETHEKGLRKSRGIENLHTMYFKALMSGCQDVFDIGSGSVFFREHKISYTDEQMKRGHHYEMLKDKFNYPIISNKRYAFDKFQFHISITMNYNADKSKDINYITNAYLKESNATHIIGIDRGERHLLYLSLIDLQGNIVDQFSLNEIVKEYNGNTYCTNYHALLEAKENQRDEARRSWQTIENIKELKEGYMSQVIHKIVDLMIKYNAIVVLEDLNLGFKRGRQKVEKQVYQKFEKMLIDKLNYLVDKKLDVKEAGGVLRAFQLTNKFESFQKLGKQSGFLFYIPAWNTSKMDPTTGFVNLLDTRYENMAKAKAFFGKFKSIRFNNSKNWFEFAFDYNDFTTKAEGTKTQWTLCTYSTRIETKRDPMQNNKYVSEEFELTNRFKDLFANTKYNIDLNGNLIEQICSQSDA

SEQ ID NO: 168 - protein, 829 aa, Unknown
  Description of Unknown: uncultivated organism sequence
  Category: MG28 effectors
  Description: MG28-28 effector
SFYHLPSSDLTRKANLTKIQDALRKEISDHFIKSEQYKRLFGKDLIREDLAEFVLTPRFEAYIRSKKSKEILSKDEVKRIQDNFIQEIAQFRDFTTYFSGFYENRRNMYVPDAKATSIANRMINENLPKFVDNIDVFERIASSEVATHFDTLYKEMEAYLNVNSIAEMFQLDYFSMVLTQKQIDVYNAIIGGKTLEDGTKIQGLNEYVNLFNQQQNEKTNRLPKLKILFKQILSERSAISWLPDVFESDTQMLESIKMCYQDLKENVLEGRNSLKELLSGISEYDLEHIYLPNDVQLTNIAQNQYGDWSVIKKAFENITKAQNPQRRNESNEKYETRIEKLQKTHDSFSMAQINNWLIDYMGDTYKSIESYFIALGAEDDGNTQKPNLFIRIENAYTEAESLLTKVYPKDRKLSQDKVNVEKIKNLLDAIKNLQHFVKPLLGRGTESEKDSRFYGDFTPLWETLEQITPLYNMVRNRMTEKPYSDEKIRLYFDNNGSFLNGWVDSKTDSDNATQYGGYLFRKLNSIGEYDYYLGVSAATKLFRSFNPVADNDKSCFERLDYYQLKGKTFYGALYKGDYETESANIRHTIDNVVRHSGSALIKEKINFERQKKQPKISTAIGYLKFIRQQDGELYSTLLKDDIFEEANQAIMVSMKATLSSLDRIPFAKEYALRHYILFADMMDDIEVLLQGKVFSYFPISQSELDEAVTRISKPLYLFKITNKDLSFAETHEKGLRKSRGIENLHTMYFKALMSGCQDVYDIGSGSVFFREHKISYTDEQMKRGHHYEMLKDKFNYPIISNKRYAFDKFQFHISITMNYNADKSKDINY

SEQ ID NO: 169 - protein, 881 aa, Unknown
  Description of Unknown: uncultivated organism sequence
  Category: MG28 effectors
  Description: MG28-29 effector
TDYMGDTYKSIESYFIALGAEDDGNTQKPNLFIRIENAYIEAKSLLTKVYPKDRKLSQDKINVEKIKNLLDAIKNLQHFVKPLLGRGTESEKDSRFYGDFTPLWETLEQITPLYNMVRNRMTEKPYSDEKIKLYFDNNGSFLNGWVDSKTESDNATQYGGYLFRKLNSIGEYDYYLGVSAATKLFRSFNPIADSDKSCFERLDYYQLKGKTFYGALYKGDYETESANIRHTIDNVVRHTGSTLNKEKIKIERQKKQPKISTAIGYLKFIRQQDDELYNILLKDDIFEEANQTIMVSMKATLSSLDRIPLAKEYAIRQYTLFADMMDDIEVLLQGKVFSYFPISQSELDEAVTRISKPLYLFKITNKDLSFAETHEKGLRKSRGIENLHTMYFKALMSGCQEVFDIGSGSVFFREHKISYTDEQMKRGHHYEMLKDKFNYPIISNKRYAFDKFQFHISITMNYNADKSKDINYITNAYLKESNATHIIGIDRGERHLLYLSLIDLQGNIVDQFSLNEIVKEYNGNTYCTNYHALLEAKENQRDEARRSWQTIENIKELKEGYMSQVIHKIVDLMIKYNAIVVLEDLNLGFKRGRQKVEKQVYQKFEKMLIDKLNYLVDKKLDANEAGGVLRAFQLTNKFESFQKLGKQSGFLFYIPAWNTSKMDPTTGFVNLLDTRYENMAKAKAFFGKFKSIRFNNSKNWFEFSFDYNDFTTKAEGTKTQWTLCTYSTRIETKRDPMQNNKYVSEEFELTNRFKDLFANTKYNIDLNGNLIEQICSQSDASFFKELLHLMHLTLQMRNSVVGTLIDYMISPVANANGEFYDSRNCGKNLPENADANGAYNIARKGLWIINQIKQTEDLTKVKLSISNKEWLQYAQKQINNT

SEQ ID NO: 170 - protein, 1060 aa, Unknown
  Description of Unknown: uncultivated organism sequence
  Category: MG28 effectors
  Description: MG28-30 effector
VIDEYHKAFIELMLDNFELELKDSGKLDSLEEFYMLYHLPSNDSTRKDRITKVQDALRKKISECFTKTEQYKRLFGKELIREDLEPFVGTLQFEEYIRSQKGNENLNDDELRQIQVEVVQEIAQFRDFTTYFSGFYENRKNMYVADNKATSIANRMINENLPKFIDNMDVFDRIAVSGVSKHFDTLYKEMEPYLNVNSIAEMFRLDYFSTVLTQKQIDVYNTIIGGRTEKDGRKIQGLNEYINLFNQQQKDKENRLPKLKPLFKQILSDRNAISWLPDEFASDNEMLESIEKCYQDLREHVFEGENNLKVLLKGIGEYDLEHIYLCDDAQLTNIAQKQFGNWNVIKNAFEESIKAENPARGNESIEKYEARIEKLMKTNDSFSLAQINRLMSAYLGDEYKPIESYFTAMGAEDDGAVQKPNLFIRIENAYTEVKNLLRTSYPNDRKLSQDKVNVEKIKNLLDAIKDIQHFVKPLMGKFTESVKDNRFYGEFTPLWETLDQITPLYNMVRNHMTQKPYSDEKIKLNFDNSTLLAGWDLNKEVDNTCTLLRKDGLYYLVIINKQYNRILTAENISNDGECYEKMVYKQLGQISQQLPRIAFSNSWQQRISIPAEVLRIKKTESFKTNNEDLLKLIAFYKYFISQHEEWNTFFNIKFTDKSDYKNLPEFYSEVDSLFYSLSFSKVSVANINQLVDEGKIYLFQIYNKDFSTYSKGTPNLHTMYWKMLFDERNLADVVYKLNGEAEVFFRKHSIEAGKPTHPANKPVVNKNKLNENRTSVFEYDLIKDRRYTVDKFQFHVPITMNYKAEGLNNINPMVNAYLKESNATHIIGIDRGERHLLYLSLIDLKGNIVEQCSLNEIVNEYKGKTYRINYHDLLDTKEKQRDEARRSWQAIENIKELKEGYMSQVIHKIAELIVKYNAIVVLEDLNLGFMRGRQKVEKQVYQKFEKMLIDKLNYLVDKKLDATEQGGVLKAYQLANKFESFQKMGKQSGILFYIPAWNTSKMDPTTGFVNLFDTRYKNIAKAKAFFAKFKSIRYNATKDWMEFAFDYDDFTTKALGTKTQ

SEQ ID NO: 171 - protein, 872 aa, Unknown
  Description of Unknown: uncultivated organism sequence
  Category: MG28 effectors
  Description: MG28-31 effector
VIRNAVVEDLKVGNPQKKKEDAEEYEKRLAKLHDSYSIAYLNGIMQGKTEDFKPIEDYFAGMGAEDNEKGQKVNHFARIENAYTEIKALLNTDYHKGKNLSQDKVNVEKIKDLLDAIKDLQHFVKPLLGNGTESEKDSQFYGEFTPLWEALDQITPLYNMVRNRMTQKPYSNEKIKLNFDNSTLLAGWDLNKEADNTCTLLRKDGNYYLVIIDKRNNKVLKPENLVSKGDCYEKMEYKLLPGANKMLPKVFFSKSRIDEFKPSESVLKNYKNETHKKGGNFNLDDCHALIDFFKKSINKHEDWSKFGFHFSDTNSYEDLSGFYREVEQQGYKITFRNVSVDYINQLVDEGKIYLFQIYNKDFSPFSKGTPNMHTLYWRMLFDERNLADVVYKLNGEAEVFFRKHSIRVDKPTHPANQPIANKNAQNEKKESTFAYDLIKERRYTVDKFQFHVPITMNFKAAGLNNINPLVNAYLKESNDTHIIGIDRGERHLLYLSLIDMKGNIVEQYSLNEIVNEYNGNTYRTNYHDLLDAKEKQRDEARRSWQTIENIKELKEGYMSQVIHKIAELMVKYNAIVVLEDLNMGFMRGRQKVEKQVYQKFEKMLIDKLNYLVDKKLDAEKMGGVLNAYQLTNKFESFQKLGKQSGFMFYIPAWNTSKMDPTTGFVNLFDTRYENMEKSKVFFGKFDSIRYNAAKGWLEFAFDYDNFTAKAEGTRTRWTLCSYGARIETKRNPEKNNEFDSVEIELTERFKALFAKHQIDLNGNLKEQICNQSDASFFKEMLHLLHLMLQMRNSVTNSEIDYLLSPVMNASGEFYDSRTCGKNLPENADANGAYNIARKGLWIIEQIKQSDDLSRPKLAISNKQWLRYAQGLD

SEQ ID NO: 172 - protein, 944 aa, Unknown
  Description of Unknown: uncultivated organism sequence
  Category: MG28 effectors
  Description: MG28-32 effector
VQLTNIAQKQYGDWSVIKKAFDNITKAQNPQRRNESNEKYEARILKLQKTYDSFSMAQINNWLTDYMGDTYKSIESYFTALGAEDDGNTQKPNLFIRIENAYTEAKSLLTKVYPKDRKLSQDKINVEKIKNLLDAIKNLQHFVKPLLGRGTESEKDSRFYGDFTPLWETLEQITPLYNMVRNRMTEKPYSDEKIKLYFDNNGSFLNGWVDSKTESDNATQYGGYLFRKLNSIGEYDYYLGVSAATKLFRSFNPVADNDKSCFERLDYYQLKGKTFYGALYKGDYETESANIRHSIDDVVCRSGSTLIKEKINFERQKKQPKISTAIGYLKFIRQQDDELYNILLKDDIFEEANQAIMVSMKATLSSLDRIPFAKEYALRHYTLFADMMDDIEVLLQGKVFSYFPISQSELDEAVTRISKPLYLFKITNKDLSFAETHEKGLRKSRGIENLHTMYFKALMSGCQDVYDIGSGSVFFREHKISYTDEQMKRGHHYEMLKDKFNYPIISNKRYAFDKFQFHISITMNYNADKSKDINYITNAYLKESNATHIIGIDRGERHLLYLSLIDLQGNIVDQFSLNEIVKEYNGKTYCTNYHALLDAKENQRDEARRSWQTIENIKELKEGYMSQVIHKIVDLMIKYNAIVVLEDLNLGFKRGRQKVEKQVYQKFEKMLIDKLNYLVDKKLDANEAGGVLRAFQLTNKFESFQKLGKQSGFLFYIPAWNTSKMDPVTGFVNLLDTRYENMAKAKAFFGKFKSIRFNNSKNWFEFSFDYNDFTTKAEGTKTQWTLCTYSTRIETKRDPMQNNKYVSEEFELTNRFKDLFANTKYNIDLNGNLIEQICSQSDASFFKELLHLMNLTLQMRNSVVGTTIDYMISPVANANGEFYDSRNCGKNLPENADANGAYNIARKGLWIINQIKQTEDLTKVKLSISNKEWLQYAQKQIKNT

SEQ ID NO: 173 - protein, 1280 aa, Unknown
  Description of Unknown: uncultivated organism sequence
  Category: MG28 effectors
  Description: MG28-33 effector
MKAFTNLYQVAKTLRFELIPDERTKEFLEHSKLIDKDEHRAESYVAVKGIIDRYHKAFIERVLSELKLQYAKEDKLNSLEELYSLYMKTQKSDADKKMLEQVQSNLRKQIANALTKDSQYKRMSGKELIREDLFKITTPEERTLVEEFADFTTYFSGFYENRKNMYSAEAQSTAISYRLINENLPKFIDNIATFHKILNSPVAEQLPTLYKEMKEYLNVNSIEEMFMLDYYDVVLTQTQIEVYNGVIGGRTTDDGQKIQGINEYVNLFNQKQSSRETRLPKLKPLFKQILSDRQTVSWLTEEFKTDRDMLDAIKERYDSLSSDVFPLLKELLQNLFSYNLNQIFIPNNLALTDISQSLYGDWGVIKREIMIRLKHDFPQTKKEKAEKYEERIEKTYKSFDSFSIAYLNEVLSEKSLDVCSYFATLGAVNNKDRQTENLFLQIKNAYHNAAELFEKDYPETKNLAQDKQSVDKLKVLMDALKALQHFVKPLMETGEEPEKDERFYGDLSVLMEELNLVTPLYNKVRNRMTRKPYSNEKFKLTFNIKGNFLGGWVDSKTEKSDNGTQYGGYLFRKKNSIGEYDYYLGVSANTKLFRKVEGASGQYERLDYYQPKSQTVYGNSYVGKDGYESDKQTLMHSIISYVGTTNDMNVKQQVESKDTPSSMITVIKDASPLLYQGLLDDPYFSDVNRRVTNNFHQTILSMTRIPRSKDYQGAKFTLFTEPQQVIEDICKEKVFGYFAVDDQEIADAMADTSKPFLLFKISNKDLSFAEKFEKGMRHSRGTDNLHTMYFKALMNGEQSVLDIGSGEVFFRRASIKANITHPARIAIKNKNNANEKKESCFDYDLIKDKRYTVDKFGFHLSIIQNYQSPNRYDVNALTREYIRNNPDVHFIGIDRGERHLLYVSVINSRGQIVEQFSMNKIENEYNQTDYHQLLEQRSDIRQKERQSWRTIEGIKELKQGYLSQVVHRIATLMVKYKAVVVLEDLNMGFKRGRQMVESSVYQQFEKALIDKLNYLVDKQVDANEPGGLLRGLQLTNKFTSFREMGKQNGFLFYIPAWNTSKMDPVTGFVDLLHPRYENVDKARAFFCKFKSIQYNDEKGWYEFRLDYNDFNAKAEGTKTLWSVCSNGTRIETFRNVEKNSSWDNREVCLTEEFDKLFADYHISRTGNLKEQIAQQTEKSFFERLTHLLNLTLQMRNSMTGTTIDYLVSPVADEDGVFYDSRTCSKELPENADANGAYNIARKGLWVACQIREAQDANKVKLNISNKQWLLFAQTKPYLSD

SEQ ID NO: 174 - protein, 1280 aa, Unknown
  Description of Unknown: uncultivated organism sequence
  Category: MG28 effectors
  Description: MG28-34 effector
MKAFTNLYQVAKTLRFELIPDERTKEFLEHSKLIDKDEHRAESYVAVKGIIDRYHKAFIERVLSELKLQYAKEDKLNSLEELYSLYMKTQKSDADKKMFEQVQSNLRKQIANALTKDSQYKRMSGKELIREDLFKITTPEERTLVEEFADFTTYFSGFYENRKNMYSAEAQSTAISYRLINENLPKFIDNIATFHKILNSPVAEQLPTLYKEMEEYLNVNSIEEMFMLDYYDVVLTQTQIEVYNGVIGGRTTDDGQKIQGINEYVNLFNQKQSSRETRLPKLKPLFKQILSDRQTVSWLTEEFKTDREMLAAIKERYDLLSSDVFPLLTELLQNLSSYDLNQIFIPNNLALTDISQSLYGDWGVIKREIMIRLKHDFPQTKKEKAEKYEERIEKTYKSFDSFSIAYLNEVLSEKSLDVCSYFATLGAVNNKDRQTENLFLQIKNAYYDAAGLFEKDYPETKNLAQDKQSVDKLKVLMDALKALQHFVKPLMETGEEPEKDERFYGDLSVLMEELNLVTPLYNKVRNRMTRKPYSNEKFKLTFNIKGNFLGGWVDSKTEKSDNGTQYGGYLFRKKNSIGEYDYYLGVSANTKLFRKVEGASGQYERLDYYQPKSQTVYGNSYVGKDGYESDKQTLMHSIISYVGTTNDMNVKQQVESKDTPSAMITVIKDASPLLYQGLLDDPYFSDVNRRVTNNLHQTILSMTRIPRSKDYQDAKFTLFTEPQQVIEDICKEKVFGYFAVDDQEIADAMADTSKPFLLFKISNKDLSFAEKFEKGMRHSRGTDNLHTMYFKALMNGEQSVLDIGSGEVFFRRASIKANITHPARIVIKNKNNANEKKESCFDYDLIKDKRYTVDKFGFHLSIIQNYQSPNRYDVNALTREYIRNNPDVHFIGIDRGERHLLYVSVINRRGQIVEQFSMNKIENEYNQTDYHQLLEQRSDIRQKERQSWRTIEGIKELKQGYLSQVVHRIATLMVKYKAVVVLEDLNMGFKRGRQMVESSVYQQFEKALIDKLNYLVDKQVDANEPGGLLRGLQFTNKFTSFREMGKQNGFLFYIPAWNTSKMDPVTGFVDLLHPRYENVDKARAFFCKFKSIQYNDEKGWYEFHLDYNDFNAKAEGTKTLWSVCSNGTRIETFRNVEKNSSWDNREVCLTEEFDKLFADYHISRTGNLKEQIAQQTEKSFFERLTHLLNLTLQMRNSMTGTTIDYLVSPVADEDGVFYDSRTCSKELPENADANGAYNIARKGLWVARQIREAQDANKVKLNISNKQWLLFAQTKPYLSD

SEQ ID NO: 175 - protein, 1277 aa, Unknown
  Description of Unknown: uncultivated organism sequence
  Category: MG28 effectors
  Description: MG28-35 effector
MDRFTNLYPVSKTLRFELIPDKRTKAILEKTDLISQDEHRAKSYKLVKKIIDRYHKAFIESVLGSFKLPNDDVNLLHELYSKSQKSDADKKAMEKVQDKLRKVIADALTKDDRFKRIDKKELIREDILSVITPDERALIDEFRDFTTYFTGFHENRRNMYSAEAQSTAIAYRLIHENLPKFIDNMATFEKIAASPVADHFPQLYQEMSECRLNVRDIQEMFSLDYYTELLTQSQIEVYNAVIGGRTVEDGGKKIQGINEYVNLYNQQQPSRDTRLPKLKPLFKQILSDREAVSWLDEEFDSDKSMLEAVRDIYHALDDHVFDPLRELLTNLPSYNLDGIFIPNDLAITDISQAMFKDWSVIKRAIADDVKAHCPLKRKETAENYEERISKLIKREGSFSIGYLNACMPGKDICEHFAGLGAVDDGEEQTENIFLQIRNAYADAQSLIENDYPESRNLAQDKEYVAKLKALLDAVKALQRFVKPLLGNGDEPDKDERFYGELAVLWEELDRVTPLYNKVRNRMNRKPYSIEKFKLNFNIKGNFLGGWVDSKTEKSDNGTQYGGYLFRKKNVIGEYDYYLGVSAKTKLFRRKEGAEGQYERLDYYQPKSQTVYGNSYVGPDGYDHDKRELMDAIVSFVGALGESELYQSLVSMGTPSAMLKALREQPLIYQQLLADRRFASINSKVTKYLHETILSLVRIPRSQDYVNAEFSLFTEPQEVIDNLCKEKVFTYFVVDDAEIEQAMNDENKPFLLFKISNKDLSYADTYSKGLRKSRGTDNLHTMYFKALMSGNQSVIDIGTGEMFYRKASISVDKPTHKANVPIKKKNPNNQGTESSFSYDLYKDRRFTVDKFGFHLSFIYNYLAKEQDMNKMAREYIHDHDDLHFIGIDRGERHLLYVTVIDSRGRIKEQFSLNEIVNEYQGNKYKTNYRGLLDKREEERQRERQSWNTIEGIKELKQGYLSQVIHKIVTLMVKYHAVVVLEDLNMGFKRGRQKVESSVYQQFEKALIDKLNLLIDKKADADQPGGLLHAYQLTNMFTSFREMGRQNGFLFYIPAWNTSKIDPVTGFVDLLHPRYESVEKSRSFFCKFKSVRYNQEKGWYEFSLDYNAFTTKAEGTRTCWTLCSHGTRVETYRNPDKNSSWDSREIDLTAELNALFEAYGINRQGNLKEAIAERDEKDFFERLMRLMALTLQMRNSITGTEVDYMISPVADENGNFYDSRSCGRELPENADANGAYNIARKGLWVARQIQASPVDERINMAVSNKEWLNFAQSKPYLDD

SEQ ID NO: 176 - protein, 1284 aa, Unknown
  Description of Unknown: uncultivated organism sequence
  Category: MG28 effectors
  Description: MG28-36 effector
MKQFTNLYPVTKTLRFELIPDSRTKKYLENSDFINRDEHRAEYYKIVKKIIDRYHKVFIEEVLSSTKLQYAKTGRLDSLEELYSLLVKSQKTESDKKSIAKVQDKLRKQIVDAFKNDSRFKRIDKKELIREDIFKLVELTPEERALVEEFRDFTTYFNGFHENRKNMYSSEAQSTAIAFRLIHENLPKFIDNIAIFHRILRSPVAENFQQLYKDMEEYLNVNSLEEMFMLDYYNDVLTQTQIDVYNAIIGGRTLEDGKKIQGINEYVNLFNQQQSSRETCLPKLKPLYKQILSDKVAVSWLPEEFATDNELLEAVRDCYTSLSNNVFVKLEEMLTNLSEYNLNGVFIPNDLSLTNISQWLYGDWSFIKKAITKDLMENCPSKKNEKPEKYEERLEKHVKSEGYFSIAYLNSCLNNVQKNVCSYFNELGAVNTESKQIENLFSKIQNAYTDAKDLLESDYPKNKNLAQEKSEVAKIKLLLDALKELQHFVKPLTNAGDKAEKDEQFYSEMTIIWDELSRVTPLYNKVRNRMTRKPYSLEKFKLTFNIKGNFLGGWVDSKTEKSDNGTQYGGYLFRRKNAINEYDYYLGVSANTKLFRRQSGVVGEYERLDYYQPKSQTIYGNSYVGNNSYETDKEELKIAILEFVSKLGNDELLQQVGAKDTPSAMLTVIKESSNVIFNQLLIDEEFAKKNREVTDNLHQTILGMSRIPRAKEYRDASFTIFTEPQQVIDDICKDKVFSYFPVSDVEMNNAISDINKPFLLFKISNKDLSFAEMYSKGLRKSRGIENLHTMYFKALMEGNQSVLDIGTGEMFYRRASIKVAKPTHPSNQPIQKKSQSGESMFAYDLIKDRRFTVDKFGFHLSIIQNYQAAGKVDVNSMVRSYIHDNPDMHFIGIDRGERHLLYVSVIDSKGNIKEQFSMNQITKDYNGVEYKTNYRNLLDIRDDVRKQERQSWRTIEGIKELKQGYLSQVIHKIVTLMVKYRAIVVLEDLNMGFKRGRQKVESSVYQQFEKALIDKLSYLVDKQQDANKCGGLLKGFQLTNKFTSFRDMKKQNGFLFYISAWNTSKIDPVTGFVDLLHPKYENVDKARSFFCKFKSIRYNKQKGWYEFTFDYNDFTTQAEGTRTLWTICTRGSRIETFRNKDKNSEWDSHEINLTDEFNSLFCQYNISSNDNLKEVIARQTDKKFFESLIHLLCLTLQMRNSKTGTDIDYLISPVANEHGLFYDSRNCDSSLPENADANGAYNIARKGLWMARQIQGAERNEKIDFVITNKEWLNFAQTKPYLTD

SEQ ID NO: 177 - protein, 1276 aa, Unknown
  Description of Unknown: uncultivated organism sequence
  Category: MG28 effectors
  Description: MG28-37 effector
MDRFTNLYPVSKTLRFELIPDKRTKAILEKTDLISQDEHRAESYKLVKKIIDRYHKAFIESVLGSFKLPNDDVNLLHELYSKSQKSDADKKAMEKVQDKLRKVIADALTKDDRFKRIDKKELIREDILRVITPDERALIDEFRDFTTYFTGFHENRRNMYSAEAQSTAIAYRLIHENLPKFIDNMATFEKIAASPVADHFPQLYQEMSECLNVRDIQEMFSLDYYTELLTQSQIEVYNAVIGGRTVENGGKKIQGINEYVNLYNQQQPSRDTRLPKLKPLFKQILSDREAVSWLDEEFDSDKSMLEAVRDCYHALDDRVFDPLRELLTNLPSYNLDGIFIPNDLAITDISQAMFKDWSVIKRTIADDVKAHCPLKRKETAENYEERISKLIKREGSFSIGYLNACMPGKDICEHFAGLGAVDDDEEQTENIFLQIRNAYADAQSLIENAYPEGRNLAQDKENVAKLKALLDAVKALQRFVKPLLGNGDEPDKDERFYGELAVMWEELDRVTPLYNKVRNRMTRKPYSIEKFKLNFNIKGNFLGGWVDSKTEKSDNGTQYGGYLFRKKNEIGEYDYYLGVSAKTKLFRRKEGAKGQYERLDYYQPKSQTVYGNSYVGPDGYDHDKRELMDAIVSFVGALGESELYQSLVSMGTPSAMLKALREQPLIYQQLLADRRFASINSKVTKYLHETILSLVRIPRSQDYVNAEFSLFTEPQEVIDNLCKEKVFTYFVVDDAEIEQAMNAENKPFLLFKISNKDLSYADTYSKGLRKSRGTDNLHTMYFKALMSGNQSVIDIGTGEMFYRKSSISVDKPTHKANVPIKKKNPNNQGTLSSFCYDLYKDRRFTVDKFGFHLSFIYNYLAKEQDMNKMAREYIHDHDDLHFIGIDRGERHLLYVTVIDSRGRIKEQFSLNEIVNEYQGNKYKTNYRGLLDKREEERQRERQSWNTIEGIKELKQGYLSQVIHKIVTLMVKYHAVVVLEDLNMGFKRGRQKVESSVYQQFEKALIDKLNLLIDKKADADQPGGLLHAYQLTNKFTSFREIGRQNGFLFYIPAWNTSKIDPVTGFVDLLHPRYESVEKSRSFFCKFKSIRYNQEKGWYEFSLDYNAFTTKAEGTRTCWTLCSHGTRVETYRNPEKNSSWDNREIDLTAELNALFEAYGINRQGNLKEAIAERDEKDFFERLMRLMALTLQMRNSITGTEVDYMISPVADENGNFYDSRSCGRELPENADANGAYNIARKGLWVARQIQASPVDERINMAVSNKEWLNFAQSKPYLDD

SEQ ID NO: 178 - protein, 1280 aa, Unknown
  Description of Unknown: uncultivated organism sequence
  Category: MG28 effectors
  Description: MG28-38 effector
MKAFTNLYQVAKTLRFELIPDERTKEFLEHSKLIDKDEHRAESYVAVKGIIDRYHKAFIERVLSELKLQYAKEDKLNSLEELYSLYMKTQKSDADKKMLEQVQSNLRKQIANALTKDNQYKRMSGKELIREDLFKITTPEERTLVEEFADFTTYFSGFYENRKNMYSAEAQSTAISYRLINENLPKFIDNIATFHKILNSPVAEQLPTLYKEMEEYLNVNSIEEMFMLDYYDVVLTQTQIEVYNGVIGGRTTDDGQKIQGINEYVNLFNQKQSSRETRLPKLKPLFKQILSDRQTVSWLTEEFKTDRDMLDAIKERYDSLSSDVFPLLKELLQNLFSYNLNQIFIPNNLALTDISQSLYGDWGVIKREIMIRLKHDFPQTKKEKAEKYEERIEKTYKSFDSFSIAYLNEVLSEKSLDVCSYFATLGAVNNKDRQTENLFLQIKNAYHDAAGLFEKDYPETKNLAQDKQSVDKLKVLMDALKALQHFVKPLMETGEEPEKDERFYGDLSVLMEELNLVTPLYNKVRNRMTRKPYSNEKFKLTFNIKGNFLGGWVDSKTEKSDNGTQYGGYLFRKKNSIGEYDYYLGVSANTKLFRKVEGASGQYERLDYYQPKSQTVYGNSYVGKDGYESDKQTLMHSIISYVGTTNDMNVKQQVESKDTPSSMITVIKDASPLLYQGLLDDPYFSDVNRRVTNNLHQTILSMTRIPRSKDYQDAKFTLFTEPQQVIEDICKEKVFGYFAVDDQEIADAMADTSKPFLLFKISNKDLSFAEKFEKGMRNSRGTDNLHTMYFKALMNGEQSVLDIGSGEVFFRRASIKANITHPARIVIKNKNNANEKKESCFDYDLIKDKRYTVDKFGFHLSIIQNYQSPNRYDVNALTREYIRNNPDVHFIGIDRGERHLLYVSVINRRGQIVEQFSMNKIENEYNQTDYHQLLEQRSDIRQKERQSWRTIEGIKELKQGYLSQVVHRIATLMVKYKAVVVLEDLNMGFKRGRQMVESSVYQQFEKALIDKLNYLVDKQVDANEPGGLLRGLQFTNKFTSFREMGKQNGFLFYIPAWNTSKMDPVTGFVDLLHPRYENVDKARAFFCKFKSIQYNDEKGWYEFHLDYNDFNAKAEGTKTLWSVCSNGTRIETFRNVEKNSSWDNREVCLTEEFDKLFADYHISRTGNLKEQIAQQTEKSFFERLTHLLNLTLQMRNSMTGTTIDYLVSPVADEDGVFYDSRTCSKELPENADANGAYNIARKGLWVACQIREAQDANKVKLNISNKQWLLFAQTKPYLSD

SEQ ID NO: 179 - protein, 1277 aa, Unknown
  Description of Unknown: uncultivated organism sequence
  Category: MG28 effectors
  Description: MG28-39 effector
MERFTNLYQVSKTLRFELIPDKRTKEILEHTDLIAQDEHRAESYKTVKKIIDRYHKNYIDSVLGTLKLPESDIDELYELYNKQQKTDAEKNALEKVQGKLRKLIADALSKDSRFKRIDKKELIREDILDIIIPEERSLIDEFRDFTTYFTGFHENRRNMYSAKAQSTAIAYRLIHENLPKFIDNMATFCKIAASPVAERFNDLYQEMAEYLNVREIGEMFKLDYFTEILTQKQIEIYNAVIGGRTLDDGTKIQGLNEYVNLYNQQQTTRETRLPKLKPLFKQILSDREGVSRLPEEFATDQEMLNAVKEYYKVLNDHVLSPLKELLVNLSSYNPNGVYITNDLSLSNISQSLYGDWSLIKKSMTEDIKRQCPRKKKETAENYDERIHQLIKREKSFSIDYLNDCIKSLGKDICTHFAALGATDDGDTQTVNLISQIRNAYTDAQSLLESNYPANRNLAQEKDNVDKLKGLLDAIKALQHFVKPLLGNGDEPKKDERFYGELAVLWEELDRITPLYNKVRNRMTRKPYSTEKFKLNFNIKGNFLGGWVDSKTEKSDNGTQYGGYLFRKKNSLNEYDYYLGVSANKKLFRRKNGAVGQYERLEYYQPKSQTVYGNSYVGPDGYDHDKKELMEAIVSFVGSLGDRELYEELTSKDTPSAMLMILKETPSFYQQLLVDQKFASINSKVTKYLHDTILSLYRIPRSQDYVNAVFTLFTEPQKVIDDLCQEKVFTYFVVDDAEIEQAMKDEVKPFLLFKISNKDLSFADTYCKGLRKSRGTENLHTMYFKALMSGNQATIDIGTGEMFYRKSSISYDKPTHTANVPIKKKNPTNQAAESIFCYDLFKNRRFSVDKFGFHLSIIYNYLCQDKDVNKMMREYIHDHNDLHFIGIDRGERHLLYVTVIDSHGRIKEQFSLNEIKNEYKGNTYSTDYRGLLSKREADRQHERQSWNTIESIKELKQGYLSQVIHKIVTLMVKYNAVVVLEDLNMGFKRGRQKVESSVYQQFEKALIDKLNLLVDKKTDPEQLGGLLHAYQLTNKFTSFRDMRLQNGFLFYIPAWNTSKIDPVTGFVDLLHPRYESVEKAQAFLCKFKSIRYNQDKGWYEFTLNYNDFTTKAEGTRTEWTLCTHGTRVETFRNADKNSSWDSREVDLTKAYHELFEEFAISSNGNLKEAITQQDSKAFFERLMYLLNLTLQMRNSIIGTEVDYMISPVADENGNFYDSRTCGDELPQNADANGAYNIARKGLWVARQIQAAPVDAKVDLAITNKEWLNFAQSKPYLDD

SEQ ID NO: 180 - protein, 1296 aa, Unknown
  Description of Unknown: uncultivated organism sequence
  Category: MG28 effectors
  Description: MG28-40 effector
MKAFENFTGLYPLSKTLRFELKPIGKTLEYIEKNGLLDRDRHRANSYVEVKKIIDRYHKQFIEDSLSDSEFELKYEDKGKKDSLEEYFYYYKLRNRDEKQKKDFDEIQKNLRKQIASQFKKQDRFKRIDKKELIKEDLLEFVDNNEKKLIDEFRDFTTYFTGFHENRQNMYSDEAKSTAIAYRLIHENLPKFIDNISVFERVAATDIADCFAQIYSDFEEYLNVNNISEIFRLDYYTEILTQTQIDVYNLIIGGRSEGDVKIKGLNEYINLYNQQQKDKSQRLPKLKPLFKQILSDRNAISWLPESFENDNALLESLENCYRSYNETSADKKSIFARFKELLLAMSDYETDKIFVRNDLQLTDISQKMFGNYNVISKALYEDLKSNTHRKSNKETDESFEERLRDIAKKQDSFSIGKIDSSLKEMYVEECKKSVCDYFANLSVDDKGHDIFDRIEKAYSEVKDLLNSPYPLDKNLAQEDTDIDKIKNLLESIKDLQKFVKPLCGKGNESGKDENFYGEFTVLYEELDKITPLYNMVRNYLTRKPYSTEKVKLFFENNGAVLNGWVDSKTENSDNGTQYGGYLFRRKNGIGEYDYYLGISSDVKLFRKDSVIAECDKSEFERLDYYQLKSQTFYGSAYKGNYELETQNVIKAIDNFISKNGDADISEKIISDRANKNSKTGTAKGYLNFIKNTSIYDDLLNDDIFKKANDQLINSLKKTLISFERLSTARKIANYNYYLFSDLMDAVDVLMQEKVFTYNAVSINEFENTINRDKKPLLLFKITNKDLSFADTFLSGKRKSRGVENLHTLYFKALMSGKQNVFDIGTGSVYFREKSIRYSEEKMKYGHHYDMLKDKFQYPIISNKRYVYDKFQFHLSMVQNYNGNKNLDINPLANDYIKKSDDLHVIGIDRGERHLLYLTVIDMKGNIKKQFSLNEIVNEYKGNTYRTNYHDLLDAREKKRDVERKSWKTIETIKELKEGYLSQVIHKITELMVEYNAIIVLEDLNLGFMRGRQKVEKSVYQKFEKMLIDKLNYLADKKKDPEELGGVLKAYQLSNNPKYKVIKQSAFLFYTQAWNTSKIDPVTGFVNLFDTHYENILKSKNFFSKFDLIKYNSDKDWFEFSFDYNNFTTKAEGTKTKWTLCTFGNRIISFRNPDNNMQWDGKEINLTEEFKLFFEKFGININSDLHTEILKQDKKDFFEGLLHLLKLTLQMRNSKTRTDIDYMQSPVADENGAFYNSDECGESLPENADANGAYNIARKGLMIIDKIKKSDNLNKIDLTISNKEWLVFAQNKPYLKN

SEQ ID NO: 181 - protein, 1303 aa, Unknown
  Description of Unknown: uncultivated organism sequence
  Category: MG28 effectors
  Description: MG28-41 effector
MGKLKDFKRIYTLSKTLRFELRPIGKTLEHIEKSGILSQDQHRAESYVEVKKIIDEYHKAFIENVLKDFRFSENRGEKNSLEEFLVYYMCKSKDETQKRQFADIQDKLRKQITQRFSDDDRFKRIDKKELIKEDLLSFVEDVEKRQLIEEFKDFTTYFTGFHENRKNMYTDEAQSTAIAYRLIHENLPKFIDNIMVFDKVAASPIAEHFAKLYSDFEEYLNVSELGEMFRLDYYNIVLTQTQIDVYNAIVGGKTLEDGRKIQGLNEYINLYNQQQKDKSARLPKLKPLYKQILSDRNAISWLPEQFQSDEKVLEAIQKAYQDLEEQVFNRKKEGEHSLKDLLLSLSDYDLSKIYIRNDAQMNDLSQKAFGHWDVIHKALLEQLKEYVQKKPKKESDEAYEERLNKIIKSQGSIPIALINQGVQKQNSEEQNTLQTYFATLGAAETESVKKENLFTQIENAYAEVKDLLNTPYSGMNLAQDEESVKKIKSLLDAIKALQHFVKPLLGDGTESEKDEKFYGEFSMLWEELDKITPLYNMVRNYMTRKPYSTEKFKLHFENNGSLLNGWVDSKTEKSDNGTQYGGYLFRKQNIIGEYDYYLGISSDTNLFRRDAVINDTDKSEFERLDYYQLKSQTVYGKSYQGDYNQESAQIISAIDSFVERTTNTNLKEKINQDRETKNPKTSTAKGYLNFLRKNSEIYDSIINDSAFVKANLQLIKSIKKTLCAFKRIPQAQKLAQKEFVLFVDLMNEIDEMVKEKVFTYVPISLKEFENSMERDKKPLFLFKISNKDISFAESYEKGLIKSRGTDNLHTMYFKALMNGNQNVFDIGTGVVYFRKHSIQYSDEKMKTGHHHNVLKDKFKYPIISNKRYVYDQFQFHLSIEQNYLAGKIGDFEMNRRVNEYIRQSDDLHIIGIDRGERHLLYLTVIDLQGRIKEQYSLNEIVNTYNGNEYRTNYHDLLSKREDERMKARQSWQTIENIKELKEGYLSQVIHKISELIVKYNAIVVLEDLNMGFMRGRQKVESSVYQKFEKMLIDKLNYLVDKKKNPEEDGGVLNAYQLTNKFESFQKLGKQSGFLFYTQAWNTSKIDPVTGFVNLFDTRYETREKAKTFFGKFDAIRYNTAKDWFEFAFDYSEFTSKAEGSRTNWTLCTYGERIETFRDEKQNSNWATRKINLTDKFKELFEKHKIDIQADLKEAISQQDSADFFKGLLYLLKLTLQMRNSEIGTEIDYMQSPVADANGNFYNSDTCDDSLPKNADANGAYNIARKGLWIVQQIKAADDLKNVKLSISNKEWLKFAQEKPYLNE

SEQ ID NO: 182 - protein, 1261 aa, Unknown
  Description of Unknown: uncultivated organism sequence
  Category: MG28 effectors
  Description: MG28-42 effector
MSNFNEFTHLYQLSKTLRFELKPIGETLKHFNESGILDQDEHRAESYKKVKKLIDRYHKEFMEEALRDFVFQMDDEGKNNSLSEYFFLYSLGKRTEAQDNDFKEIKKNLREQIAKYFKASPKYKNLFKQELIKEDLCNNMQCNEEEQKLVEEFHNFTTYFTGFHENRKNMYSNEEKSTAIAFRLVHQNLPKFIDNIGAFDRARNIDEIKAGIKNLQKHFETKGLLKQGEKIEDFFALDYYSRLAVQSRIDIYNAILGGRATEKGEKIQGLNEYINLYNQQHKEARLPKMKALFKQILSDRQAISWIEESFKSDNEVLSSVNDFYENLKQNEIFDRTKELLTSVGSYDLSKVYITNDQQLTSISQQLYGSWAVIENAILADMQKDIPRKKKEDSEKYNERLKKAYSNKGSFSIAYIDQCLEAVFGEKHIPVEQHFTKRGEAEIETEAECGKIKIPDVFTQIEQTYSAAKTLLCNPYPKGKHLSQSDEDIEKVKNLLDALKRFQHFIKPLTGSGDEAEKDEMFYSDLTELWAEIDQLNSLYNRVRNHLTGKPYSEEKLKLNFENASLLTGWDKNMERANTAVILRKGKLYYLAIMKKEHNSIFASDNLPDKGECYEKMVYKQIALPLGFGGFARKCFGSATKLGWTYPTNLLNKEGKIIIKDEEAKDVLPELIDCYKDFLNIYEKDGFKYSSYNFKFKPSNQYEKLSQFFAEIQQQGYKITFQNISSDYIDQLVNEGKLYLFQIYNKDFSPSSKGTPNMHTLYWQMLFDERNLNDGVYQLNGQAEVFFRKKSLNYTKPTHPANQAIANKNPFKKKDKSEFTYDLIKDKRFTMDKFLFHVPITINFKSSKTYDIDAKVRQWLQKADDVHIIGIDRGERHLLYLTVIDCKGNIKEQMSLNTIENEYKGNTYAFDYHKRLDEKEKERDEARKNWKTVENIKELKEGYLSQAIHKITQLMLKYNAIIVLEDLNMGFMSGRQKVEKQVYQKFEKMLIDKLNYLADKKKDPSEVGGVLNAYQLTSKFESFTKLGRQSGFLFYIPAWNTSKIDPVTGFVNLFDTRYKNIDEAKKFFGSFKSISYNKDKNWFEFSFDYNDFTNKAEGTKTQWTVCTNGERIENFRSGENLNQWSGRKIVLSQEFKTLFDRYGIDFTKDLQNDICSQSDTGFFEQLLRLFKLTLQMRNSISNTETDYLISPVYDRNGNFYDSRNNRKDLPNNADANGAYNIARKGLMILNQIKQTSDLKKPKYDLTNKAWLNFIQKGYANKD

SEQ ID NO: 183 - protein, 1244 aa, Unknown
  Description of Unknown: uncultivated organism sequence
  Category: MG28 effectors
  Description: MG28-43 effector
MKTFNDLTGLYSLSKTLRFELKPVGKTKDNIETKGIIAQDEKRAEEYKKVKDIIDRYHKSFIDMCLAGLVLKTTSDGNNDSLKDYVALASKSNRDEKEDKDFDDVKTVLRKHIVDAFKKGNSYGDLFKKELIQNHLPDFVTDEQEKLMVENFSKFTTYFTGFNENRKNMYSDEKKSTAIAYRLIHENLPMFIDNIKSFAKITEQEDIDFIADVEHSFKEELKGKSITQMFCLENFTETLTQGQIELYNKIVGGRVEDSGVKKQGINEYVNLYNQQHKDARLPLLKPLYKMILSDRVALSWLPEEFATDEEMLAAINETHGNLKDVLADVRELLQNINNYDTKHIYIANDKGLTDISQQIFGQYDVYTSAIKAELRNNTNHSAKEKKNPELLEKRINDIFKASKSFSIEYLNSHVDSDKTIQSYYKELGAYDRNGEQRINLLSQIELAYVDAHDVLLGKHTNLNQSEDSIKKIKALLDAYKALQHFIKPLLGNGDEADKDNEFDAKLRAIWDELDIVTPLYDKVRNRLTRKPYSTEKIKLNFDNAQLLNGWDMNKEPDCTSVLLRKDGQYYLAIMDKKSNHAFDADELPCDGECYEKMEYKQMALPMGMGAFVRKCFGTAKALGWQCPRHLMTSDGKIIIKDEEAQKVLPELIDCYKSFLDIYEKDGFKYKTFNFKFKPSSEYEKLSHFFAEVPSQGYKCSFRNVSVSFINQLVDEGKLYLFQIWNKDFSEYSKGTPNMHTLYWKMLFDERNLANVVYKLNGQAEVFYRKRSLDLDKTTIHRANQPIANKNMQNEKRESTFCYDIVKNRRYTVDKFQFHVPITINFKATGSDNINASVLDVIRNNGIEHIIGIDRGERHLLYLSLIDMKGNIVKQMTLNDIINEYKGNTYTTNYKELLQAREGDRKEARQNWQKIENIKELKEGYLSQVVHVITKMMVEYKAIVVLEDLNGGFMRGRQKIERQVYEKFEKMLIDKLNYYVDKQKDVNDNGGLLHAYQLASKFDTFKKLGKQSGCLFYIPAWNSSKIDPVTGFVNMLDTRYENADKARNFFSKFKSISYNADKDWFEFVIDDYSKFTDKAKDTRTDWVLCTYGTRIKTFRNPEKLNQWDNKEIVLTDEFKKVFMEAGIDINGNLKEAICTLTEKKHLESLMQLMKLLVQMRNSETNSEVDYLLSPVADTEGHFYDSRNCDDNLPKDADANGAYNIARKGLWAVMKIKASKPQENLKLGISNKEWLQFAQEKPYLND

SEQ ID NO: 184 - protein, 1264 aa, Unknown
  Description of Unknown: uncultivated organism sequence
  Category: MG28 effectors
  Description: MG28-44 effector
MFKLLPDITGIVFFYRDSWRGYEEVITVDVVFYIGGNVMANSLSGFTGLYSLSKTLRFELRPVGKTKENMKIKGLLSEDEHRAKSYKQVKKIADDYHRKFIENALKNVHLEGVEEYAELYCKRNKTEKERKEIDKAADNLRKQVIKLMTTRDEFKKLGKKDFIEEMLPEFVDSEEKKKLIKEFKGFTTYFGGFFENRNNMYSAEKKSTSIGYRVIDQNLPKYIDNVNALKKILEVNPGNMIENIENDFMDMLEGKALNEFISLDNYSYFITQSGIDKYNTVIGGKSCDERTRIKGINEYVNLYNQKADKKIGILKPLYKQILSDKDSKSFLPESFERDNELLNAIELFNAGQKENIESIKGLFEQLSEYEADHIYVKDIFLSEISNELFSEWGYIKGRLEDKYDEEYTGKKKANTEKYIEERKKYFKNKRSYSLSELDAVLENNAVTSYFSGEQLKQAIINMADSYKDIEDLVNTDYPSDRKLQKDKESTKLIKGYLDACKDFGRFIQPLLGDGKESEKDAAFYGKFTPAWEAFDSITPLYNKVRNYMTKKPYSTEKVKLNFENQTLLAGWDLNKEEGNKSLIFIKDNNYYLGIMDKQHNKIFRDVEEAKSEPYYRKMEYKLLPGANKMLPKVFFAKSNIDFFNPSNKILEDYNAGRHKKGDNFDIKACHALIDFFKEAIEKHQEWRQFEFEFSPTETYKDISDFYREVEAQGYKISFKNISEKYIDELVDEGKLYLFKIWNKDFSPHSKGTPNLHTLYWKMIFDEKNLQDVVYKLNGEAEVFFRKASIDEKDIIKHEANKPIENKNKLNDKKKSVFNYDLIKDRRYTVDKFQFHVPITLNFKALGRDNIDRYAREYIKEAKDLHIIGIDRGERHLLYLTVIDMDGNIKEQYSLNEIVNEYNGKEHHINYHDLLDKREKEMERAKKEWQTIESIKELKEGYISQVIYKISQLMIKYNAILVLENLNEGFINGRKKVGKQVYQKFEKMMIDKLNYLVDKNLEEGEAGGLLKAYQLASKFESFKKLGKQSGMMFYIPAWNTSNIDPCTGFVNLFERKHLKYSSVNAAVDFWSKFESIAYDDKGEYFKFSFDYSRFTGRAEGTKTDWTVCSVGERIVNFRNPDNNSQWDSKTVDPTAEIIELCRGYDIDYKSEDLKTEFVSVKDRRFHEELLRLFRLVLQMRNSVTGTEIDYMISPVANAEGVFYDSRNCKKNLPENADANGAYNIARKGLWIINRIKETKEAELNKVNLNISNKEWLNFAQKNILR

SEQ ID NO: 185 - protein, 1228 aa, Unknown
  Description of Unknown: uncultivated organism sequence
  Category: MG28 effectors
  Description: MG28-45 effector
MRQKYDGFESCYGISKVIRTGLIPQGATLEHIEKKGLLLLEAKRAEDYTKVKKIIDRYHRKYIDNQLKDAELSGVEESYSLYCKTNRTEKENTDLKKDLEKLRKQVSNFLTSSAEFKRIDKKELIEKDLLNFVQGDEEEEELVKSFKGFTTYFKGFHENRKNMYSHEEKSTAIAYRVINQNMFRYFDNIRSISKFILANSEKNIAELESIYSDKLNGKTLKEFFSVDNYSFFISQSGIDTYNMIIGGYSVDERTKVKGINEYINLFNQENHEKFGTLKPLYKQILAERTTESFLPEKFENDKEVIESLAAFSHNMSDTLLEIMEVFGKIGEYDASGIYLKYDSLKDISTCVFSDWSAITNALWERYDVQYIGKKKKETKAYIEEKRKHFKNLKSVSADEINTAMGENVLIPYSDAAKSLFEKICVAEENIRELINLDYPDDKELSKDKAAVKDIKAYLDSVKALQHHMKPLLGNQDESGKNEFFYGDFSGLWDELDALTPLYNKVRNYVTKKPYSTEKIKLNFDNSTLLNGWDLNKEEANTAILMQREGFLYLGIMDKKHNKIFRNIENTGCEDCYQKMEYKLLPGANKMLPKVFFSKKGIESFKPPLEILEIYKNETFKKGDAFNIDDCHTIIDFYKKALNEHEDWKKFEFKFSKTKDYRDISEFYREVEAQGYKISFKAIPKKIIDEYVEKGWLYLFKIWNKDFSEYSKGTPNLHTLYLKMLFDPRNLENVVYKLNGEAEIFYRKASIQPKDIIKHPANEAIKNKNPLNKKQSSIFKYDLIKDRRYTVDKFEFHVPITLNFKARGKENINTEVREYIKRSKNLYVIGVDRGERNLLYVSVVDADGSIVEQYSLNDIVNEYKGVQYRTDYHALLDTKEKNRDKARKEWTEIQNIKELKEGYISQVVHKICELMMKYEAIIALEDLNGGFKNSRKKVEKQVYQKFEKMLIEKLNYLVDKKADVNEPSGLLHALQLTSKFEGFNKLFGQSGFVFYVPAWNTSNIDPCTGFTNLFFSKDLRYASVENSLEFWKKFDSVAYDDTKDIFSFTFDYNNFNQRAEEIKSKSKWTVYSYGDRLETFRNADLNQQYDSREVKLTEAFKELFKKYEIPHENCEIKENILNCKERDFHDKLLHLFKLTLQLRNSKTGTMIDYMTSPVMDIDGNFFDSRTASSSLPQDADANGAYNIARKGLWLIEKLKNTKDADLPKAKLAIKNAEWLAYAQRNENNG

SEQ ID NO: 186 - protein, 1242 aa, Unknown
  Description of Unknown: uncultivated organism sequence
  Category: MG28 effectors
  Description: MG28-46 effector
MNTYEELTGSYSLTKTISLALNPIGETLRHIEEKGFIAQDEQRAEDYKKVKDIIDRYHKYFITMCLDGFKFSTDKLMKYVALAENAKRDEDAFDEVKTQLRKEIVAAFEKGETYKDLFKKELILEHLPNFVTDENEKRLVASFNKFTTYFTGFHENRENMYSDEAKSTAIAHRLIHENLPMFYDNMKSFKKIAACEDCIDFAEFEAAFSEEFKEFKVEHLTDIFQLEYFNNTLTQRKIDFYKLVIGGKVLEDGTKLKGVNEYVNLYNQQHKDARLPLLKPLYKMILSDKVALSWLPEEFKSDEEMVEAIQEMHKNLKGALTDNAENNLRDLLLNMDKYDLAHIYIANDLGLTDISQNIFGQYDVYTSALKQALRNEYAPTPKERRNPELYDERINKLFKSRTSFSIAELNSLADSDHTIENHFKQLGAAERNGKQEIDLFSQIETAYAKASDILSGKHGNIGQSEAETALVKNLLDAYKSLQHFIKPLLGHGDEAEKDNEFDAKLRAAWDALDIINPLYNKVRNWLTRKPYSTEKIKLNFENAQLLNGWDKNKETDCTSVLLRKDGMYYLAIMNKKANHAFACDELPADGDCYEKIDYKQIALPMGLGAFVRKCGKTAEKLGWSCPEKLKNKDKKIITNDAEAEGVLPDLIDCYKAFLNTYEKDGFKYKDFNFKFKPSSEYSSLVEFFAEVPSQGYKIAFRKVSVAYINQLVESGKLYLFQIWNKDFSKFSKGTPNMHTLYWKQLFDERNLADVVYKLNGQAEVFYRKRSLKLEETTVHQAHQPIPNKNKQNEKRQSQFNYDIVKNRRFTVDKFQFHVPITLNFKATGRGNINDKVLEIIRNNGIKHVIGIDRGERHLLYLSLIDLKGNIIKQMTLNDIVNEYRGHTYATNYKDLLAEREDNRTEARRNWKKIDNIKEIKQGYLAQVVHIISKMMVEYKAIVILEDLNMGFMRGRQKIERSVYEQFEKSLIEKLNYYVDKQKDEEEVGGLLHALQLTSKFKSFKELGKQSGCLFYVPAWNTSKIDPVTGFVNLFDTKYVNVEKARAFFSNFDAIRYNAEKDWFEFAFNYSNFTDKAKDTREKWTLCTHGTSIRTFRNPSKLNQWDSEEVVLTDEFKKVFEKAGIDICGNLKNAICALKEKAHLEKLMQLMKLLLQMRNSKPNTEVDYMISPVADEQGNFYDSRCGNSALPDNADANGAYNIARKGLWVIKQIRETPAGKRPKLAIKNKEWLKFAQQKPYLDD

SEQ ID NO: 187 - protein, 1242 aa, Unknown
  Description of Unknown: uncultivated organism sequence
  Category: MG28 effectors
  Description: MG28-47 effector
MNTYEELTGSYPLIKTINFALNPIGETLRHIEEKGFIAQDEQRAEDYKKVKDIIDRYHKYFITMCLDGFKFSTDNLMKYVALAEDAKRDKKAFDEVKAQLRKEIVGAFSKNKIYGDLFGEKLIKQHLPNFVTDENEKRLVASFNKFTTYFTGFHENRENMYSDEAKSTAIAYRLIHENLPMFYDNMKSFKKIAACEDCIDFAEFEAAFSEEFKAFKVEHLADIFQLEYFNNTLTQRKIDFYKLVIGGKVLEDGTKLKGVNEYVNLYNQQHKDARLPLLKPLYKMILSDKVALSWLPEEFESDEEMVEAIQEMHKNLKGALTDNAENNLRDLLLNMDKYDLAHIYIANDLGLTDISQNIFGQYDVYTSALKQALRNEYAPTPKERRNPELYDERINKLFKSRTSFSIAELNSLADCDHTIENHFKQLGAAERNGKQEIDLFSQIETAYAKASDILSGKYGNIGQSEAETALVKNLLDAYKSLQHFIKPLLGHGDEAEKDNEFDAKLRAAWDALDIINPLYNKVRNWLTRKPYSTEKIKLNFENAQLLNGWDKNKETDCTSVLLRKDGMYYLAIMNKKANHAFACDELPSDGDCYEKIDYKQIALRMGLGAFVRRCGKTAEKLGWSCPERLKNKDKKIITNDAEAEGVLPDLIDCYKAFLNTYEKDGFKYKDFNFKFKPSSEYSSLVEFFAEVPSQGYKIAFRKVSVAYINQLVESGKLYLFQIWNKDFSKFSKGTPNMHTLYWKQLFDERNLADVVYKLNGKAEVFYRKRSLKLEETTVHQAHQPISNKNKQNEKRQSQFNYDIVKNRRFTVDKFQFHVPITLNFKATGRGDINDKVLEIIRNNGIKHVIGIDRGERHLLYLSLIDLKGNIIKQMTLNDIVNEYRGHTYTTNYKDLLAEREDNRTEARRNWKKIDNIKEIKQGYLAQVVHIISKMMVEYKAIVILEDLNMGFMRRWQKIERSVYEQFEKSLIEKLNYYVDKQKDENEVGGLLHAFQLTSKFKSFKELGKQSGCLFYVPAWNTSKIDPVTGFVNLFDTKNVKGEKVRAFFSNFDAIRYNAERDWFEFAFNYSNFTNKARDTREEWTLCTHGTSIRTFRNPSKINHRDSEEVVLTDEFKKVFEKAGIDICGNLKNAICALKEKAHLEKLMQLMKLLLQMRNSKPNTEVDYMISPVADEQGNFYDSRCGNSALPDNADANGAYNIARKGLWVIKQIRETPAGKRPDWAIKNKEWLKFAQQKPYLDD

SEQ ID NO: 188 - protein, 1242 aa, Unknown
  Description of Unknown: uncultivated organism sequence
  Category: MG28 effectors
  Description: MG28-48 effector
MNTYEELTGSYPLIKTINLALNPIGETLRHIEEKGFIAQDEQRAEDYKKVKDIIDRYHKYFITMCLDGFKFSTDKLMKYVALAENAKRDEDAFDEVKPQLRKEIVAAFEKGETYKDLFKKELILEHLPNFVTDENEKRLVASFNKFTTYFMGLHENRENMYSDEAKSTAIAHRLIHENLPMFYDNMKSFKKIAACEDCIDLAEFEAAFSEEFKEFKVEHLADIFQLEYFNNTLTQRKIDFYKLVIGGKVLEDGTKLKGVNEYVNLYNQQHKDARLPLLKPLYKMILSDKVALSWLPEEFKSDEEMMEAILEMHKNLKGALTDNAENNLRDLLLNMDKYDLAHIYIANDLGLTDISQNIFGQYDFYTSALKQALRNEYAPIPKERRNPELYDERINKLFKSRTSFSIAELNSLADCDHTIENHFKQLGAAERNGKQKIDLFSQIETAYAKASDILSGKHGNIGQSEAETALVKNLLDAYKSLQHFIKPLLGHGDEAEKDNEFDAKLRAAWDALDIINPLYNKVRNWLTRKPYSTEKIKLNFENAELLKGWDKNKETVNTSVLLRKDGMYYLAIMNEKAKNAFACDELPSDGDCYEKIDYKQIALRMGLGAFVRRCGKTAEKLGWSCPENLKNKDKKIITNDAEAEGVLPDLIDCYKAFLNTYEKDGFKYKDFNFKFKPSSEYSSLVEFFAEVPSQGYKIAFRKVSIAYINQLVESGNLYLFQIWNKDFSKFSKGTPNMHTLYWKQLFDERNLADVVYKLNGKAEVFYRKRSLKLEETTVHQAHQPISNKNKQNEKRQSQFNYDIVKNRRFTVDKFQFHVPITLNFKATGRGDINDKVLEIIRNNGIKHVIGIDRGERHLLYLSLIDLKGNIIKQMTLNDIVNEYRGHTYTTNYKDLLAEREDNRTEARRNWKKIDNIKEIKQGYLAQVVHIISKMMVEYKAIVILEDLNMGFMRRWQKIERSVYEQFEKSLIEKLNYYVDKQKDENEVGGLLHAFQLTSKFKSFKELGKQSGCLFYVPAWNTSKIDPVTGFVNLFDTKNVKGEKVRAFFSNFDAIRYNAERDWFEFAFNYSNFTNKARDTREEWTLCTHGTSIRTFRNPSKINHRDSEEVVLTDEFKKVFEKAGIDICGNLKNAICALKEKAHLEKLMQLMKLLLQMRNSKPNTEVDYMISPVADEQGNFYDSRCGNSALPDNADANGAYNIARKGLWVIKQIRETPAGKRPDWAIKNKEWLKFAQQKPYLDD

SEQ ID NO: 189 - protein, 1242 aa, Unknown
  Description of Unknown: uncultivated organism sequence
  Category: MG28 effectors
  Description: MG28-49 effector
MNTYEELTGLYSFKKTISLALNPIGETLRHIEEKGFIAQDEQRAEDYKKVKDIIDRYHKYFITMCLDVFKFSTDKLMKYVALAENAKRDEDAFDEVKTQLRKEIVGAFSKNKTYGDLFGEKLIKQHLPNFVTDENEKRLVASFNEFTTYFEKFHKCRENMYSDEAKSTAIAHRLIHENLPMFYDNMKSFKKIAACEDCIDFAEFEAAFSEEFKEFKVEHLADIFQLEYFNNTLTQRKIDFYKLVIGGKVLEDGTKLKGVNEYVNLYNQQHKDARLPLLKPLYKMILSDKVALSWLPEKFESDEEMVEAIQEMHKNLKGTLIDNAENNLRDLLLNMGKYDLAHIYIANDLGLRDISQSIFGQYDVYTSAIKQALRNEYAPIPKERRNPELYDERINKLFKLRTSFSIAELNSLADSDHTIENHFKQLGAAERNGKQEIDLFSQIETAYAKASDILSGKHGNIGQSEAETALVKNLLDAYKSLQHFIKPLLGHGDEAEKDNEFDAKLRAAWDALDIINPLYNKVRNWLTRKPYSTEKIKLNFENAQLLNGWDKNKETDCTSVLLRKDGMYYLAIMNKKANHAFACDELPADGDCYEKIDYKQIALPMGLGAFVRKCGKTAEKLGWSCPEKLKNKDKKIITNDAEAEGVLPDLIDCYKAFLNTYEKDGFKYKDFNFKFKPSSEYSSLVEFFAEVPSQGYKIAFRKVSLAYINQLVESGKLYLFQIWNKDFSKFSKGTPNMHTLYWKQLFDERNLADVVYKLNGQAEVFYRKRSLKLEETTVHQAHQPILNKNKQNEKRQSQFNYDIVKNRRFTVDKFQFHVPITLNFKATGRGNINDKVLEIIRNNGIKHVIGIDRGERHLLYLSLIDLKGNIIKQMTLNDIVNEYRGHTYATNYKDLLAEREDNRTEARRNWKKIDNIKEIKQGYLAQVVHIISKMMVEYKAIVILEDLNMGFMRGRQKIERSVYEQFEKSLIEKLNYYVDKQKDEEEVGGLLHALQLTSKFKSFKELGKQSGCLFYVPAWNTSKIDPVTGFVNLFDTKYVNVEKARAFFSNFDAIRYNAEKDWFEFAFNYSNFTDKAKDTREEWTLCTHGTSIRTFRNPSKLNQWDSEEVVLTDEFKKVFEKAGIDICGNLKNAICALKEKAHLEKLMQLMKLLLQMRNSKPNTEVDYMISPVADEQGNFYDSRCGNSALPDNADANGAYNIARKGLWVIKQIRETPAGKRPKLAIKNKEWLKFAQQKPYLDD

SEQ ID NO: 190 - protein, 1244 aa, Unknown
  Description of Unknown: uncultivated organism sequence
  Category: MG28 effectors
  Description: MG28-50 effector
MKTFNDLTGLYSLSKTLRFELKPVGKTKDNIETKGIIAQDEKRAEEYKKVKDIIDRYHKSFIDMCLAGLVLKTTSDGNNDSLKDYVALASKSNRDEKEDKDFDDVKTVLRKHIVDAFKKGNSYGDLFKKELIQNHLPDFVTDEQEKLMVENFSKFTTYFTGFNENRKNMYSDEKKSTAIAYRLIHENLPMFIDNIKSFAKITEQEDIDFIADVEHSFKEELKGKSITQMFCLENFTETLTQGQIELYNKIVGGRVEDSGVKKQGINEYVNLYNQQHKDARLPLLKPLYKMILSDRVALSWLPEELATDEEMLAAINETHGNLKDVLADVRELLQNINNYDTKHIYIANDKGLTDISQQIFGQYDVYTSAIKAELRNNTNHSAKEKKNPELLEKRINDIFKASKSFSIEYLNSHVDSDKTIQSYYKELGAYDRNGEQRINLLSQIELAYVDAHDVLLGKHTNLNQSEDSIKKIKALLDAYKALQHFIKPLLGNGDEADKDNEFDAKLRAIWDDLDIVTPLYDKVRNRLTRKPYSTEKIKLNFDNAQLLNGWDMNKEPDCTSVLLRKDGQYYLAIMDKKSNHAFDADELPCDGECYEKMEYKQMALPMGMGAFVRKCFGTAKALGWQCPRHLMTSDGKIIIKDEEAQKVLPELIDCYKSFLDIYEKDGFKYKTFNFKFKPSSEYEKLSHFFAEVPSQGYKCSFRNVSVSFINQLVDEGKLYLFQIWNKDFSEYSKGTPNMHTLYWKMLFDERNLANVVYKLNGQAEVFYRKRSLDLDKTTIHRANQPIANKNMQNEKRESTFCYDIVKNRRYTVDKFQFHVPITINFKATGSDNINASVLDVIRNNGIEHIIGIDRGERHLLYLSLIDMKGNIVKQMTLNDIINEYKGNTYTTNYKELLQAREGDRKEARQNWQKIENIKELKEGYLSQVVHVITKMMVEYKAIVVLEDLNGGFMRGRQKIERQVYEKFEKMLIDKLNYYVDKQRDANENGGLLHAYQLASKFDTFKKLGKQSGCLFYIPAWNTSKIDPVTGFVNMFDTRYENADKTRNFFSKFKSISYNADKDWFEFVIGDYSKFTDKAKDTRTDWVLCTYGTRIKTFRNPEKLNQWDNKEIVLTDEFKKVFMEAGIDINGNLKEAICTLTEKKHLESLMQLMKLLVQMRNSETNSEVDYLLSPVADTEGHFYDSRNCGDNLPKDADANGAYNIARKGLWAVMKIKASKPQENLKLGISNKEWLQFAQEKPYLND

SEQ ID NO: 191 - protein, 1226 aa, Unknown
  Description of Unknown: uncultivated organism sequence
  Category: MG28 effectors
  Description: MG28-51 effector
MRQKYDGFESCYGISKVIRTGLIPQGATLEHIEKKGLLLSEEKRAEDYTKVKKIIDRYHRKYIDNQLKDAELSGVEESYSLYCKTNRTEKENTDLKKFLEKLRKQVSNFLTSSDEFKRIDKKELIEKDLLNFVQGDEEEEELVKSFKGFTTYFKGFHENRKNMYSHEEKSTAIAYRVINQNMFRYFDNIRSISKFILANSENNIAELESIYSDKLKGKTLEEFFSVDNYSFFISQSGIDTYNMIIGGYSVDERTKVKGINEYINLFNQENHEKFGTLKPLYKQILAERTTESFLPEKFENDKEVIESLAAFSHNMSDTLLEIMEVFGKIGEYDASGIYLKYDSLKDISTCVFSDWSAITNALWERYDVQYIGKKKKETKAYIEEKRKHFKNLKSVSADEINTAMGENVLIPYSDAAKSLFEKICVAEENIRELINLDYPDDKELSKDKAAVKDIKAYLDSVKALQHHMKPLLGNQDESGKNEFFYGDFSGLWDELDALTPLYNKVRNYVTKKPYSTEKIKLNFDNSTLLNGWDLNKEEANTAILMQREGFLYLGIMDKKHNKIFRNIENTGCEDCYQKMEYKLLPGANKMLPKVFFSKKGIESFKPPLEILEIYKNETFKKGDAFNIDDCHTIIDFYKKALNEHEDWKKFEFKFSKTKDYRDISEFYREVEAQGYKISFKAIPKKIIDEYVEKGWLYLFKIWNKDFSEYSKGTPNLHTLYLKMLFDPRNLENVVYKLNGEAEIFYRKASIQPKDIIKHPANEAIKNKNPLNKKQSSIFKYDLIKDRRYTVDKFEFHVPITLNFKARGKENINTEVREYIKRSKNLYVIGVDRGERNLLYVSVVDADGSIVEQYSLNDIVNEYKGVQYRTDYHALLDTKEKNRDKARKEWTEIQNIKELKEGYISQVVHKICELMMKYEAIIALEDLNGGFKNSRKKVEKQVYQKFEKMLIEKLNYLVDKKADVNEPSGLLHALQLTSKFEGFNKLFGQSGFVFYVPAWNTSNIDPCTGFTNLFFSKDLRYSGVENSLEFWKRFDSVAYDDRKDMFAFAFDYNNFNQRAEGSKSKWTVYSYGDRLETFRNPDLNQQYDSREVKLTEAFKELFKKYGISYKSCEIKENILNCKERGFHEKLLHLFKLTLQLRNSKTGTMIDYMTSSVMSVDGNFFDSRTASSKLPQDADANGAYNIARKGLWLIEKLKNTKDADLPKAKLAIKNAEWLAYAQRNENNG

SEQ ID NO: 192 - protein, 1242 aa, Unknown
  Description of Unknown: uncultivated organism sequence
  Category: MG28 effectors
  Description: MG28-52 effector
MNTYEELTGSYSLIKTINFALNPIGETLRHIEEKGFIAQDEQRAEDYKKVKDIIDRYHKYFITMCLDGFKFSTDNLMKYVALAENAKRDEGAFNEVKTQLRKEIVAAFEKGETYKDLFKKELILEHLPNFVTDENEKRLVASFNKFTTYFMGLHENRENMYSDEAKSTAIAHRLIHENLPMFYDNMKSFKKIAACEDCIDLAEFEAAFSEEFKEFKVEHLADIFQLEYFNNTLTQRKIDFYKLVIGGKVLEDGTKLKGVNEYVNLYNQQHKDARLPLLKPLYKMILSDKVALSWLPEEFKSDEEMVEAILEMHKNLKGALTDNAENNLRDLLLNMDKYDLAHIYIANDLGLTDISQNIFGQYDFYTSALKQALRNEYAPIPKERRNPELYDERINKLFKSRTSFSIAELNSLADCDHTIENHFKQLGAAERNGKQEIDLFSQIETAYAKASDILSGKHGNIGQSEAETALVKNLLDAYKSLQHFIKPLLGHGDEAEKDNEFDAKLRAAWDALDIINPLYNKVRNWLTRKPYSTEKIKLNFENAELLKGWDKNKETVNTSVLLRKDGMYYLAIMNEKAKNAFACDELPSDGDCYEKIDYKQIALRMGLGAFVRRCGKTAEKLGWSCPENLKNKDKKIITNDAEAEGVLPDLIDCYKAFLNTYEKDGFKYKDFNFKFKPSSEYSSLVEFFAEVPSQGYKIAFRKVSVAYINQLVESGNLYLFQIWNKDFSKFSKGTPNMHTLYWKQLFDERNLADVVYKLNGKAEVFYRKRSLKLEETTVHQAHQPISNKNKQNEKRQSQFNYDIVKNRRFTVDKFQFHVPITLNFKATGRGDINDKVLEIIRNNGIKHVIGIDRGERHLLYLSLIDLKGNIIKQMTLNDIVNEYRGHTYTTNYKDLLAEREDNRTEARRNWKKIDNIKEIKQGYLAQVVHIISKMMVEYKAIVILEDLNMGFMRRWQKIERSVYEQFEKSLIEKLNYYVDKQKDENEVGGLLHAFQLTSKFKSFKELGKQSGCLFYVPAWNTSKIDPVTGFVNLFDTKNVKGEKVRAFFSNFDAIRYNAEKDWFEFAFNYSNFTDKAKDTREEWTLCTHGTSIRTFRNPSKLDHWDSEEVVLTDEFKKVFEKAGIDICGNLKNAICALKEKAHLEKLMQLMKLLLQMRNSKPKTEVDYMISPVADEQGNFYDSRCGNSALPDNADANGAYNIARKGLWVIKQIRETPAGKRPDWAIKNKEWLKFAQQKPYLDD

SEQ ID NO: 193 - protein, 1275 aa, Unknown
  Description of Unknown: uncultivated organism sequence
  Category: MG28 effectors
  Description: MG28-53 effector
MEQFTNLYPVSKTLRFELIPDERTKDFLEHSDLINQDEHRAESYKAVKKIIDRYHKAFIDDVLSSLKLQYAKTGHLDSLEELYSLYISSQKIEKVQEQLRKQIVKALTQDSRFKRMGKKELIREDIFKAISLTSEEQKLVEEFHDFTTYFNGFHENRKNMYSAEAQSTAIAYRLIHENLPKFIDNIAIFQKILHSPVAENFPQLYKEMEEHLNVNSIEEMFMLDYYNEVLTQTQIEVYNAIIGGRTMQDGSKIQGINEYVNLYNQKQSARENRLPKLKPLFKQILSDRETMSWLPEEFSSDAELLEAVNDCYASLNDHVFTPLQDMLSCLSDFSLEGVFVPNDLSITDISQKLYGDWSVIKQTVISDLKTKNPPKRNEKPEKYEERISKLLKSTDSFSVAYLNGCLADKKGDICSYFCNLGAVNTTTEQKENLFLQIQNAYAEASELLSKEYPREKNLSQDKPNVEKLKALLDAIKSLQHFVKPLLGAGDEAGKDERFYGEMAILWEELSKVTQLYNKVRNRMTRKPYSTEKFKLTFNIKGNFLGGWVDSKTDRSDNGTQYGGYLFRRKNAINEYDYYLGMSANTKLFRRQANVEGTYERLDYYQPKSQTVYGNSYVGKNGYEADKQALLKSILTFVANTGNEELMQQVNSKDTPSAMLTVMKEASETFYEQLLEDTDFSAINKEVTDNLHKTILSMNRIPRVNDYKDVEFEVFTEPQQVIDDICKDKVFSYFPVSDDEMNQAMADANRPLLLFKISNKDLSYAEKHSKGLRQSRGAENLHTMYFKALMSGSQSVFDIGTGEVFFRRSSLNVSKPTHPQSTPIQNKNLEGCSSFNYDLIKDKRYTVDKFVFHLSMIQNYQTSGKADVNAMTRDFIHDHFDEMHFIGIDRGERHLLYVSVIDSKGNIKEQFSLNQIANEYRGNSYKTDYHSLLGKREETRQRERQSWRTIEGIKELKQGYLSQVVHKIVTLMVKYQAIVVLEDLNMGFKRGRQKVESSVYQQFEKALIDKLNYLVDKQQAPNDYGGLLKGYQLTNKFTSFRDMKRQNGFLFYIPAWNTSKIDPVTGFVDLLHPKYENVEKARTFFCKFKSIRYNSEKDRYEFTFDYNDFTTQADGTRTLWTICTHGERIETYRNPEKNSQWDSREVDLTESMTLLFSKYNISQHENLKEAIARQTEKQFFEKLIHLLRLMLQMRNSKTGTDVDYLISPVADENGCFFDSRSCDKTLPENADANGAYNIARKGLWIARQIQRTGVDAKSDLSITNKEWLKFAQFKDV

SEQ ID NO: 194 - protein, 1242 aa, Unknown
  Description of Unknown: uncultivated organism sequence
  Category: MG28 effectors
  Description: MG28-54 effector
MNTYEELTGSYSLIKTINFALNPIGETLRHIEEKGFIAQDEQRAEDYKKVKDIIDRYHKYFITMCLDGFKFSTDKLMKYVALAENAKRDEGAFNEVKTQLRKEIVAAFEKGETYKDLFKKELILEHLPNFVTDENEKRLVASFNKFTTYFTGFHENRENMYSDEAKSTAIAYRLIHENLPMFYDNMKSFKKIAACEDCIDFAEFEAAFSEEFKEFKVEHLADIFQLEYFNNTLTQRKIDFYKLVIGGKVLEDGTKLKGVNEYVNLYNQQHKDARLPLLKPLYKMILSDKVALSWLPEEFKSDEEMVEAIQEMHKNLKGALTDNAENNLRDLLLNMDKYDLAHIYIANDLGLTDISQNIFGQYDVYTSAIKQALRNEYAPTPKERRNLELYDERINKLFKSRTSFSIAELNSLADCDHTIENHFKQLGAAERNGKQEIDLFSQIETAYAKASDILSGKHGNIGQSEAETALVKNLLDAYKSLQQFIKPLLGHGDEAEKDNEFDAKLRAAWDALDIINPLYNKVRNWLTRKPYSTEKIKLNFENAQLLNGWDKNKETDCTSVLLRKDGMYYLAIMNKKANHAFACDELPADGDCYEKIDYKQIALPMGLGAFVRKCGKTAEKLGWSCPEKLKNKDKKIITNDAEAEGVLPDLIDCYKAFLNTYEKDGFKYKDFNFKFKPSSEYSSLVEFFAEVPSQGYKIAFRKVSVAYINQLVESGKLYLFQIWNKDFSKFSKGTPNMHTLYWKQLFDERNLADVVCKLNGQAEVFYRKRSLKLEETTVHQAHQPIPNKNKQNEKRQSQFNYDIVKNRRFTVDKFQFHVPITLNFKATGRGNINDKVLEIIRNNGIKHVIGIDRGERHLLYLSLIDLKGNIIKQMTLNDIVNEYRGHTYATNYKDLLAEREDNRTEARRNWKKIDNIKEIKQGYLAQVVHIISKMMVEYKAIVILEDLNMGFMRGRQKIERSVYEQFEKSLIEKLNYYVDKQKDEEEVGGLLHALQLTSKFKSFKELGKQSGCLFYVPAWNTSKIDPVTGFVNLFDTKYVNVEKARAFFSNFDAIRYNAEKDWFEFAFNYSNFTDKAKDTREKWTLCTHGTSIRTFRNPSKLNQWDSEEVVLTDKFKKVFEKAGIDICGNLKNAICALKEKAHLEKLMQLMKLLLQMRNSKPNTEVDYMISPVADEQGNFYDSRCGNSALPDNADANGAYNIARKGLWVIKQIRETPAGKRPKLAIKNKEWLKFAQQKPYLDD

SEQ ID NO: 195 - protein, 1242 aa, Unknown
  Description of Unknown: uncultivated organism sequence
  Category: MG28 effectors
  Description: MG28-55 effector
MNTYEELTGSYSLTKTISLALNPIGETLRHIEEKGFIAQDEQRAEDYKKVKDIIDRYHKYFITMCLDGFKFSTDKLMKYVALAENAKRDEDAFDEVKTQLRKEIVAAFEKGETYKDLFKKELILEHLPNFVTDENEKRLVASFNKFTTYFTGFHENRENMYSDEAKSTAIAHRLIHENLPMFYDNMKSFKKIAACEDCIDFAEFEAAFSEEFKEFKVEHLTDIFQLEYFNNTLTQRKIDFYKLVIGGKVLEDGTKLKGVNEYVNLYNQQHKDARLPLLKPLYKMILSDKVALSWLPEEFKSDEEMVEAIQEMHKNLKGALTDNAENNLRDLLLNMDKYDLAHIYIANDLGLTDISQNIFGQYDVYTSALKQALRNEYAPIPKERRNPELYDERINKLFKSRTSFSIAELNSLADCDHTIENHFKQLGAAERNGKQEIDLFSQIETAYAKASDILSGKHGNIGQSEAETALVKNLLDAYKSLQHFIKPLLGHGDEAEKDNEFDAKLRAAWDALDIINPLYNKVRNWLTRKPYSTEKIKLNFENAQLLNGWDKNKETDCTSVLLRKDGMYYLAIMNKKANHAFACDELPADGDCYEKIDYKQIALPMGLGAFVRKCGKTAEKLGWSCPERLKNKDKKIITNDAEAEGVLPDLIDCYKAFLNTYEKDGFKYKDFNFKFKPSSEYSSLVEFFAEVPSQGYKIAFRKVSVAYINQLVESGKLYLFQIWNKDFSKFSKGTPNMHTLYWKQLFDERNLADVVYKLNGQAEVFYRKRSLKLEETTVHQAHQPIPNKNKQNEKRQSQFNYDIVKNRRFTVDKFQFHVPITLNFKATGRGNINDKVLEIIRNNGIKHVIGIDRGERHLLYLSLIDLKGNIIKQMTLNDIVNEYRGHTYATNYKDLLAEREDNRTEARRNWKKIDNIKEIKQGYLAQVVHIISKMMVEYKAIVILEDLNMGFMRGRQKIERSVYEQFEKSLIEKLNYYVDKQKDEEEVGGLLHALQLTSKFKSFKELGKQSGCLFYVPVWNTSKIDPVTGFVNLFDTKYVNVEKARAFFSNFDAIRYNAEKDWFEFAFNYSNFTDKAKDTREKWTLCTHGTSIRTFRNPSKLNQWDSEEVVLTDEFKKVFEKAGIDICGNLKNAICALKEKAHLEKLMQLMKLLLQMRNSKPNTEVDYMISPVADEQGNFYDSRCGNSALPDNADANGAYNIARKGLWVIKQIRETPAGKRPKLAIKNKEWLKFAQQKPYLDD

SEQ ID NO: 196 - protein, 1240 aa, Unknown
  Description of Unknown: uncultivated organism sequence
  Category: MG28 effectors
  Description: MG28-56 effector
MNTYEELTGSYSLTKTISLALNPIGETLRHIEEKGFIAQDEQRAEDYKKVKDIIDRYHKYFITMCLDRFKFSTDKLMKYVALAENAKRDEDAFDEVKTQLRKEIVVAFEKGETYKDLFKKELILEHLPNFVTDENEKRLVASFNKFTTYFTGFYENRENMYSDEVKSTAIAHRLIHENLPMFYDNMKSFKKIAACEDCIDFTEFEAAFSEEFKEFKVEHLADIFQLEYFNNTLTQRKIDFYKLVIGGKVLEDGTKLKGVNEYVNLYNQQHKDARLPLLKPLYKMILSDKVALSWLPEEFKSDEEMVEAIQEMHKNLKGALTDNAENNLRDLLLNMDKYDLAHIYIANDLDLTDISQNIFGQYDVYTSALKQALRNEYAPTPKERRNPELYDERINKLFKSRTSFSIAELNSLADSDHTIENHFKQLGAAERNGKQEIDLFSQIETAYAKASDILSGKHGNIGQSEAETALVKNLLDAYKSLQHFIKPLLGHGDEAEKDNEFDAKLRAAWDALDIINPLYNKVRNWLTRKPYSTEKIKLNFENAQLLNGWDKNKETDCTSVLLRKDGMYYLAIMNKKANHAFACDELPADGDCYEKIDYKQIALPMGLGAFVRKCGKTAEKLGWSCPEKLKNKDKKIITNDAEAEGVLPDLIDCYKAFLNTYEKDGFKYKDFKFKPSSEYSSLVEFFAEVPSQGYKIAFRKVSVAYINQLVESGKLYLFQIWNKDFSKFSKGTPNMHTLYWKQLFDERNLADVVYKLNGQAEVFYRKRSLKLEETTVHQAHQPIPNKNKQNEKRQSQFNYDIVKNRRFTVDKFQFHVPITLNFKATGRGNINDKVLEIIRNNGIKHVIGIDRGERHLLYLSLIDLKGNIIKQMTLNDIVNEYRGHTYATNYKDLLAEREDNRTEARRNWKKIDNIKEIKQGYLAQVVHIISKMMVEYKAIVILEDLNMGFMRGRQKIERSVYEQFEKSLIEKLNYYVDKQKDEEEVGGLLHALQLTSKFKSFKELGKQSGCLFYVPAWNTSKIDPVTGFVNLFDTKYVNVEKARAFFSNFDAIRYNAEKDWFEFAFNYSNFTDKAKDTREKWTLCTHGTSIRTFRNPSKLNQWDSEEVVLTDEFKKVFEKAGIDICGNLKNAICALKEKAHLEKLMQLMKLLLQMRNSKPNTEVDYMISPVADEQGNFYDSRCGNSALPDNADANGAYNIARKGLWVIKQIRETPAGKRPKLAIKNKEWLKFAQQKPYLDD

SEQ ID NO: 197 - protein, 1271 aa, Unknown
  Description of Unknown: uncultivated organism sequence
  Category: MG28 effectors
  Description: MG28-57 effector
MEQFTNLYPVSKTLRFELIPDERTKDFLEHSDLINQDEHRAESYKAVKKIIDRYHKAFIDDVLSSLKLQYAKTGHLDSLEELYSLYISSQKIEKVQEQLRKQIVKALTQDSRFKRMGKKELIREDIFKAISLTSEEQKLVEEFHDFTTYFNGFHENRKNMYSADAQSTAIAYRLIHENLPKFIDNIAIFQKILHSPVAENLPQLYKEMEEYLNVNSIEEMFMLDYYNEVLTQAQIEVYNAIIGGRTLEDGTKIQGINEYVQKQTSRGNRLPKLKPLFKQILSDREAVSWLPEEFSSDAELLEAVNDCYASLNDHVFTPLQDMLSCLSDFSLEGVFVPNDLSITDISQKLYGDWSVIKQTVISDLKTKNPPKRNEKPEKYEERISKLLKSTDSFSVAYLNGCLADKKGDICSYFCNLGAVNTTTEQKENLFLQIQNAYAEASELLSKEYPREKNLSQDKPNVEKLKALLDAIKSLQHFVKPLLGAGDEAGKDERFYGEMAILWEELSKVTQLYNKVRNRMTRKPYSTEKFKLTFNIKGNFLGGWVDSKTDRSDNGTQYGGYLFRRKNAINEYDYYLGMSANTKLFRRQANVEGTYERLDYYQPKSQTVYGNSYVGKNGYEADKQALLKSILTFVANTGNEELMQQVNSKDTPSAMLTVMKEASETFYEQLLEDTDFSAINKEVTDNLHKTILSMNRIPKVNDYKDVEFKVFTEPQQVIDDICKDKVFSYFPVSDDEMNQAMADANRPLLLFKISNKDLSYAEKHSKGLRQSRGTENLHTMYFKALMSGSQSVFDIGTGEVFFRRSSLNVSKPTHPQNTPIQNKNLEGCSSFNYDLIKDKRYTVDKFGFHLSMIQNYQASGKADVNAMTREFIHDHFDEMHFIGIDRGERHLLYVSVIDSKGNIKEQFSLNQIDNEYRGNSYKTDYHSLLGKREETRQRERQSWRTIEGIKELKQGYLSQVVHKIVTLMVKYQAIVVLEDLNMGFKRGRQKVESSVYQQFEKALIDKLNYLVDKQQAPNDYGGLLKGYQLTNKFTSFRDMKRQNGFLFYIPAWNTSKIDPVTGFVDLLHPKYENVEKARAFFCKFKSIRYNSEKDRYEFTFDYNDFTTQADGTRTLWTICTHGERIETYRNPEKNSQWDSREVDLTESMTLLFSKYNISQHENLKEAIARQTEKQFFEKLIHLLRLMLQMRNSKTGTDVDYLISPIADENGCFFDSRSCDKILPENADANGAYNIARKGLWIARQIQKTGVDAKADISITNKEWLKFAQFKDV

SEQ ID NO: 198 - protein, 1625 aa, Unknown
  Description of Unknown: uncultivated organism sequence
  Category: MG28 effectors
  Description: MG28-58 effector
MSTEFSPDRLKTARTTLKLSMEDLSILTDRIVSRQSIHGYETERMKPKAAVLNKLAQVLGVSPHYLEGKGVMIDIPALRYTGSKALTREEIHEIENILAFRAERYIDLEEKNGMLKQFSNPLKSFIISNQKEADDASKFLREQWGMGTASITSVYRLLERKGIKLIETTLPQGVLGLSTWCEKKYPLIVMNADKSDTTTERTRFTAIHELGHLLLNIATECDKERICNQFAGCFLLPKEVMYEELGSKRDFITLEEVLDFHLEYGVSVAAIIHQAWDLRIITSEHYNHWFDNIISKNRTEKGWGSYSIKETLGREKRMQTISERANNNKTSSNNTKSIKYSNNKIVSNMSNFKDFTHLYQLSKTLRFELRPIGETLKHFNESGILDHDETRAESYKKVKKLIDRYHKEFMEEALRNFEFQMDDEKQKNSLSEYFFLYSLGKRTEAQDNDFKEIKKNLREQIAKYFKASPKYKNLFKQELIKEDLCNNMQCNEEEQKLVEEFHNFTTYFTGFHENRKNMYSNEEKSTAIAFRLVHQNLPKFIDNIGAFDRARNIDEIKAGIKNLQKHFETKGLLNQGEKIEDFFALDYYSRLAVQSRIDIYNAILGGRTTEKGEKIQGLNEYINLYNQQHKEARLPKMKALFKQILSDRQAISWIEESFKSDNEVLSSVNDFYENLKQNEIFDRTKELLTSVGSYDLSKVYITNDQQLTSISQQLYGSWAVIENAILAEMQNETPRKKKEDAEKYNERLKKAYSNRSSFSIAYIDQCLEAVFDENLIPVEQHFTKLGEAEIETEAECGKIKIPDVFTQIEQTYSAAKSLLCNPYPKDKHLSQSDEDIEKVKNLLDALKRFQHFIKPLTGCGDEAEKDEMFYSDLTELLAEIDQLNSLYNRVRNHLTGKPYSEEKLKLNFENASLLTGWDKNMERANTAVILRKGKLYYLAIMKKEHNSIFASDNLPDKGECYEKMVYKQIALPLGFGGFARKCFGSATKLGWTYPTNLLNKEGKIIIKDEEAKDVLPELIDCYKDFLNIYEKDGFKYSSYNFKFKPSNQYEKLSQFFAEIQQQGYKITFQNISSDYIDQLVNEGKLYLFQIYNKDFSPSSKGTPNMHTLYWQMLFDERNLNDGVYQLNGQAEVFFRKKSLNYTKPTHPANQPIAKKNPHSKNETSQFTYDLIKDKRFTMDKFLFHVPITINFKSSGMDNIDLKVRQWLQKADDVHIIGIDRGERHLLYLTVIDCKGNIKEQMSLNTIENEYKGNTYAFDYHKRLDEKEKERGKAKKNWKTIENIKELKEGYLSQAIHKITQIMLKYNAIIVLEDLNMGFMRGRQKVEKQVYQKFEKMLIDKLNYLADKKKDPSEVGGVLNAYQLTSKFESFTKLGRQSGFLFYIPAWNTSKIDPVTGFVNLFDTQYKSDDKAKMFFSKFKSISYNKDKNWFEFSFDYNDFTNKAEGTKTQWTVCTNGERIENFRSGQKPNQWDGRTINLSQKFKSLFDEYGIDFTKDLQNSICSQSKKGFFKQLLHLFKLTVQMRNSNTETEEEKGKKDFIISPVCVDDKYYNSDIEAEKGKDEEGNWKSELPVNADANGAYNIARKGLMILNHIKQSSDPSKKQEYDLTNKAWLNFVQKGSVEGK

SEQ ID NO: 199 - protein, 1246 aa, Unknown
  Description of Unknown: uncultivated organism sequence
  Category: MG28 effectors
  Description: MG28-59 effector
MEQFTNLFNVQKTICFELQPIGKTKENIEINGILTQDEKRAKDYQTVKGFIDEYHKQFIKDRLWNFKLPLVSKGNLDSLEEYQTLYELPKRNDAQEADFSELKDNLRSIIAKRLTESGSAFDRIFKKELIREDLVEFLSNEEDKDLVRQFADFTTYFSGFHENRKNMYSAEEKSTAIAYRLIHQNLPKFMDNMKAFAKIANTSVAEYFADIYAGWKEYLNVNSVEELFSLDYFSETLTQPHIEVYNYIIGKKVLEDGTEIKGINEFVNLYNQQQKDKSKRLPFLVPLYKQILSDREKLSWMAEEFDSDEKMLAAINELYTHLHELLMGEENESLRSLLLNMKDYDLSQINITNDLSLTDISQHLFNRYDVYTNGVKEQLKGITPRKKKESDEDFEDRISKIFKTQKSFSISQLNSLPHPEIDGNKPRSIEEYFMAMGAVNTETTQRESFFSKIETAYEDARAILQMKDTDDSLSQNKPAVSKIKALLDAFKDLQHFIKPLLGSGEEVEKDELFYGSFQLIWDELDSVTPLYNKVRNWLTRKPYSTEKIKLNFDNSQLLGGWDVNKEPDCTGVLLRKDGYYYLGIMDKKFNRVFEENVIHTDGDCYEKMVYKQLGQISQQLPRIAFSKTWQQKLSIPEEIISIKKSESFKKNCGDLQKLISYYKSFISQHEEWNSYFDINFTDRCDYKNLPDFYSEVDSQFYALSFSKVSSSYINVLVDEGKLYLFRIWNKDFSEYSKGTPNLHTLYWKMLFDERNLSDVVYKLNGQAEVFYRKASIKPDNRVVHKANESITNKNALNKKTTSTFKYDIIKDRRYTVDKFQFHVPITINFKASGQTNINPIVQETIRQGGFKHIIGLDRGERHLLYLSLIDLKGKIVKQMTLNEIVNEYNGKPYKTNYHDLLAKREGERTDARRSWDTIETIKELKEGYLSQVVHIISNMMVKYNAIVVLEDLNTGFMRGRQKIERQVYEKFEKMLIVKLNCYIDKKADVMETTGLLHPLQLTCEAKKWKRSHQCGCLFYIPAWNTSKIDPVTGFVNLLDTRYETCEKAHLFFSKFQRISFNQKKGWFEFAFDYNDFTTKAEGTRTQWTLCTYGERIRTFRNPQKNNQWDNERIVLTDEFKKIFDEKGIDIYGNLKDAICNQRDAKFFKDLLGLMKLLLQMRNSITNSEEDYILSPVADEKGHFFDSREGKCNLPIDADANGAYNIARKGLWVICKIKKSLKGEKPTLSITNKEWLKFAQDKPYLND

SEQ ID NO: 200 - protein, 1249 aa, Unknown
  Description of Unknown: uncultivated organism sequence
  Category: MG28 effectors
  Description: MG28-60 effector
MERLTNLYPVSKTLRFELQPIGKTRENIEKGGILQQDEERAENYKLVKSFIDEYHKQYIKSRLWNFELPLADEGRHNSLAEYRALYELPKRDAEQEAAFTEVKDNLRAIIARRLTEKGSAYDRIFKKELIREDLIEFLEDAKDKEIVRQFADFTTYFTGFHENRANMYSSEEQSTAIAYRLIHQNLPKFMDNMKSFAKIAETSVADHFADIYAGWEEYLNVGSINDMFRLDYFSQTLTQEHIEVYNYIIGKRILDDGTEIKGINEYVNLYNQQQKDKKQRLPLLVPLYKQILSDREKLSWLSEEFDSDQKMQQAIKETYDQLYDLLMGDENESLKSLLMHLSDFDLSQINITNDLSLTDISQHLFGKYDVFTNGIKDKLRIITPRKKKDTDEDFEERITKLFKSQKSFSIAELNSLPHPVVEGNQPNSIEDYYMTLGAVNTETVQKENLFAQIENAYTDALPILLLTDTDDKLSQNKAAVAKIKKLLDAFKDLQHFVKPLLGSGEEVEKDERFYGTFQTIWDELDTVTPLYNKVRNWLTRKPYSTEKIKLNFDNSQLLGGWDVNKEPDCTGVLLRKGNYYYLGIMNKKNNRIFEKDLTPSDGDCYDKIDYKLLPGANKMLPKVFFSKSRIDEFSPSASLVEKYKAGTHKKGANFSLKDCHNLIDFFKQSIAKHEDWSKFGFHFSDTKTYEDISGFYREVEHQGYSLSSHKVSAEYIHRMVDEGKLFLFRLWNKDFSEFSKGTPNLHTLYWKMLFDERNLQDVVYKLNGQAEVFYRKASIKEENRIIHPAKKDISNKNALNDKHTSRFDYDIIKDRRFTVDKFQFHVPITINFKATGQTNINPVVHDIIRQGGIKHIIGIDRGERHLLYLSLIDLQGRIVKQMTLNEIINEYAGRQYKTNYHDLLAKREGERTDARRSWDTIENIKELKEGYLSQVVHVITKMMVEYKAIIVLEDLNMGFMRGRQKIERQVYEKFEHMLIDKLNCYIDKLEDPSKPGGMLQALQLSNKFESFARLGKQSGCLFYIPAWNTSKIDPVTGFVNLLDTHYDTMKAAKSFFSKFERISYNGEKNWFEFTFDYNEFNKKAEGTRTHWTLCTYGTRIRNFRNPQKNNQWDDEEIVLTDMFKRLFDNYGIDYRGNLKEALQQPTEAKFYQELMSLMKLLLQMRNSKINSEVDYLLSPVADENGYFFDSRQGDTTLPDNADANGAYNIARKGLWVIHKIQETPDGEKASLAISNKEWLHFAQTKPYLE

SEQ ID NO: 201 - protein, 1242 aa, Unknown
  Description of Unknown: uncultivated organism sequence
  Category: MG28 effectors
  Description: MG28-61 effector
MNTYEELTGLYSFKKTISLALNPIGETLRHIEEKGFIAQDEQRAEDYKKVKDIIDRYHKYFITMCLDGFKFSTDKLMKYVALAENAKRDEDAFDEVKTQLRKEIVGAFSKNKTYGDLFGEKLIKQHLPNFVTDENEKRLVASFNEFTTYFEKFHKCRENMYSDEAKSTAIAHRLIHENLPMFYDNMKSFKKIAACEDCIDFTEFEAAFSEEFKEFKVEHLADIFQLEYFNNTLTQRKIDFYKLVIGGKVLEDGTKLKGVNEYVNLYNQQHKDARLPLLKPLYKMILSDKVALSWLPEEFKSDEEMVEAIQEMHKNLKGALTDNAENNLRDLLLNMDKYDLAHIYIANDLGLTDISQNIFGQYDVYTSAIKQALRNEYAPIPKERRNPELYDERINKLFKSRTSFSIAELNSLADSDHTIENHFKQLGAAERNGKQEIDLFSQIETAYAKASDILSGKHGNIGQSEAETALVKNLLDAYKSLQHFIKPLLGHGDEAEKDNEFDAKLRAAWDALDIINPLYNKVRNWLTRKPYSTEKIKLNFENAQLLNGWDKNKETDCTSVLLRKDGMYYLAIMNKKANHAFACDELPADGDCYEKIDYKQIALPMGLGAFVRKCGKTAEKLGWSCPERLKNKDKKIITNDAEAEGVLPDLIDCYKAFLNTYEKDGFKYKDFNFKFKPSSEYSSLVEFFAEVPSQGYKIAFRKVSVAYINQLVESGKLYLFQIWNKDFSKFSKGTPNMHTLYWKQLFDERNLADVVYKLNGQAEVFYRKRSLKLEETTVHQAHQPIPNKNKQNEKRQSQFNYDIVKNRRFTVDKFQFHVPITLNFKATGRGNINDKVLEIIRNNGIKHVIGIDRGERHLLYLSLIDLKGNIIKQMTLNDIVNEYRGHTYATNYKDLLAEREDNRTEARRNWKKIDNIKEIKQGYLAQVVHIISKMMVEYKAIVILEDLNMGFMRGRQKIERSVYEQFEKSLIEKLNYYVDKQKDEEEVGGLLHALQLTSKFKSFKELGKQSGCLFYVPAWNTSKIDPVTGFVNLFDTKSVKGEKVRAFFSNFDAIRYNAEKDWFEFAFNYSNFTDKAKDTREKWTLCTHGTSIRTFRNPSKLNQWDSEEVVLTDEFKKVFEKAGIDICGNLKNAICALKEKAHLEKLMQLMKLLLQMRNSKPNTEVDYMISPVADEQGNFYDSRCGNSALPDNADANGAYNIARKGLWVIKQIRETPAGKRPKLAIKNKEWLKFAQQKPYLDD

SEQ ID NO: 202 - protein, 1252 aa, Unknown
  Description of Unknown: uncultivated organism sequence
  Category: MG28 effectors
  Description: MG28-62 effector
MKDLKQFTNQYSVSKTLRFELQPIGKTKENIEKNGILQRDEKRAEDYKIVKEFIDEYHKQFIKERLWDFKLPLHSKGRLDTLEEYQALYELSKRDDAQEAEFSEVKDNLRSIIAKRLTESGSAYERIFKKELIREDLIDFLESEEDKDIVRQFADFTTYFSGFHENRRNMYVADEKSTAIAYRLIHQNLPKFMDNMKAFAKIAETPVAEHFADIYEGWKECLNVGSIEEIFRLDYFSETLTQTHIEVYNYIIGKKILEDGTEIKGINEYVNLYNQQQKDKSKRLPFLVPLYKQILSDREKLSWLAEEFDSDEKMLAAINESYNHLHDLLMGNENESLRSLLLHIKDFNLSQINITNDLSLTDISQHLFGRYDVFANGIKDELRNITPRKKKEGEEDFEDRISKIFKTQKSFSIDFLDKLPQPVMDDGKPRSIEDYFMTLGAVNTETTQKENLFAQIENAYADAHAILQMKDTGDTLSQNKPAVAKIKALLDVLKDLQRFIKPLLGSGEENEKDELFYGSFQMMWDELDTVTPLYNKVRNWLTRKPFSTEKIKLNFDNSQLLGGWDVNKEPDCTGVILRKDGYYYLGIMDKKSNRIFEADVTPSDGDCYDKIDYKLLPGANKMLPKVFFSKSRIDEFAPSEAIVSSYKRGTHKKGADFNLAECHRLIDFFKQSINKHEDWSKFNFHFSDTKTYEDISGFYREVEQQGYMLSSHPVSSSYINQLVDEGKLYLFRIWNKDFSEFSKGTPNLHTLYWRMLFDERNLADVVYKLNGQAEVFYRKASIKPENRIIHKANLPIANKNELNEKRASVFEYDIIKDKRYTVDKFQFHVPITINFKATGQTNINPIVQDVIKQGGFSHIIGIDRGERHLLYLSLIDLKGNIVKQMTLNDIVNEYKGQAYKTNYHDLLAKREGDRTDARRSWEAIETIKELKEGYLSQVVHIISKMMVKYNAIVVLEDLNTGFMRGRQKIERQVYEKFEKMLIEKLNCYIDKQLSPTDEGGLLHPLQLTCDAQKWKRSHQCGCLFYIPAWNTSKIDPVTGFVNLLDTHYDTREKARVFFSKFQRISFNAQKNWFEFALDYNDFTAKAEGTRTQWTLCTQGERIRTFRNPQKNHQWDDERIVLTDAFKQLFDKYDIDINGNLKEAISAQTDAQFFKELLGLMKLLLQMRNSITNSEEDYLLSPVADDAGHFFDSREGISSLPIDADANGAYNIARKGLWVIRKIQETPEGEKPSLTITNREWLQFAQTKPYLND

SEQ ID NO: 203 - protein, 1246 aa, Unknown
  Description of Unknown: uncultivated organism sequence
  Category: MG28 effectors
  Description: MG28-63 effector
MKEFANLFPVSKTLRFELQPIGKTKENIEKNGILQRDEKRAEDYKIVKGFIDEYHKQFIKDRLWSFKLPLHSEGHLDSLEEYQELYELSKRNDAQEAEFTEVKDNLRSIIAKRLTESGTKYDTIFKKELIREDLIDSLENNEDKDIVRQFADFTTYFSGFHENRRNMYVADEKSTAIAYRLIHQNLPKFMDNMKAFAKIAETSVAEHFSDIYEGWKEYLNVGSIEEIFRLDYFSETLTQPHIEVYNYIIGKKILEDGTEIKGINEYVNLYNQQQKDKSKRLPFLVPLYKQILSDREKLSWLAEEFDSDEKMLAAINESYEHLHDLLMGNENESLRSLLLHIKDFNLSQINITNNLSLTDISQHLFSRYDVFTNGIKDELRLITPRKKKESEEDFEDRISKIFKTQKSFSIDFLDKLPQPVMEDEKHRAIEDYFMTLGAVNTETTQKENLFAQIENAYEDARTILQLKDTGDMLLQNKPAVAKIKALLDALKDLQHFIKPLLGSGEENEKDELFYGSFQMMWDELDTVTPLYNKVRNWLKRKPFSTEKIKLNFDNSQLLGGWDVNKEPDCTGVILRKDGFYYLGIMDKKSNHIFEADVTPSDGECYEKMVYKQLGQISQQLPRIAFSKSWQQKITIPEDVIIIKKTESFKKNNEDLQKLISYYKSFISQHEEWNSYFNISFSNRNNYKNLPDFYSEVDTQFYNLSISKVSVSYIDQLVNEGKLYLFRIWNKDFSEFSKGIPNLHTLYWKMLFDERNLADVVYKLNGQAEVFYRKASIKPENRIIHKANQPIANKNELNKKRTSAFEYDIIKDRRYTVDKFQFHVPITINFKAAGQTNINPIVQDTIRQGGFSHIIGIDRGERHLLYLSLIDLKGNIVKQMTLNDIINEYKGQTYKTNYHDLLAKREGDRTDARRSWEIIETIKELKEGYLSQVVHIISKMMVEYNAIVVLEDLNTGFMRGRQKIERQVYEKFEKMLIEKLNCYIDKQAEPSDNTGLLHPLQLTCDAQKWKRSHQCGCLFYIPAWNTSKIDPVTGFVNLLDTRYETREKARVFFSKFQRISFNAQKGWFEFSFDYNDFTSKAEGTRTQWTLCTQGERIRTFRNPQKNHQWDDEKIMLTDAYKQLFDKYDIDINSNIKEAISAQTDAQFFKELLGLMKLLLQMRNSITNSEEDYLLSPVADDAGHFFDSREGISSLPIDADANGAYNIARKGLWIIRKIQETASGEKASLSITNKEWLQFAQTKPYLND

SEQ ID NO: 204 - protein, 1249 aa, Unknown
  Description of Unknown: uncultivated organism sequence
  Category: MG28 effectors
  Description: MG28-64 effector
MKQFTNLYPVSKTLRFELQPIGKTKENIEKNGILMRDEKRAKDYKIVKEFIDDYHKQFIKERLWDFKLPLNSEGKLNSLEEYQALYELSKRDEVQEAGFTEVKDNLRSIIAKRLTESGSAYERIFKKELIREDLVDFLENEEDKDIVRQFADFTTYFSGFHENRHNMYVAEEKSTAIAYRLIHQNLPKFMDNMKAFAKIAETSVAEHFADIYEGWKEYLNIESIEEVFRLDYFSETLTQPHIEVYNYIIGKKILEDGTEIKGINEYVNLYNQQQKDKSKRLPFLVPLYKQILSDREKLSWLAEEFDSDEKMLSAINESYSHLHDLLMSNENESLRSLLLHIKEFNLSHINIANDLSLTDISQHLFSRYDVFTNGIKDELRIITPRKKKESDEDFEERITKIFKTIKSFSIDFLDNLPQPIMEDGKRRSIEDYFMTLGAVNTETTQKENLFAQIENAYEDARNILQLKDTGDTLSQNKPAVAKIKALLDALKDLQHFIKPLLGSGEENEKDELFYGSFMMMWDELDTITPLYNKVRNWLTRKPFSTEKIKLNFDNAQLLGGWDVNKEPDCTGVLLRKDGFYYLGIMNKKSNRIFESEVTPSDGECYDKIDYKLLPGANKMLPKVFFSKSRIDEFAPSEAVVSSYKRGTHKKGANFNLSECHRLIDFFKQSINKHEDWSKFGFHFSPTDTYEDISGFYREVELQGYMLSSHPVSSSYINQLVDEGKLYLFRIWNKDFSEFSKGTPNLHTLYWKMLFDERNLADVVYKLNGQAEVFYRKASIKPENRIIHKANQPIANKNELNEKRTSTFEYDIIKDRRYTVDKFQFHVPITINFKAAGQTNINPIVQDVIRQGGFSHIIGIDRGERHLLYLSLIDLKGNIIKQMTLNEIINEYKGQTYKTNYHTLLAKREGDRTDARRSWETIETIKELKEGYLSQVVHIISKMMVEYNAIVVLEDLNPGFMRGRQKIERQVYEKFEKMLIEKLNCYIDKHADPSENAGLLHPLQLTSDIQKWKRSHQCGCLFYIPAWNTSKIDPVTGFVNLLDTRYDTREKARVFFSKFQRISFNAQKGWFEFAFDYNDFTTKAEGTRTQWTLCTQGERIRTFRNPQKNNQWDDERIVLTDAYKQLFDKYNIDINGNIKEAISAQTDAQFFKELLGLMKLLLQMRNSITNSEEDYLLSPVADNTGHFFDSREGIYSLPIDADANGAYNIARKGLWVIRKIQETPNGEKTSLSITNKEWLQFAQTKPYLND

SEQ ID NO: 205 - protein, 1249 aa, Unknown
  Description of Unknown: uncultivated organism sequence
  Category: MG28 effectors
  Description: MG28-65 effector
MKEFTNLYPVSKTLRFELQPIGKTKENIEKNGILQRDEKRAEDYKIVKGFIDEYHKQFIKERLWSFKLPLNCEGHLNSLEEYQALYELPKRNDAQEAEFTEIKDNLRSIIAKRLTESGSAYERIFKKELIREDLIDFLENNEDKDIVRQFADFTTYFSGFHENRRNMYVAEEKSTAIAYRLIHQNLPKFMDNMKAFAKIADTPVAEHFADIYDGWKEYLNVGSIDEIFRLDYFTETLTQPHIEVYNYIIGKKILEDGTEIKGINEYVNLYNQQQKDKSKRLPFLVPLYKQILSDREKLSWLGEEFDSDEKMLAAINESYTHLHDLLMGDENESLRALLLHIKEFDLTKINITNDLSLTDISQHLFGRYDVFTNGIKDELRNITPRKRKESDEELEDRISKIFKTQKSFSIDFLDKLPQPVIDDGKPRSIEDYFMTLGAVNTETTQKENLFAQIENAYEDARTILQLTDTGDTLSQNKSAVAKIKALLDALKDLQHFIKPLLGSGEENEKDELFFGSFQMMWDELDTVTPLYNKVRNWLTRKPFSTEKIKLNFDNSQLLGGWDVNKEPDCTGVILRKEGFYYLGIMDKKSNHIFEADITPSVGECYDKIDYKLLPGANKMLPKVFFSKSRIDEFAPSEAIISSYKRGTHKKGADFNLAECHRLIDFFKQSINKHEDWSKFNFHFSDTKSYEDISGFYREVEQQGYMLSSHPVSSSYINQLVDEGKLYLFRIWSKDFSEFSKGTPNLHTLYWKMLFDERNLADVVYKLNGQAEVFYRKASIKPENRIIHKANHSIANKNELNSKRTSTFEYDIIKDRRYTVDKFQFHVPITINFKAAGQTNINPIVQDVIRQGGFSHIIGIDRGERHLLYLSLIDLKGNIIKQMTLNEIINEYKGQTYKTNYHDLLAKREGDRTDARRSWETIETIKELKEGYLSQVVHVISKMMVEYNAIVVLEDLNTGFMRGRQKIERQVYEKFEKMLIEKLNCYIDKHAAPSENTGLLHPLQLTCDAQKWKRSHQCGCLFYIPAWNTSKIDPVTGFTNLLDTRYDTREKARVFFSKFQRISYNAEKGWFEFALDYNDFTAKAEGTRTQWTLCTYGERIRTFRNPKKNHQWDDERIVLTDAFKQLFDTYDIDINGNLKETISAQTDAQFFKELLGLMKLLLQMRNSITNSEEDFLLSPVADDAGHFFDSREGNSSLPIDADANGAYNIARKGLWVIRKIQETANEEKPSLSITNKEWLHFAQTKPYLKD

SEQ ID NO: 206 - protein, 1247 aa, Unknown
  Description of Unknown: uncultivated organism sequence
  Category: MG28 effectors
  Description: MG28-66 effector
MKEFTNLYPVSKTLRFELQPIGKTKENIEKNGILQRDEKRAEDYKIVKGFIDEYHKQFIKDRLWSFKLPLNCEGHLNSLEEYQALYELPKRNDAQEAEFTEIKDNLRSIIAKRLTESGSAYERIFKKELIREDLIDFLENNEDKDIVRQFADFTTYFSGFHENRRNMYVAEEKSTAIAYRLIHQNLPKFMDNMKAFAKIADTPVAEHFADIYDGWKEYLNVGSIDEIFRLDYFTETLTQPHIEVYNYIIGKKILEDGTEIKGINEYVNLYNQQQKDKSKRLPFLVPLYKQILSDREKLSWLGEEFDSDEKMLAAINESYIHLHDLLMGDENESLRALLLHIKDFDLAKINITNDLSLTDISQHLFGRYDVFTNGIKDKLRDITPRKKKDSDEDFEDRISKIFKTQKSFSIDFLDKLPQPVMDDGKPRSIEDYFMTLGAVNTETTQKVNLFAQIENAYEDARTILQLTDTGDTLSQNKSAVAKIKALLDALKDLQHFIKPLLGSGEENEKDELFYGSFQMMWDELDTVTPLYNKVRNWLTRKPFSTEKIKLNFDNSQLLGGWDVNKEPDCTGVILRKEGFYYLGIMDKKSNHIFEADITPSVGECYDKIDYKLLPGANKMLPKVFFSKSRIDEFAPSEAIISSYKRGTHKKGADFNLAECHRLIDFFKQSINKHEDWSKFNFHFSDTKSYEDISGFYREVEQQGYMLSSHPVSSSYINQLVDEGKLYLFRIWSKDFSEFSKGTPNLHTLYWKMLFDERNLADVVYKLNGQAEVFYRKASIKPENRIIHKANHSIANKNELNSKRTSTFEYDIIKDRRYTVDKFQFHVPITINFKAAGQTNINPIVQDVIRQGGFSHIIGIDRGERHLLYLSLIDQKGNIIKQMTLNEIINEYKGQTYKTNYHDLLAKREGDRTDARRSWETIETIKELKEGYLSQVVHVISKMMVEYNAIVVLEDLNTGFMRGRQKIERQVYEKFEKMLIEKLNCYIDKHAAPSENTGLLHPLQLTCDAQKWKRSHQCGCLFYIPAWNTSKIDPVTGFTNLLDTRYDTREKARVFFSKFQRISYNAEKGWFEFALDYNDFTAKAEGTRTQWTLCTYGERIRTFRNPKKNHQWDDERIVLTDAFKQLFDTYAIDINGNLKETISAQTDAQFFKELLGLMKLLLQMRNSITNSEEDFLLSPVADDAGHFFDSREGNSSLPIDADANGAYNIARKGLWVIRKIQETANEEKPSMSITNKEWLQFAQTKPYL

SEQ ID NO: 207 - protein, 1201 aa, Unknown
  Description of Unknown: uncultivated organism sequence
  Category: MG28 effectors
  Description: MG28-67 effector
MEEALRDFVFQMDDEGKNNSLSEYFFLYSLGKRTEAQDNDFKDVKKNLREQIAKYFKASPKYKNLFKQELIKEDLCNNMQCNEEEQKLVEEFHNFTTYFTGFHENRKNMYSDEEKSTAIAFRLVHQNLPKFIDNIGVFDRVRNIDEIKAGIENLQKHFETEGLFKQGEKIEDFFTLDYYSRLAVQSRIEIYNAILGGKTTEKGEKIQGLNELINLYNQQHKETHLPKMKALFKQILSDRQAVSWIEESFKSDNEVLSSVNDFYENLKQNEIFERTKELLTSVGSYDLSKVYITNDQQLTSISQQLYGSWAVIENAILAEMQNETPRKKKEDAEKYNERLKKAYSNRSSFSIAYIDQCLEAVFGENRIPVEQHFANIGKAEIETEAECGKIKIPDVFTQIEQTYSAAKTLLCNPYPKGKHLSQSDEDIEKVKNLLDALKRFQHFIKPLTGSGDEAEKDEMFYSDLTELWAEIDQLNSLYNRVRNHLTGKPYSEEKLKLNFENASLLTGWDKNMERANTAVILRKGKLYYLAIMKKEHNSIFASDNLPDKGECYEKMVYKQIALPLGFGGFARKCFGSATKLGWTYPTNLLNKEGKIIIKDEEAKDVLPELIDCYKDFLNIYEKDGFKYSSYNFKFKPSNQYEKLSQFFAEIQQQGYKITFQNISSDYIDQLVNEGKLYLFQIYNKDFSPSSKGTPNMHTLYWQMLFDERNLNDGVYQLNGQAEVFFRKKSLNYTKPTHPANQAIANKNPFSKKDKSEFTYDLIKDKRFTMDKFLFHVPITINFKSSKTYDIDAKVRQWLQKADDVHIIGIDRGERHLLYLTVIDCKGNIKEQMSLNTIENEYNGNTYAFDYHKRLDEKEKERDAAKKSWKTVENIKELKEGYLSQAIHKITQLMLKYNAIIVLEDLNMGFMRGRQKVEKQVYQKFEKMLIDKLNYLADKKKDPSEMGGVLNAYQLTSKFESFTKLGRQSGFLFYIPAWNTSKIDPVTGFVNLFDTKYKSIDETKKFFDKFKSISYNKNKDWFEFSFDYNDFTSKAEGTKTQWTVCTNGERIENFRNGETSNQWSGRTINLSQELKTLFDGYGIDFTKDLQNSICSQSEKGFFEQLLRLFKLTVQMRNSISNTEIDYLISPVCDKKGVFYDSREDRKDLPNNADANGAYNIARKGLMILNHIKQSSDPSKKQEYNLTNKAWLNFVQKGSVEGK

SEQ ID NO: 208 - protein, 1248 aa, Unknown
  Description of Unknown: uncultivated organism sequence
  Category: MG28 effectors
  Description: MG28-68 effector
MNNLKQFTGLYPVNKTLRFELKPVGKTKENIENKGILERDSQRTVDYKVVKGFIDEYHKQFIKDRLWSFKLPLFSEGRLDSLEEYMALYELSKRDEAQEAEFSEVKDNLRSIIAKRLTESGSAYERIFKKELIREDLIAFLEKDEEKEIVRQFADFTTYFDDFHKNRKNMYSAEEKSTAIAYRLIHQNLPKFMDNMKAFAKIAETSVTEHFADIYEGWKEYLNVGSIEEVFRLDYFSETLTQTHIEVYNYIIGKKPLDDGTEINGINVYVNLYNQQQKDKSQRLPLLVPLYKQILSDREKLWQVEEFDSDEKMLAAINESYEHLHDLLMGNENESLRSLLIHMKDFNLAQINITNELSLTDISQHLFSRYDVFTNGIKDKLRIITPRKKKESDEDFEDRISKIFKTQKSFSIDFLDKLPQPVMEDGKPRSVEDYYMSLGAVNTETTQKENLFAQIENAYEDVRPILQMKDTGDALSQNKPAVAKIKSLLDALKDLQHFIKPLLGSGEENEKDELFYGSFQMMWDELDTVTPLYNKVRNWLTRKPYSTEKIKLNFDNSQLLGGWDVNKEQDYTGVLLRKDGFYYLGIMDKKSNRIFEADGTPTDGECYEKMVYKQLGQISRQLPRIAFSKSWQQKITIPDDVIRIKKTESFKKNNEDLQKLISYYKSFISKHEEWNSYFNISFSNRNNYKNLPDFYSEVDTQFYNLSISKVSSSYINQLVDEGKLYLFRIWNKDFSEFSKGTPNLHTLYWKMLFDERNLADVVYKLNGQAEVFYRKASIKPENRVVHQANKPIDNKNGLNKKRTSTFEYDIIKDKRYTVDKFQFHVPITINFKATGQNNINPVVQETIRQGGFSHIIGIDRGERHLLYLSLIDLKGNIVKQMTLNDIVNEYKGQTYKTNYHDLLAKREGERTDARRSWETIETIKELKEGYLSQVVHIISKMMVEYNAIVVLEDLNTGFMRGRQKIERQVYEKFEKMLIEKLNCYIDKLADPTENTGLLHPLQLTCDTQKWKRSHQCGCLFYIPAWNTSKIDPVTGFVNLLDTRYDTREKARAFFSKFQRISFNSEKGWFEFVFDYNDFTTKAEGTRTQWTLCTYGERIRTFRNPQKNHQWDDERIMLTDAFTQLFDKYDIDINGNLKETISAQSDAQFFKDLLSLMKLLLQMRNSITNSEEDYLLSPVSDESGHFFDSREGISCLPIDADANGAYNIARKGLWVIRKIQETPDGEKPSLTITNKEWLQFAQTKPYLKE

SEQ ID NO: 209 - protein, 1166 aa, Unknown
  Description of Unknown: uncultivated organism sequence
  Category: MG28 effectors
  Description: MG28-69 effector
MKYVALAENAKRDEDAFDEVKTQLRKEIVGAFSKNKTYGDLFGEKLIKQHLPNFVTDENEKRLVASFNEFTTYFEKFHKCRENMYSDEAKSTAIAHRLIHENLPMFYDNMKSFKKIAACEDCIDFTEFEAAFSEEFKEFKVEHLADIFQLEYFNNTLTQRKIDFYKLVIGGKVLEDGTKLKGVNEYVNLYNQQHKDARLPLLKPLYKMILSDKVALSWLPEEFKSDEEMVEAIQEMHKNLKGALTDNAENNLRDLLLNMDKYDLAHIYIANDLGLTDISQNIFGQYDVYTSAIKQALRNEYAPIPKERRNPELYDERINKLFKLRTSFSIAELNSLADSDHTIENHFKQLGAAERNGKQEIDLFSQIETAYAKASDILSGKHGNIGQSEAETALVKNLLDAYKSLQHFIKPLLGHGDEAEKDNEFDAKLRAAWDALDIINPLYNKVRNWLTRKPYSTEKIKLNFENAQLLNGWDKNKETDCTSVLLRKDGMYYLAIMNKKANHAFACDELPADGDCYEKIDYKQIALPMGLGAFVRKCGKTAEKLGWSCPEKLKNKDKKIITNDAEAEGVLPDLIDCYKAFLNTYEKDGFKYKDFNFKFKPSSEYSSLVEFFAEVPSQGYKIAFRKVSVAYINQLVESGKLYLFQIWNKNFSKFSKGTPNMHTLYWKQLFDERNLADIVYKLNGQAEVFYRKRSLKLEETTVHQAHQPIPNKNKQNEKRQSQFNYDIVKNRRFTVDKFQFHVPITLNFKATGRGNINDKVLEIIRNNGIKHVIGIDRGERHLLYLSLIDLKGNIIKQMTLNDIVNEYRGHTYATNYKDLLAEREDNRTEARRNWKKIDNIKEIKQGYLAQVVHIISKMMVEYKAIVILEDLNMGFMRGRQKIERSVYEQFEKSLIEKLNYYVDKQKDEEEVGGLLHALQLTSKFKSFKELGKQSGCLFYVPAWNTSKIDPVTGFVNLFDTKYVNVEKARAFFSNFDAIRYNAEKDWFEFAFNYSNFTDKAKDTREKWTLCTHGTSIRTFRNPSKLNQWDSEEVVLTDEFKKVFEKAGIDICGNLKNAICALKEKAHLEKLMQLMKLLLQMRNSKPNTEVDYMISPVADEQGNFYDSRCGNSALPDNADANGAYNIARKGLWVIRQIRETPAGKRPKLAIKNKEWLKFAQQKPYLDD

SEQ ID NO: 210 - protein, 1228 aa, Unknown
  Description of Unknown: uncultivated organism sequence
  Category: MG28 effectors
  Description: MG28-70 effector
MRQKYDGFESCYGISKVIRTGLIPQGATLEHIEKKGLLLSEEKRAEDYTKVKKIIDRYHRKYIDNQLKDAELSGVEESYSLYCKTNRTEKENTDLKKFLEKLRKQVSNFLTSSDEFKRIDKKELIEKDLLNFVQGDEEEEELVKSFKGFTTYFKGFHENRKNMYSHEEKSTAIAYRVINQNMFRYFDNIRSISKFILANSENNIAELESIYSDKLKGKTLEEFFSVDNYSFFISQSGIDTYNMIIGGYSVDERTKVKGINEYINLFNQENHEKFGTLKPLYKQILAERTTESFLPEKFENDKEVIESLAAFSHNMSDTLLEIMEVFGKIGEYDASGIYLKYDSLKDISTCVFSDWSAITNALWERYDVQYIGKKKKETKAYIEEKRKHFKNLKSVSADEINTAMGENVLIPYSDAAKSLFEKICVAEENIRELINLDYPDDKELSKDKAAVKDIKAYLDSVKALQHHMKPLLGNQDESGKNEFFYGDFSGLWDELDALTPLYNKVRNYVTKKPYSTEKIKLNFDNSTLLNGWDLNKEEANTAILMQREGFLYLGIMDKKHNKIFRNIENTGCEDCYQKMEYKLLPGANKMLPKVFFSKKGIESFKPPLEILEIYKNETFKKGEAFNIDDCHTIIDFYKKALNEHEDWKKFEFKFSKTKDYRDISEFYREVEAQGYKISFKAIPKKIIDEYVEKGWLYLFKIWNKDFSEYSKGTPNLHTLYLKMLFDPRNLENVVYKLNGEAEIFYRKASIQPKDIIKHPANEAIKNKNPLNKKQSSIFKYDLIKDRRYTVDKFEFHVPITLNFKARGKENINTEVREYIKRSKNLYVIGVDRGERNLLYVSVVDADGSIVEQYSLNDIVNEYKGVQYRTDYHALLDTKEKNRDKARKEWTEIQNIKELKEGYISQVVHKICELMMKYEAIIALEDLNGGFKNSRKKVEKQVYQKFEKMLIEKLNYLVDKKADVNEPSGLLHALQLTSKFEGFNKLFGQSGFVFYVPAWNTSNIDPCTGFTNLFFSKDLRYASVENSLEFWKKFDSVAYDDTKDIFSFTFDYNNFNQRAEEIKSKSKWTVYSYGDRLETFRNADLNQQYDSREVKLTEAFKELFKKYEIPHENCEIKENILNCKERDFHDKLLHLFKLTLQLRNSKTGTMIDYMTSPVMDIDGNFFDSRTASSSLPQDADANGAYNIARKGLWLIEKLKNTKDADLPKAKLAIKNAEWLAYAQRNENNG

SEQ ID NO: 211 - protein, 1008 aa, Unknown
  Description of Unknown: uncultivated organism sequence
  Category: MG28 effectors
  Description: MG28-71 effector
MNTYEELTGSVYLTKTISLALNPIGETLRHIEEKGFIAQDEQRAEDYKKVKDIIDRYHKYFITMCLDGFKFSTDKLMKYVALAENAKRDEDAFDEVKTQLRKEIVAAFEKGETYKDLFKKELILEHLPNFVTDENEKRLVASFNKFTTYFTGFHENRENMYSDEAKSTAIAHRLIHENLPMFYDNMKSFKKIAACEDCIDFAEFEAAFSEEFKEFKVEHLTDIFQLEYFNNTLTQRKIDFYKLVIGGKVLEDGTKLKGVNEYVNLYNQQHKDARLPLLKPLYKMILSDKVALSWLPEEFKSDEEMVEAIQEMHKNLKGALTDNAENNLRDLLLNMDKYDLAHIYIANDLGLTDISQNIFGQYDVYTSALKQALRNEYAPIPKERRNPELYDERINKLFKSRTSFSIAELNSLADCDHTIENHFKQLGAAERNGKQEIDLFSQIETAYAKASDILSGKHGNIGQSEAETALVKNLLDAYKSLQHFIKPLLGHGDEAEKDNEFDAKLRAAWDALDIINPLYNKVRNWLTRKPYSTEKIKLNFENAQLLNGWDKNKETDCTSVLLRKDGMYYLAIMNKKANHAFACDELPADGDCYEKIDYKQIALPMGLGAFVRKCGKTAEKLGWSCPERLKNKDKKIITNDAEAEGVLPDLIDCYKAFLNTYEKDGFKYKDFNFKFKPSSEYSSLVEFFAEVPSQGYKIAFRKVSVAYINQLVESGKLYLFQIWNKDFSKFSKGTPNMHTLYWKQLFDERNLADVVYKLNGQAEVFYRKRSLKLEETTVHQAHQPIPNKNKQNEKRQSQFNYDIVKNRRFTVDKFQFHVPITLNFKATGRGNINDKVLEIIRNNGIKHVIGIDRGERHLLYLSLIDLKGNIIKQMTLNDIVNEYRGHTYATNYKDLLAEREDNRTEARRNWKKIDNIKEIKQGYLAQVVHIISKMMVEYKAIVILEDLNMGFMRGRQKIERSVYEQFEKSLIEKLNYYVDKQKDEEEVGGLLHALQLTSKFKSFKELGK

SEQ ID NO: 212 - protein, 1242 aa, Unknown
  Description of Unknown: uncultivated organism sequence
  Category: MG28 effectors
  Description: MG28-72 effector
MNTYEELTGLYSFKKTISLALNPIGETLRHIEEKGFIAQDEQRAEDYKKVKDIIDRYHKYFITMCLDGFKFSTDKLMKYVALAENAKRDEDAFDEVKTQLRKEIVGAFSKNKTYGDLFGEKLIKQHLPNFVTDENEKRLVASFNEFTTYFEKFHKCRENMYSDEAKSTAIAHRLIHENLPMFYDNMKSFKKIAACEDCIDFTEFEAAFSEEFKEFKVEHLADIFQLEYFNNTLTQRKIDFYKLVIGGKVLEDGTKLKGVNEYVNLYNQQHKDARLPLLKPLYKMILSDKVALSWLPEEFKSDEEMVEAIQEMHKNLKGALTDNAENNLRDLLLNMDKYDLAHIYIANDLGLTDISQNIFGQYDVYTSAIKQALRNEYAPIPKERRNPELYDERINKLFKSRTSFSIAELNSLADSDHTIENHFKQLGAAERNGKQEIDLFSQIETAYAKASDILSGKHGNIGQSEAETALVKNLLDAYKSLQHFIKPLLGHGDEAEKDNEFDAKLRAAWDALDIINPLYNKVRNWLTRKPYSTEKIKLNFENAQLLNGWDKNKETDCTSVLLRKDGMYYLAIMNKKANHAFACDELPADGDCYEKIDYKQIALPMGLGAFVRKCGKTAEKLGWSCPERLKNKDKKIITNDAEAEGVLPDLIDCYKAFLNTYEKDGFKYKDFNFKFKPSSEYSSLVEFFAEVPSQGYKIAFRKVSVAYINQLVESGKLYLFQIWNKDFSKFSKGTPNMHTLYWKQLFDERNLADVVYKLNGQAEVFYRKRSLKLEETTVHQAHQPIPNKNKQNEKRQSQFNYDIVKNRRFTVDKFQFHVPITLNFKATGRGNINDKVLEIIRNNGIKHVIGIDRGERHLLYLSLIDLKGNIIKQMTLNDIVNEYRGHTYATNYKDLLAEREDNRTEARRNWKKIDNIKEIKQGYLAQVVHIISKMMVEYKAIVILEDLNMGFMRGRQKIERSVYEQFEKSLIEKLNYYVDKQKDEEEVGGLLHVLQLTSKFKSFKELGKQSGCLFYVPAWNTSKIDPVTGFVNLFDTKSVKGEKVRAFFSNFDAIRYNAEKDWFEFAFNYSNFTDKAKDTREKWTLCTHGTSIRTFRNPSKLNQWDSEEVVLTDEFKKVFEKAGIDICGNLKNAICALKEKAHLEKLMQLMKLLLQMRNSKPNTEVDYMISPVADEQGNFYDSRCGNSALPDNADANGAYNIARKGLWVIKQIRETPAGKRPKLAIKNKEWLKFAQQKPYLDD

SEQ ID NO: 213 - protein, 1262 aa, Unknown
  Description of Unknown: uncultivated organism sequence
  Category: MG28 effectors
  Description: MG28-73 effector
MSNFNEFTHLYQLSKTLRFELKPIGETLKHFNESGILDQDEHRAESYKKVKKLIDRYHKEFMEEALRDFVFQMDDEGKNNSLSEYFFLYSLGKRTEAQDNDFKDVKKNLREQIAKYFKASPKYKNLFKQELIKEDLCNNMQCNEEEQKLVEEFHNFTTYFTGFHENRKNMYSDEEKSTAIAFRLVHQNLPKFIDNIGVFDRVRNIDEIKAGIENLQKHFETEGLFKQGEKIEDFFTLDYYSRLAVQSRIEIYNAILGGKTTEKGEKIQGLNELINLYNQQHKETHLPKMKALFKQILSDRQAVSWIEESFKSDNEVLSSVNDFYENLKQNEIFERTKELLTSVGSYDLSKVYITNDQQLTSISQQLYGSWAVIENAILAEMQNETPRKKKEDAEKYNERLKKAYSNRSSFSIAYIDQCLEAVFGENRIPVEQHFANLGKAEIETEAECRKIKIPDVFTQIEQTYSAAKTLLYNPYPKGKHLSQSDEDIEKVKNLLDALKRFQHFIKPLTGSGDEAEKDEMFYSDLTELWAEIDQLNSLYNRVRNHLTGKPYSEEKLKLNFENTSLLTGWDKNMERANTAVILRKGKLYYLAIMKKEHNSIFASDNLPDKGECYEKMVYKQIALPLGFGGFARKCFGSATKLGWTYPTNLLNKEGKIIIKDEEAKDVLPELIDCYKDFLNIYEKDGFKYSSYNFKFKPSNQYEKLSQFFAEIQQQGYKITFQNISSDYIDQLVNDGKLYLFQIYNKDFSPSSKGTPNMHTLYWQMLFDERNLNDGVYQLNGQAEVFFRKKSLNYTKPTHPANQAIANKNPFKKKDKSEFTYDLIKDKRFTMDKFLFHVPITINFKSSKTYDIDAKVRQWLQKADDVHIIGIDRGERHLLYLTVIDCKGNIKEQMSLNTIENEYNGNTYAFDYHKRLDEKEKERDAAKKSWKTVENIKELKEGYLSQAIHKITQLMLKYNAIIVLEDLNMGFMRGRQKVEKQVYQKFEKMLIDKLNYLADKKKDPSEMGGVLNAYQLTSKFESFTKLGRQSGFLFYIPAWNTSKIDPVTGFVNLFDTQYKSDDKAKMFFSKFKSISYNKDKNWFEFSFDYNDFTNKAEGTKTQWTVCTNGERIENFRSGQKPNQWGGRTINLSQKFKSLFDEYGIDFTKDLQNAICSQSKKGFFKQLLYLFKLTVQMRNSNTETDYLISPVCDRNGNFYDNGNNNYDNDLPENADANGAYNIARKGLMILNHIKQSSDPSKKQEYNLTNKAWLNFVQKGSVEGK

SEQ ID NO: 214 - protein, 1250 aa, Unknown
  Description of Unknown: uncultivated organism sequence
  Category: MG28 effectors
  Description: MG28-74 effector
MNTFNEFTNLYSLSKTLRFELQPIGKTKENIEKNGILSRDEKRAEDYQMVKGIIDEYHKQFITDRLWSFKLPLESEGRNDSLEEYHTLYEMSKRDERQEAAFTEVKDNLRGIIAKRLTEKGSAYERIFKKELIREDLIDFLKNEEKKELVRQFADFTTYFTGFHENRKNMYSAEEKSTAIAYRLIHQNLPKFMENMKAFAKIAETSVSEHFADIYEGWKEYLNVRSLEEIFRLDYFSETLTQPHIEVYNYIIGKKVLEDGTEIKGINEYVNLYNQKHKDKIPLLVPLYKQILSDREKLSWLAEEFDSDEKLLVAINETYNQLYNFLMGMENESLRSLLTHIKDFDLNHINITNDLSLTDISHQLFGRYDVFTSGIKDKLREKTRRKKGESDEDFEDRVSKIFKTHKSFSIAYLNKLPQPDMEDGKRRRVEEYFMELGAVNTETTQKENLFAQIENAYEDAKAVLQMKDTGDTLSQNKSAVAKIKNLLDVIKDLQHFIKPLLGSGEENEKDELFYGSFQMMWEELDAVTPLYNKVRNWLTRKPYSTEKIKLNFDNSQLLGGWDVNKEPDCTGVLLRKDEFYYLGIMDKKSNRIFDAEVTPSDGKCYEKIDYKLLPGANKMLPKVFFSKSRIDEFAPSEAIVSSYKRGTHKKGADFSLSDCHRLIDFFKQSINKHEDWSKFGFRFSDTKSYEDISGFYREVEQQGYMLSSHQVSESYIHQLVDEGKLYLFRIWNKDFSEFSKGTPNLHTLYWKMLFDERNLADVVYKLNGQAEVFYRKASIKPENRIVHLAKHPIANKNEFNKEPTSTFEYDIIKDRRYTVDKFQFHVPITINFKAAGQTNINPIVQDTIRKGNFSHIIGIDRGERHLLYLSLIDLRGNIVKQMTLNDIINEYKGTTYKTNYHDLLAKREGERTEARRSWDTIENIKELKEGYLSQVIHIISKMMVEYNAIVVLEDLNMGFMRGRQKIERQVYEKFEKMLIDKLNCYIDKQKEPMAEGGMLRALQLTNKFESFRKLGKQCGCLFYIPAWNTSKIDPVTGFVNLFDTRYENMAKAKVFFSKFKSIRYNSIKDWFEFSLDYNDFTTKAESTRTEWTLCTYGERIRTFRNPQKNHQWDDEELVLTAEFKQLFDRYGIDIQSNLKEAINAQTDAQFFKEMLGLMKLLLQMRNSITNSDTDYLLSPVADENGHFFDSREDITVLPDNADANGAYNIARKGLWVIRKIQETAEDEKPSLAITNKEWLQFAQTKPYLDD

SEQ ID NO: 215 - protein, 1280 aa, Unknown
  Description of Unknown: uncultivated organism sequence
  Category: MG29 active effectors
  Description: MG29-1 effector
MFNNFIKKYSLQKTLRFELKPVGETADYIEDFKSEYLKDTVLKDEQRAKDYQEIKTLIDDYHREYIEECLREPVDKKTGEILDFTQDLEDAFSYYQKLKENPTENRVGWEKEQESLRKKLVTSFVGNDGLFKKEFITRDLPEWLQKKGLWGEYKDTVENFKKFTTYFSGFHENRKNMYTAEAQSTAIANRLMNDNLPKFFNNYLAYQTIKEKHPDLVFRLDDALLQAAGVEHLDEAFQPRYFSRLFAQSGITAFNELIGGRTTENGEKIQGLNEQINLYRQQNPEKAKGFPRFMPLFKQILSDRETHSFLPDAFENDKELLQALRDYVDAATSEEGMISQLNKAMNQFVTADLKRVYIKSAALTSLSQELFHFFGVISDAIAWYAEKRLSPKKAQESFLKQEVYAIEELNQAVVGYIDQLEDQSELQQLLVDLPDPQKPVSSFILTHWQKSQEPLQAVIAKVEPLFELEELSKNKRAPKHDKDQGGEGFQQVDAIKNMLDAFMEVSHAIKPLYLVKGRKAIDMPDVDTGFYADFAEAYSAYEQVTVSLYNKTRNHLSKKPFSKDKIKINFDAPTLLNGWDLNKESDNKSIILRKDGNFYLAIMHPKHTKVFDCYSASEAAGKCYEKMNYKLLSGANKMLPKVFFSKKGIETFSPPQEILDLYKNNEHKKGATFKLESCHKLIDFFKRNIPKYKVHPTDNFGWDVFGFHFSPTSSYGDLSGFYREVEAQGYKLWFSDVSEAYINKCVEEGKLFLFQIYNKDFSPNSTGKPNLHTLYWKGLFEPENLKDVVLKLNGEAEIFYRKHSIKHEDKTIHRAKDPIANKNADNPKKQSVFDYDIIKDKRYTQDKFFFHVPISLNFKSQGVVRFNDKINGLLAAQDDVHVIGIDRGERHLLYYTVVNGKGEVVEQGSLNQVATDQGYVVDYQQKLHAKEKERDQARKNWSTIENIKELKAGYLSQVVHKLAQLIVKHNAIVCLEDLNFGFKRGRFKVEKQVYQKFEKALIDKLNYLVFKERGATQAGGYLNAYQLAAPFESFEKLGKQTGILYYVRSDYTSKIDPATGFVDFLKPKYESMAKSKVFFESFERIQWNQAKGYFEFEFDYKKMCPSRKFGDYRTRWVVCTFGDTRYQNRRNKSSGQWETETIDVTAQLKALFAAYGITYNQEDNIKDAIAAVKYTKFYKQLYWLLRLTLSLRHSVTGTDEDFILSPVADENGVFFDSRKATDKQPKDADANGAYHIALKGLWNLQQIRQHDWNVEKPKKLNLAMKNEEWFGFAQKKKFRA

SEQ ID NO: 216 - protein, 753 aa, Unknown
  Description of Unknown: uncultivated organism sequence
  Category: MG29 effectors
  Description: MG29-2 effector
DTGFYADFVEAYKNYEQITVSLYNKARNHLSKKPFSKDKIKINFDSPTLLNGWDLNKESDNKSVILRKGGNYYLAIMHPKHTKVFSDYSESEHDGATFEKVNYKLLSGANKMLPKVFFSKKGAETFSPPQEILDLYKNDEHKKGKTFKLESCHKLINFFKFNISKYKVHPNDQFGWDVFGFDFSPTSTYKDLSDFYREVEAQGYKLWFSDISENYVNKCVEEGKLFLFQIYNKDFSPYSKGSPNLHTLYWKGLFEPENLKDVVLKLNGEAEIFYRKHSMKRDESVVHPAHVAIKNKNDLNPKKESTFDYDIVKDRRYTQDKFFFHVPITLNFKSQGFAKFNDKINALLAEQDDVHVIGIDRGERHLLYYTVVNSEGKIIEQGSLNQMDTDQGYSVDYQQKLDAKEKERDNSRKTWSSVENIKELKAGYLSHVVHKLAKLVIKHNAVVCLEDLNFGFKRGRFKVEKQVYQKFEKALIDKLSYLVFKDKVATEAGGYLNAYQLAAPFESFEKLGKQTGILYYVRADYTSKIDPVTGFIDFLKPKYESLLKSKTFFETFESICFNVEKNYFEFSLDYKRFMPSRKFGDYQTTWTICTYGDTRYHNRRNKAGKWETETINVTAQLKDIFKVYGIGFEHEADIKEAIAAIKDTKFYKKLYWILRVTLSLRHSVTGTDEDFILSPVADEKGVFFDSRNEVVEYPKDADANGAYHIALKGLWNLQQIQQHDWDEEKPKKLNLAMKNEEWFGFAQQKKFRQ

SEQ ID NO: 217 - protein, 1287 aa, Unknown
  Description of Unknown: uncultivated organism sequence
  Category: MG29 effectors
  Description: MG29-3 effector
MDYSKFTKKYSISKTLRFELRPVGETAEYIEDFKSQYLRDVVAQDEKRAEEYLKIKELIDDYHRDYIEDKLSNPVNPDTGEYWFSDELFDTAYKEFIAFKKDTKNEKLRQIWMSRQELFRKMLVKAFVDKKDLFSKELITRDLPAWLSQKGIWEEHKATVESFSKFTTYFSGFHENRKNMYSDEDQSTAIAYRLMNENLPKFFNNCEAYRKNKEKYPSLDFGVLDLDDKFKPIYFRSLFTQSAIDEYAELLGGKTEESREKSIGLNEKINLYRQKSGLIRRDISEFTMLYKQILSDRESHSFIPDAFESDKEMFTSLAQYIEKANRLTSKLNKTLQKLQSANTDKIYLVSTELTNISQSMFSSYGMIESALKSDMEQNVYPAPKNGKVSSVLEAKRKKYMEEKVFSLAFLEEKLKPYLLETEQEEKSILSHLLEALKNAKLDNKLDEKVKTVLPLLKLEALDKKRIVPNSSNPNGSEGFLQVQNIQKMLDAFMSLSHALRPLHLVKGRKVIDMPDADAGFYADFSVQYEEYSQITISLYNKVRDYLTKKPYSKDKVKINFEVPTLLNGWAVNKETANASILFEKDGLYYMGIMHPKHKHLFEYSKNIDDMKNGKKSKVKDELYTKIQGGKNNSYRKIVYKLLPGANKMLPKVFFANSRLEFFSPSQDILDIRNRASDSKNGKAQKGYTKVDFSLSDCHKMIDFYKKSIDKHPEWREFEFDFSVTNSYKDLSGFYREVESQGYKIEFHDIKTKYIDQCIEEGKLFLFQIYNKDFSPHSKGSPNLHTMYWRGLFESENSKNVVLKLNGDAEMFYRKHSMKRKDTVVHRANETIDNKNKNNPKKTSTFAYDIVKDRRYTKDKFIFHVPITLNFKALNTFRFNDTINKELSKSIDTCVIGIDRGERHLLYYTVVDSKGNIIEQDTLNEISTDQGYKVNYQQKLHDKEQERDKARKSWGSVENIKELKDGYLSHVVHKLANLIIKHNAIVCLEDLNSGFKRGRFKVEKQVYQKFEKRLIDKLNYLVFKDAKEGEAGHYLNAYQLTAPFESFQKLGKQTGILFYVNADYTSKIDPATGFMDFLKPKYENLGKAKTFFESLESFIYNVEKDYFEFTFDYKKVTNKSLGSYKTVWTACTYGDVRYQNKKDEQGIWQTNSINVTQELKELCDDAQIEYKDGKELKDILALEKDTKFYKTLFWIMRLTLTLRHSRTGTDDDFILSPIANSNGEFFDSRKAPKTLPKDADANGAYNIALKGLWNLQKIREHDWEAEKPKNLNLYMKNEEWFSFIQSRV

SEQ ID NO: 218 - protein, 991 aa, Unknown
  Description of Unknown: uncultivated organism sequence
  Category: MG29 effectors
  Description: MG29-4 effector
MFEQFTKQFALQKTLRFELKPVGETADFLDDFKSQYLKDTVLKDEKRASDYQEIKELIDDYHREYIESCLHEPVDKKTGEILDFSVDLEEAWLYYQQLKDDPSKRGEWEKAQENLRKRLVTSFVDSGNLFKKEFITRDLPEWLKNKGLWEKHNDAVESFKGFTTYFTGFYDNRKNMYSSEAQSTAIANRLMNENLPRFFNNCVAFHTIQEKHPGFMLDVEDELLDCLGVQSLNDVFTPSFFVHLFSQSGITLFNELLGGKTRENGEKVQGLNEQINLYRQQHPDIARGFPRFTKLHKQILSDIESRSFIPDAFDDDKHLLESLEKYISEANKKLIPALQESMDKLSQADLSRVYLMGSSLTYLSQDIFHFFGTIPDAIRWHAENNISTKKEREHFIKQDVYALADLESIIISYVNQLDDSDEAHQLLNALPEPKRPVTSFIQQTLQQAIEAVSPLLSLDELSKNRRLPRDEKEKGGEGFQQTETIREMLDAFKVVSDAVKPLHLVKGRKPIDVPDVDTGFYADFAEAFEAYTQPTTALYNKARNHLTKKPFSKHKIKINFDAPTLLNGWDLNKESDNKSVILRKDGNYYLAIMHPKHTKVFANAPAVEERGEMYEKMNYKLLSGANKMLPKVFFSKKGIETFNPPQEILDLYKNNEHKKGSTFKLESCHRLIDFFKVNIPKYKVHPNDEFGWDVFGFNFSPTSSYKDLSGFYREVENQGYKVWFSDVSESYIQKCVEEGKLFLFQIYNKDFSPYSKGKPNLHTLYWKGLFEPANLKDVVLKLNGEAEIFYRKHSIKHGDKIIHRANEPIDNKNDSNPKKQSCFEYDITKDKRYTQDKFFFHVPISLNFKAQSPARFNDNINKMLSESEDICVIGIDRGERHLLYYTVVNSKGDIIEQGSLNHIETDQGYTVDYQQKLDAKEKQRDKARKTWSTIENIKELKAGYLSQVVHKLAQLIIKHNAIVCLEDLNFGFKRGRFKVEKQVYQKFEKAL

SEQ ID NO: 219 - protein, 1270 aa, Unknown
  Description of Unknown: uncultivated organism sequence
  Category: MG29 effectors
  Description: MG29-5 effector
MFETFTKHFSLSKTLRFELRPVFGGAEMKEDFESEFLRKTVERDERRAKEYKELKRVIDDYFRDYIDATLAIPNHPNGFMEADALKQAYECYRLFRSAKGNAYSKAKKEWNNIQKELRESVASLFKKSDYEVKGSFFKNVLMPHVEGDPKKTELIKSFDKFTTYFTGFNENRKNIFSKDDKATTIGYRLIHENLPKFFDNCILYERIRNKFDDLVLSSEDELTQALGVTGLDEIFRPEVFAHVLTQPHITAYNELLGGYVDDQKVKHQGLNEQINLYRQQKKLSNRQLPIFAPLFKQILAESQSQSFAPEPFENDKEMLTAINVFLYSVDKHIEQLEASVKELHADEIEHIYFKAQSLTQLSQELFGRYDVIQSALQGYTDHHRDLFRTKAQREKFLDKTDFYSLYDLERAILEYVESLDADHPDRNAISNDTPVQSHLKNKFKKLKQKIEEEKKTITPLLSKEKLSKDRKLPKGENAPGGEGYRQVQQIKELLESYKTLAQTLRDLYPAKGRKRVEVGSPNMAFYNAFEEPFVEYDNECMALYNKARNYLSKKPYKRDKIKLNFEAPTLLNGWDLNKERANRSVLLLKNGNYYLAIMHPNHTDIFKKYMEMDNSDNYEKINYKLISDANRMLPRVFFSKKGIKTYDPPKSILELYKKGEHIKGPSFKLESLHRLIDYFKSVVSKYKADPGDQYGWEVFDFKFSPTSQYEDIGQFYKELEKQAYRVWFTPISSTYIEEAAKHGKLFLFQIYNKDFSPYAKGRPNLHTLYWKSLFEKENLQDVITKLNGEAEIFFRHHSIKKADTVIHKAGETIKNKNENNPKQESTFKHDIIKDRRYTVDKILFHVPITINFKNDKPGNFNDTVNRLLAKHPDTHIIGIDRGERHLLYLTVIDSDGNIVEQRSLNTIPTDRDYEVDYRQKLDAKEKERDKARKEWSTIENIKELKSGYLSQVVHELAKLIIQHNAIVVLEDLNFGFKRGRFRVEKQVYQKFEKALIDKLNYLVFKDRQAKEPGGYLNGYQLTAPFESFQKLGKQSGILFYVPAAYTSKIDPATGFIDFLKPKYESVEKAKAFFANFDAIRYNKEEEYFEFVFDYKNFESKNALSGYKTDWTVCTYGKRLRNKRNDQGYWESVSVDVTDDLKRLFERYGILYHNGDNLISQILEYDEKQLFELLIFAMRTTLAMRYSRTGEEEDYILSPVKDCNGDFFDSRKADPSLPQDADANGAYHIALKGAMLLERMREHDFNGKSKLDLLIKNEQWFEYISERLWGE

SEQ ID NO: 220 - protein, 1008 aa, Unknown
  Description of Unknown: uncultivated organism sequence
  Category: MG29 effectors
  Description: MG29-6 effector
MFNHFTHKYSLSKTLRFELKPVGETADYLEDFKSQYLKDFIVKDQQRAEDYKIIKELIDDYHRQYIEEKLSAPVDPKTGELWLNPEYFEEAYSYYQKLKADQSDPKNRKQWEDTQTELRKKLVETFTNKADLFKKELITRDLPEFLKKKGQWEENKKVVEHFSRFTTYFSGFHENRKNMYTHEDHSTAIAYRLMNENLPRFFNNCLAYKHIKDKYNDLPLKINSELQSQLGVTNINDFFQPRYFINLFSQTGIDNYELLIGGKTEENGTKIQGLNEQINLYRQQLQHKMKDEAKADDKKSKRIYDLSGFTHLYKQILSDREKISFIPEAYEDDKQLLASLEEYIATVTDEKEGAIQKLEQSLQKLANADLSKVYIKGAGLTALSQNMFSAYGMITASLSYYADQKLSTKKKREDYLKQKVYSLDELNHHLIAYIDSKEKDDVLHEQLAKLPNPQQPISSYLISIIKQTQQDIELQATIDAVKPLLQLESLSKDRKAPELDNENDKGAVGFQQVQKIQKMLDGFMSVSHAVKLLHLVDGRKPIDMPDKDDSFYNGFAEVYKAYTDLTVTLYNKARNHLTTKLYSNDKIKINFDVPTLLNGWDANKESDNASILFEREGLYYLGIMHPKHKHLFNYTKGIDDIGNEKKTTAKDELYEKVAEKGDSGYRKIVYKLLPGVNKMLPKVFFSASRKDFFAPSEEVNRIRNTASHTKNGNPQKGHKKENFNLEDCHAIIDFFKVSLNKHPEWKDFNFSFSPTSSYEDLSGFYREVEHQGYRMDFQSIKESYIKDCVSEGKLFLFQIYNKDFSRYSKGKPNLHTLYWKGLFEPENLKDVVLKLNGEAEIFYRKHSIKREDRIIHKSGDTLDNKNTNNPKKTSKFEYDIVKDRRYTQDKFQFHVPITLNFKALGVNRFNDQINKELAQQKETCVIGIDRGERHLLYYTVVNSKGDIIEQDTLNTINTDKGYNVDYQQKLHTKEKEREKARKSWSSVENIKELKAGYLSHVVHKLAHL

SEQ ID NO: 221 - protein, 1324 aa, Unknown
  Description of Unknown: uncultivated organism sequence
  Category: MG29 effectors
  Description: MG29-7 effector
MLNKFTNQYSLSKTLRFELKPVGETAGYLDDFKSQHLKEFVATDKQRADDYLIIKELIDDYHRAYIEEKLSAPVDPKTGELFLNSQDFEDAYSYYQQLKVDSKDPKHRETWEKTQAELRKKLVKAFVGKADLFGEKLIKQHLPEQLKKEGRWKENKKAVENFNKFTTYFSGFHENRKNMYTDKDQSTAIAFRLMNENLPRFFNNCDKYKKLKEKYPELLFENNKDILAKLGVDSLNDVFTPSFFINLFTQTGIDNYQLLLGGKSEDTGEKLKGLNEQINLFRQQKQKEAREQAQKENKKAKKITDLTGFTGLYKQILSDRQSASFILDEFENDRELLTKLNEFITLATKPEGTLEKLENALNHLNEIDPQKVFIKTAGLTDISQTLFHSYQIITTALHEFAENNLKTKKERENYLKQKAFSLAELDERLVDYIQDLEDSDPLHQQLQALNDPLQPIKGYLQEAITRAQQETDERPNLEQTIKEVEPLLTLKELSKNRQAPKKEGDKGGKGFQQIQKIQKMLDAFMAVSHALKPLHLVDGRKPIDMPEMDSGFYGEFSEAYEEYNQSCITLYNKSRNHLTKKPFKTDKIKINFDSPTLLKGWDANKESDNASLLFEKDGLYYLGIMHPKHKRLFDYIIGIDDIGNENKTKAKTDLYNQITTNKSGYRKIVYKLLPGANKMLPKVFFSRSRIAFFAPSDEVQRIRNTASHSKNGKPQKGFKKADFNLKDCHTMIDFFKDSINKHPEWKQFGFKFSPTESYEDLSGFYREVEQQGYRIDFHTIKESYIDECIKQGKLFLFQIYNKDFSTYSKGKPNLHTLYWKGLFEAENLKDTVLKLNGEAEIFYRKHSIKPNDIITHRANETIENKSKNYDKKTSTFAYDIIKDKRYTQDKFQFHVPITLNFKAPKAPGVSHFNNQINKAVAKSKDTHIIGIDRGERHLLYYTVINQKGEIIEQDTLNKIKAHKDYEVDYQQKLHDKETERQKARRSWSSVENIKELKAGYLSHVVHKLAVLIKEHNAIVCLEDLNFGFKRGRFKVEKQVYQKFEKTLIDKLNYLVFKDAEENEAGHYLKAYQLTAPFESFEKMGKQSGILYYVQAAYTSKIDPATGFINFLYTRYQSLSRSKEFFESFDFIRYNQAQDYFEFSFDYKNFPIRQNLKNYQTRWLACTYGDERYANKRNKQNQWESEIVNVTQELKTLFNKASIDFQNGKDLKDAIAQTKDTKFYKKLYWLLGLTLSLRHSKTGTEIDFILSPIQGKDGKFFDSREASNKHPKDADANGAYNIALKGLWNLQQIKQHDWNTEKPKKLNLNMKNEDWFGFIAERASL

SEQ ID NO: 222 - protein, 1324 aa, Unknown
  Description of Unknown: uncultivated organism sequence
  Category: MG29 effectors
  Description: MG29-8 effector
MLNKFTNQYSLSKTLRFELKPVGETAGYLDDFKSQHLKEFVATDKQRADDYLIIKELIDDYHRAYIEEKLSAPVDPKTGELFLNSQDFEDAYSYYQQLKVDSKDPKHRETWEKTQAELRKKLVKAFVGKADLFGEKLIKQHLPEQLKKEGRWKENKKAVENFNKFTTYFSGFHENRKNMYTDKDQSTAIAFRLMNENLPRFFNNCDKYKKLKEKYPELLFENNKDILAKLGVDSLNDVFTPSFFINLFTQTGIDNYQLLLGGKSEDTGEKLKGLNEQINLFRQQKQKEAREQAQKENKKAKKITDLTGFTGLYKQILSDRQSASFILDEFENDRELLTKLNEFITLATKPEGTLEKLENALNHLNEIDPQKVFIKTAGLTDISQTLFHSYQIITTALHEFTENNLETKKERENYLKQKAFSLAELDERLVDYIQDLEDSDPLHQQLQALNDPLQPIKGYLQEAITRAQQETDERPNLEQTIKEVEPLLTLKELSKNRQAPKKEGDKGGKGFQQIQKIQKMLDAFMAVSHALKPLHLVDGRKPIDMPEMDSGFYGEFSEAYEEYNQSCITLYNKSRNHLTKKPFKTDKIKINFDSPTLLKGWDANKESDNASLLFEKDGLYYLGIMHPKHKRLFDYIIGIDDIGNENKTKAKTDLYNQITTNKSGYRKIVYKLLPGANKMLPKVFFSRSRIAFFAPSDEVQRIRNTASHSKNGKPQKGFKKADFNLKDCHTMIDFFKDSINKHPEWKQFGFKFSPTESYEDLSGFYREVEQQGYRIDFHTIKESYIDECIKQGKLFLFQIYNKDFSTYSKGKPNLHTLYWKGLFEAENLKDTVLKLNGEAEIFYRKHSIKPNDIITHRANETIENKSKNYDKKTSTFAYDIIKDKRYTQDKFQFHVPITLNFKAPKAPGVSHFNNQINKAVAKSKDTHIIGIDRGERHLLYYTVINQKGEIIEQDTLNKIKAHKDYEVDYQQKLHDKETERQKARRSWSSVENIKELKAGYLSHVVHKLAVLIKEHNAIVCLEDLNFGFKRGRFKVEKQVYQKFEKTLIDKLNYLVFKDAEENEAGHYLKAYQLTAPFESFEKMGKQSGILYYVQAAYTSKIDPATGFINFLYTRYQSLSRSKEFFESFDFIRYNQAQDYFEFSFDYKNFPIRQNLKNYQTRWLACTYGDERYANKRNKQNQWESEIVNVTQELKTLFNKASIDFQNGKDLKDAIAQTKDTKFYKKLYWLLGLTLSLRHSKTGTEIDFILSPIQGKDGKFFDSREASNKHPKDADANGAYNIALKGLWNLQQIKQHDWNTEKPKKLNLNMKNEDWFGFIAERASL

SEQ ID NO: 223 - protein, 1083 aa, Unknown
  Description of Unknown: uncultivated organism sequence
  Category: MG29 effectors
  Description: MG29-9 effector
TGFNENRNNIFTKEAKATAIGYRLIHDNLPKFFDSCMLYDRIISTYEDLRFQVEDELITQLGVTTLNELFQPVAFAHLLTQANIESFNALLGGLNTQINQFKQEQKLNSRQLPTFAPLFKQILAKTESHSFIPEAFANDKELLDAIAIYRERSQEHLQKLEESFEALHSDEDEHIYYKAQSLTQLSQEMFGHYSVINDMLNLYVENHQERFRTKAQREKFLKKPNLYSLYDLESAINEYIEILDADHFYRKKIENDTPVQSYLKQKFNDLKEDIDKQEKIIAPLLSLNELSKNRNLPKNDDDQGGEGYRQVQQIKEFLDRYNDTVRILSNLYPAKGRERIEVEAPNMAFYNMFEEPFVEFESETFALYNKTRNYLSKKPYSKDKFKLNFESSKLLGGFVESKTEKSNNGTQHNAYLFRQKLDNGNYRYFLGISNNVKLFSRDKLIHDPHPEYERIHYYQGKINSLYGSSYDGNYNKDKETLSEKDLIKKIKMALSQYKNKILGVESILQTEYNNINNLRDDIEDAFKNKSFFHQAISKSEFEQAVNDPEKPLLVFEIYNKDFSLNKRNKNSKDNLHTMYFKGLMNENGYSIDIGSGELFFRKHSLKRKEAVIHTAKQPIKNKNSNNKKQTSTFDYDIVKDKRFTVDKFFLHLSIELNYKAPKISNNQKSKFKKDFNDKINQLLSQYPDTHIIGIDRGERHLLYYTLIDPKGNIVEQKSFNTIPTDRGYDVDYHQKLHKKEKERDRARKEWGTIENIKELKAGYLSQIVHQLAKLIIKHNAIVVLEDLNRGFKRGRFKVEKQVYQKFEKALIDKLNYLVFKDRDAKEAGGYLNGYQLTAPFESFQKLGKQSGILYYVPAAYTSKIDPASGFIDFLKPKYESIEKAKAFFANFDSIRYNSSDDYFEFSFRYSQFDINHPDYKDAWVVCTHGMRLRNKRNTQGHWETTTVDVSDDLKRLFDKYSFFYHDGDNLIDQIIEYDEKQLFEQMIFALRTTLAMRYSRVGEEEDYILSPVKGPDGIFYDSRKVDGSLPKDADANGAYHIALKGAMLLDRMRQHDFDSHSKPDMFIKNGQWFAFASKRLWEK

SEQ ID NO: 224 - protein, 881 aa, Unknown
  Description of Unknown: uncultivated organism sequence
  Category: MG29 effectors
  Description: MG29-10 effector
VLHEQLKKLPNPQQPISSYLVSIIKQTQQDVELQKIIDGVKPLLQLESLSKARKAPELGNENDKGAVGFQQVQKIQRMLDGFMSVSHAVKLLHLVDGRKPIDMPDKDDSFYNGFAEVYEAYTDLTVTLYNKARNHLTKKLYTNDKIKINFDAPTLLNGWDANKESDNASILFEREGLYYLGIMHPKHKHLFNYTKGIDDIGNEKKTTAKDELYEKVAEKGDSGYRKIVYKLLPGVNKMLPKVFFSASRKDFFAPSEEVNRIRNTASHTKNGNPQKGHKKENFNLEDCHAIIDFFKVSLNKHPEWKDFNFSFSPTSSYEDLSGFYREVEHQGYRMDFQSIKESYIKDCVSEGKLFLFQIYNKDFSRYSKGKPNLHTLYWKGLFEPENLKDVVLKLNGEAEIFYRKHSIKREDRIIHKSGDTLDNKNTNNPKKTSKFEYDIVKDRRYTQDKFQFHVPITLNFKALGVNRFNDQINKALAQQKETCVIGIDRGERHLLYYTVVNSKGEIIEQDTLNTINTDKGYNVDYQQKLHTKEKEREKARKSWSSVENIKELKAGYLSHVVHKLAHLIIKHNAIVCLEDLNSGFKRGRFKVEKQVYQKFEKALIDKLNYLVFKENKANDAGGYLNAYQLTAPFESFEKLFKQTGILYYVRADYTSKIDPATGFIDFLRPRYESLAKSKTFFENIESFKFNQAKDYFEMEFDYKKMKPSQKLGRYQSKWKVCTFGDVRYQNRRNDKGVWESEVINVTKKLKALLDDHDIEYQQEQDLKEALILKKDTKFYKELFWLLKLTLSLRHSKSGTEEDFILSPVANEQGVFFDSRNASDTQPKDADANGAYNIALKGLWNLQQIKKHDWDAEKPKKLNLAMKNEEWFGFAQNKEYKN

SEQ ID NO: 225 - protein, 1316 aa, Unknown
  Description of Unknown: uncultivated organism sequence
  Category: MG29 effectors
  Description: MG29-12 effector
MSKIYDQFTHLYKIQKTLRFELKPVGETAIYINDFKSQYLQDVVHQDEQRAEYYKVVKDIIDDYHRDYIEKKLSQSVDTATGVIWVTPEDLEEAYCDYQNLKDNPRDRETRDAWVKRQESLRKQLVEAFSNNNDLFKKELITRDLPALLKHQGKWEENKEAVESFNKFTTYFTGFNENRKNMYSDKDQSTAIAHRVMNENLPRFFNNYLSYQKIKDKQASLEFSVETPLLTQMGVSSIDDIFQPRYFINLFTQSGLDSYQELLGGKTDEHGKKTQGLNEQINLYNQQQLDTKDKLPRFTSLYKQILSDRETNSFIPDAFKDDKELLKTLQDYIDHATKKEGFLERLEKSIELLSVVDNEKVYVKKAGLTDISSAIFNSYGIIGAALWHHAENTLYPNSTRRPATETLIKRRKSFCEQDVFSVAELNRIITSYIAQLEAIDPLHQQLKELTDPRQPIRAYFLDVFQQSKQDSELDTCIKNVSPLLSLESLSKKRQAPTLEGDQGDKGYQQLHSIQKMLDAFMTISYKLKPLHLVKGRKAIDMPDMDMGFYAGFSEAYETYSDTIISLYNKTRNHLTKVPFSKEKIKLNFGNPTLLNGWDSNKEAANSSLIFEKDGLYYLGIMHPKHKYLFDYITGIDDIGNDKKIKKKELLRGEIEVDENQGYRKIVYKLLPGANKMLPKVFFSNKRQAYFSPSSEILHIRNTASHSKNGKPQKSHIKAAFNINDCHKIIDFFKASINKHPEWKAFDFQFSPTKKYQDLSEFYREVEQQGYKVDFHPIKQSYIDECVEQGKLFLFQIYNKDFSPYSKGKSNLHTLYWKGLFEPENLNDVVLKLNGEAEVFYRRHSIKVADRTIHRANEAISNKNKEFHKKEESTFNYDIIKDRRYTQDKFQFHVPITLNFNAQGVSHFEDKVNLALQKAEDTHVIGIDRGERHLLYYTIVNSKGEIIEQDTLNKISTDQGYVIDYQNKLHKKEKERDKARKSWSSIENIKELKAGYLSHVVHKLAELIIKYDAIVCLEDLNFGFKRGRFSVEKQVYQKFEKALIDKLNYLVFKTSETTSPGHYLNAYQLTAPFKSFEKLGKQSGVLFYVQAAYTSKIDPSTGFIDFLKPKYKSLSASKVFFETMSSIIFNAEKDYFEFSFDYKKFNPSQKFGQYTTQWKACSFGELRYHNKRNNKGIWETRPINVTKELKQLFDDAGIQYQIGQELKESIILVKDTKFYKTLFWLLRLLLSLRHSRTGTDDDFILSPIENEHGVFFDSRNATDKQPKDADANGAYNIALKGLWNLQQIKQWDGEKHLNLSMKNEDWLSFITVKPYKR

SEQ ID NO: 226 - protein, 1259 aa, Unknown
  Description of Unknown: uncultivated organism sequence
  Category: MG30 active effectors
  Description: MG30-1 effector
MHLSQTFTNKYQVSKTLRFELRPQGKTKETFERWIAELRTEKPSANNLIAEDEQRAEDYKEVKGIIDRFHRKVIEESLESLKLEGLSAYEELYFKREKEDIDLKEIENLQIQMRKQIREAFVEHPVFKDLFKKELIQVHLKEWLTDKQEIDLVAKFQKFTTYFGGFHENRQNVYSPDAKATAVGYRMIHENLPKFLDNRRIFNKIIKAHNELDFSSINTELEELLQGTTVNDVFSLEFFNETLTQTGIDIYNHVLGGYSSETGQKIQGVNEKINLYRQKNGLKARELPNLKPLFKQILSESQTASFVIEQIESNSDLLDRLDNFHSLLTNFEFQGRNEVNVMTELKNMLAALDSYEHEQVYFKNGPSLTQLSQKMFGQWGVIHKALEYYYEQVLNPLQGKKLTKKYESDKQKWLKSKQFNLSLIQKALDGYVPTIDTLESVNLIETLAKLEDKDGADLCIEVDKAYEHVAKLIEQGALSESYAQKKKEKQVIKEYLDGLMSLLHSVKPFYTTEVDIEKDAGFYGLFEPLYEQLNLVIPIYNLVRNYLTQKPYSTEKFKLNFENNTLLDGWDQNKEKANTCVLLRKEGNYFLAVMHKQHNKVFEELPQSEEDTYKKVVYKLLPRANNMLPKVFFSKKNIDYYKPEKELLAKYKLGTHKKGSNFSLNDCHALIDFFKDSISKHPDWAQFNFEFSPTKTYEDLSHFYKEVEHQGYKVNYAKVDVSYINQLVDDGKIFLFQIYNKDFSPYSKGKPNLHTLYWKAVFDERNLADTVYILNGKAEIFFREKSLNYSKEIMAKGHHRDELKDKFTYPIIKNKRFALDKFQFHVPLTMNFKAGSNPNINDRALDFLKNNPDIKIIGLDRGERHLLYLSLIDQKGNIIEQYTLNEIVSKYQGQTFKKDYHKLLDEKEKERDDARKNWDVIETIKELKEGYLSQVVHKITQMMIEHNAIVVLEDLNAGFKRGRHKVEKQVYQKFEKMLIDKLNYLVFKDHDKEKPGGLLNALQLTNKFESFQKLGKQSGLLFYVPAALTSKIDPATGFTNFLRPKHESILKSKSFIEGFTGIHFNSEKEYFEFKFDLKNIPNTRFPDDTKTEWTVCTTNVPRYWWNKSLNEGKGGQEKVLVTQRLQDLLARYDLGYAKGKDLKEDILTIEDASFYKELLWLLNVTVSLRHNNGKHGEQEEDAIISPVANDKGEFFNSSKANPSEPKDADANGAYHIALKGLWALRTINAYDKKEWRGIKLAISNKEWLQFVQQKPFLKT

SEQ ID NO: 227 - protein, 834 aa, Unknown
  Description of Unknown: uncultivated organism sequence
  Category: MG30 effectors
  Description: MG30-2 effector
KALDGYVPTIDTLESVNLIETLAKLEDKDGADLCIEVDKAYEHVAKLIEQGALSESYAQKKKEKQVIKEYLDGLMSLLHSVKPFYTTEVDIEKDAGFYGLFEPLYEQLNLVIPIYNLVRNYLTQKPYSTEKFKLNFENNTLLDGWDQNKEKANTCVLLRKEGNYFLAVMHKQHNKVFEELPQSEEDTYKKVVYKLLPRANNMLPKVFFSKKNIDYYKPEKELLAKYKLGTHKKGSNFSLNDCHALIDFFKDSISKHPDWAQFNFEFSPTKTYEDLSHFYKEVEHQGYKVNYAKVDVSYINQLVDDGKIFLFQIYNKDFSPYSKGKPNLHTLYWKAVFDERNLADTVYILNGKAEIFFREKSLNYSKEIMAKGHHRDELKDKFTYPIIKNKRFALDKFQFHVPLTMNFKAGSNPNINDRALDFLKNNPDIKIIGLDRGERHLLYLSLIDQKGNIIEQYTLNEIVSKYQGQTFKKDYHKLLDEKEKERDDARKNWDVIETIKELKEGYLSQVVHKITQMMIEHNAIVVLEDLNAGFKRGRHKVEKQVYQKFEKMLIDKLNYLVFKDHDKEKPGGLLNALQLTNKFESFQKLGKQSGLLFYVPAALTSKIDPATGFTNFLRPKHESILKSKSFIEGFTGIHFNSEKEYFEFKFDLKNIPNTRFPDDTKTEWTVCTTNVPRYWWNKSLNEGKGGQEKVLVTQRLQDLLARYDLGYAKGKDLKEDILTIEDASFYKELLWLLNVTVSLRHNNGKHGEQEEDAIISPVANDKGEFFNSSKANPSEPKDADANGAYHIALKGLWALRTINAYDKKEWRGIKLAISNKEWLQFVQQKPFLKT

SEQ ID NO: 228 - protein, 879 aa, Unknown
  Description of Unknown: uncultivated organism sequence
  Category: MG30 effectors
  Description: MG30-3 effector
VIHKALEYYYEQVLNPLQGKKLTKKYESDKQKWLKSKQFNLSLIQKALDGYVPTIDTLESVNLIETLAKLEDKDGADLCIEVDKAYEHVAKLIEQGALSESYAQKKKEKQVIKEYLDGLMSLLHSVKPFYTTEVDIEKDAGFYGLFEPLYEQLNLVIPIYNLVRNYLTQKPYSTEKFKLNFENNTLLDGWDQNKEKANTCVLLRKEGNYFLAVMHKQHNKVFEELPQSEEDTYKKVVYKLLPRANNMLPKVFFSKKNIDYYKPEKELLAKYKLGTHKKGSNFSLNDCHALIDFFKDSISKHPDWAQFNFEFSPTKTYEDLSHFYKEVEHQGYKVNYAKVDVSYINQLVDDGKIFLFQIYNKDFSPYSKGKPNLHTLYWKAVFDERNLADTVYILNGKAEIFFREKSLNYSKEIMAKGHHRDELKDKFTYPIIKNKRFALDKFQFHVPLTMNFKAGSNPNINDRALDFLKNNPDIKIIGLDRGERHLLYLSKNKKKGNIIEQYTLNEIVSKYQGQTFKKDYHKLLDEKEKERDDARKNWDVIETIKELKEGYLSQVVHKITQMMIEHNAIVVLEDLNAGFKRGRHKVEKQVYQKFEKMLIDKLNYLVFKDHDKEKPGGLLNALQLTNKFESFQKLGKQSGLLFYVPAALTSKIDPATGFTNFLRPKHESILKSKSFIEGFTGIHFNSEKEYFEFKFDLKNIPNTRFPDDTKTEWTVCTTNVPRYWWNKSLNEGKGGQEKVLVTQRLQDLLARYDLGYAKGKDLKEDILTIEDASFYKELLWLLNVTVSLRHNNGKHGEQEEDAIISPVANDKGEFFNSSKANPSEPKDADANGAYHIALKGLWALRTINAYDKKEWRGIKLAISNKEWLQFVQQKPFLKT

SEQ ID NO: 229 - protein, 1307 aa, Unknown
  Description of Unknown: uncultivated organism sequence
  Category: MG31 active effectors
  Description: MG31-1 effector
MKTVEQFCGQKNGYSRSITLRNRLIPVGKTEENLQKANMLEADFNRAKAYSEVKNLIDDFHRSFIEDVLSNTKLGWKNLYDVFDLCQLEKDKIKKEKQKKDLQSIQAAMRKAIVKKFKDDERFSKLFKKELLSDLLPSIIKNDESGTITDKNEALKVFKGFSTYFSGFHQNRENLYSDEAKATAISNRIVNENFPKFHANVKVFEYLQKNFPEIISDTEESLKAFLNGKKLSEIFNPEKFNAVLCQSGIDFYNTVIGGISDENGKQKIQGLNEKINLASQQLPPEEKSKLKKKMTVLYKQILSDKKTASFIPIGFEKSEEVYKSIKQLKEEYFDKAYKLIERTFSAPDYDLSEIFVPAKELTAFSLAIFGNWSILNDGLFLLEKDNSKKELTEKQVENLHKEISKKDYSLADLQKAYERWANENGVPADKTVKSYFSLSELRANEKTKEKEPVDIVEKIKITYEKIDFENIENLQAEKEAATPIKNFLDEVQCLFHHLKLVDYRGEEQKDSAFYSKLDEILIPLSEIISLYNKVRNFVTKKPGEVKKIKLNFECPTLANGWDLNKESSNDAIILRKNGKYFLGIFNPEDKPKFSNDSICKNQQESHYEKMIYKLLPGPNKMLPKVFFSTKGQETFLPPKDLLLGYEQGKHKKGESFDKSFMHKLIDWFKYAINQHEDWKNFNFKFSPTESYEDMSGFYKEVELQGYKITFQNISENYIDSLIDSGKLYLFQIYNKDFAEKADGKKNLHTLYWENLFSPENLKDICLKLNGDAELFYRPASENLKVIKHEKDSILVNRTTTDGETIRDETYQEIYKFKNPAKQKKGFKLSNEAKSLLDSGKVVFKKARFEITKDKHFLQNTYLFHCPITMNFKAPEITGKKFNERVLEYLRNNPDVKIIGLDRGERHLIYLSLINQNGEIELQKTLNIVEQIRGDKENPVSVNYQEKLVQKEGDRNKARKNWQTIGNIKELKEGYLSNIVHEIAKLMVEQNAIVVMEDLNFGFKRGRFAVERQVYQKFENMLIEKLNYFAFKDRPATEPGGILNAYQLTDKSANISDVGKQCGWIFYIPASYTSKIDPKTGFANLFNTKGLTNVEKKKEVFSKFDSIRYDSKENCFVFSVNYSKLGDNADFKKNWEIYTHGERIVYSRKENKTFSVNPTENLEKAFDGQFAQSGINWKNKENLIDLIENISAEKSNAKFFDELLRSFTTTLQMRNSVPNTEEDYLISPVKAADGTFFDSRNEIAKGKDSGGKWISKFPVDADANGAYHIALKGLYLLQNNFNLNPKGYIENISNADWFKFVQKKEYLK

SEQ ID NO: 230 - protein, 759 aa, Unknown
  Description of Unknown: uncultivated organism sequence
  Category: MG31 effectors
  Description: MG31-2 effector
GSKAAHIFKSDSCFYLGIINKKLDKTDIDSIYQNGNTMIEKIVYDFQKPDNKNTPRLFIRSKGNAYAPAVSTYDLPIESVIDIYDKGLFKTEYREKNLEVYKKSLIKLIDYFKLGFSRHDSYKHYNFCWKETKDYADISEFYADTMRSCYQLKTERINFDNLMTLVDEGKLFLFQIYNKDFSTGKDGGNGSTGRKNMHTLYWENLFSKENLDDVVLQLSGGAELFFRQKSLEEENATIHEKNSFIVNRTYLKEVKGNKEIYETIPEEIYQEIYQKLNGKADTISDEAQELLSSGKVKYRAAPHRIIKDRHFTQDTYLFHCPISLNFKAQEITGKKFNDRVLEKIKNNSEIKIIGLDRGERNLIYLSLINQKGEIELQKTLNLVEQQKRLIDYQGKLVQKEGDRDKARKNWQTISNIKELKEGYLSAVVHELATLMVDNNAIVVMEDLNFGFKRGRFAVERQVYQKFEHMFIDKLNYLVFKDRKVTEPGGVLNAYQLTDKLEAFKDLGKQSGFLFYVPAGYTSKIDPATGFANLLDMTNLTNVQKKRDFFAKFDSICFDEEKQMFAFTFDYKNFNRKDAQEMSRTKWTVYSNGKRIQFCGKGKASKHIENLTEEFKTLFREFDYQNGNNILDSILEVGAALKAGEKPTKEIADFWDKLLVLFKLVLQMRNSDAKTGDDYIISPVMSESGNFFDSREQEKLGNNAKLPKDADANGAYHIALKGLYLLKAFDKTPEDQLKKVDMKISNADWFRFAQEKEYNK

SEQ ID NO: 231 - protein, 753 aa, Unknown
  Description of Unknown: uncultivated organism sequence
  Category: MG31 effectors
  Description: MG31-3 effector
IFKSDSCFYLGIINKKLDKTDIDSIYQNGNTMIEKIVYDFQKPDNKNTPRLFIRSKGNAYAPAVSTYDLPIESVIDIYDKGLFKTEYREKNLEVYKKSLIKLIDYFKLGFSRHDSYKHYNFCWKETKDYADISEFYADTMRSCYQLKTERINFDNLMTLVDEGKLFLFQIYNKDFSTGKDGGNGSTGRKNMHTLYWENLFSKENLDDVVLQLSGGAELFFRQKSLEEENATIHEKNSFIVNRTYLKEVKGNKEIYETIPEEIYQEIYQKLNGKADTISDEAQELLSSGKVKYRAAPHRIIKDRHFTQDTYLFHCPISLNFKAQEITGKKFNDRVLEKIKNNSEIKIIGLDRGERNLIYLSLINQKGEIELQKTLNLVEQQKRLIDYQGKLVQKEGDRDKARKNWQTISNIKELKEGYLSAVVHELATLMVDNNAIVVMEDLNFGFKRGRFAVERQVYQKFEHMFIDKLNYLVFKDRKVTEPGGVLNAYQLTDKLEAFKDLGKQSGFLFYVPAGYTSKIDPATGFANLLDMTNLTNVQKKRDFFAKFDSICFDEEKQMFAFTFDYKNFNRKDAQEMSRTKWTVYSNGKRIQFCGKGKASKHIENLTEEFKTLFREFDYQNGNNILDSILEVGAALKAGEKPTKEIADFWDKLLVLFKLVLQMRNSDAKTGDDYIISPVMSESGNFFDSREQEKLGNNAKLPKDADANGAYHIALKGLYLLKAFDKTPEDQLKKVDMKISNADWFRFAQEKEYNK

SEQ ID NO: 232 - protein, 1016 aa, Unknown
  Description of Unknown: uncultivated organism sequence
  Category: MG31 effectors
  Description: MG31-4 effector
KKMTVLYKQILSDKKTASFIPIGFEKSEEVYKSIKQFKEEYFDKVYKLIEKTFSVPDYELSEIFVPAKELTAFSLAIFGNWSILNYGLFLLEKDNSKKELTEKQVENLHKEISKKDYSLADLQNAYERWANENGVPADKTVKSYFSLSELRANEKTKEKEPVDIVEKIKTAYEKIDFENIENLQAEKEAAVPIKNFLDEVQCLFHHLKLVDYRGEEQKDSAFYSKLDEILIPLSEIISLYNKVRNFVTKKPGEVKKIKLNFECPTLANGWDLNKESSNDAIILRKNGKYFLGIFNPEDKPKFSNDSICKNQEESHYEKMIYKLLPGPNKMLPKVFFSTKGQETFLPPKDLLLGYEQGKHKKGDAFDKSFMHKLIDWFKYAINQHEDWKNFNFKFSPTESYEDMSGFYKEAELQGYKITFQNISENYTDSLIDSGKLYLFQIYNKDFAEKADGKKNLHTLYWENLFSPENLKDICLKLNGEAELFYRPASENLKVIKHEKDSILVNRTTTDGETIRDEIYKEIYKFKNPAKQEKGFKLSDEAKSLLDSGKVVFKKARFEITKDKHFLQNTYLFHCPITMNFKAPEITGKKFNERVLEYLRNNPDVKIIGLDRGERHLIYLSLINQNGEIELQKTLNIVEQIRGDKEKPVPVNYQEKLVQKECDRDKARKNWQTIGNIKELKEGYLSNIVHEIARLMVEQNAIVVMEDLNFGFKRGRFAVERQVYQKFENMLIEKLNYFAFKDRPATESGGILNAYQLTDKSANISDVGKQCGWIFYIPASYTSKIDPKTGFANLFNTKGLTNVEKKKEFFSKFDSIRYDSKENCFVFSVNYSKLGDNADFKKNWEIYTHGERIVYSRKENKTFSVNPTENLEKTFDEQFVQSGINWKNKENLIDLIENISAEKSNAKFFDELLRSFTTTLQMRNSVPNTEEDYLISPVKAADGTFFDSRNEIVKGKNSSGKWISKFPVDADANGAYHIALKGLYLLQNNFNLNEKDYIENISNADWFKFVQEKEYLK

SEQ ID NO: 233 - protein, 1324 aa, Unknown
  Description of Unknown: uncultivated organism sequence
  Category: MG31 effectors
  Description: MG31-5 effector
MFMKAIDNFCGQKNGYSRSITLRNALVPVGRTEENIQKLKLLEKDLERSRAYVEVKKLIDGFHRVFIEEVLSKTDLEWGPLYDQFELFQNEKDKQKKNKIKKDLETLQAAMRKQIVKKFKEDERFDKLFKKELLSDFVPAVITADESGSISDKKAALDAFKGFATYFTGFHQNRQNMYSEEAQSTAISNRIVNENFPKFYANVKLFEYLQKEFPEIIKDTEKSLANFLHGKKLASVFSKEGFNAVLCQSGIDFYNTVIGGISGEAGDKKVQGLNEKINLASQQLPAEEKHKLKRKMTVLYKQILSDRAAASFIPEGFESSEQVYESLKQFKEQSLDKAVPLIRELVDTNDCDLNQIYVPAKEVTDFSLKLFANWSIVHDGMFLLEKDSVKKSLSEKQVEALRKDIAKRDCTLSDLQKAYERWAKEYNIPVEKAARDYFNIAELRIDEKSKEKKFVNILKELDEKYCKINFEKKENLIKEKEAAAPIKDFLDEAQSLYHYLKIVDYRGEEQKDSDFYSKYDEILQTLSEIVPLYNKTRNYVTKKPNEVKKVKLNFDCPTCAKGWSLNNELMYGSIILRRGASYYLGIMNKEAHKSFKSYPGPIGDESCFEKMVYLQAADPSKDIPNLLKIDGITVKKNGRKDFDGVNRQIENYRNTYLPKDINEIRKSKKYLRSSDNFNKEALNKYIDYYKTLTAEYFSDYKFVFKPSKDYSSFQEFTDDVNSQAYQIQFITVSESYIDSLVDSGKLFLFKIYNKDYSTGKGGGNGSTGKKNLHTLYWENLFSEENLRDVCLKLNGEAELFWRDANPDVKDVCHKKGSALVNRTTLDGATIPEEIYQEIYKFKNNIAKSISDKAKELLDSGKVVCKEAKFDITKDRRFTKPTYLFHCPITMNFKAPEISNKDFNAKVQKILKDNPDVKIIGLDRGERHLIYLSLINQKGEIELQKTLNLVEQVRNDKTVSVNYQEKLVQKEGGRDKARKNWQTIGNIKELKEGYLSNIVHEIAELMVENNAIVVMEDLNFGFKRGRFAVERQVYQKFENMLIEKLNYLVFKDRKVGEPGGVLNAYQLANKSANVSDVGKQCGWIFYIPAAYTSKIDPKTGFANLFYTTGIANVEKKKEFFDKFDSVRFDRKTNSFVFAFDYGNFSDNADFKKKWEVYSCGERLVYSKADKTKICASPTEDLKALFDKQGINWNSEENFIDQIHAVQAERENCAFYDGLYRSFMAILQMRNSKPNSSNQEDDYLISPVMAVDGTFYDSRVEAAKGKDAEGKWISKLPVDADANGAYHIALKGLYLLKNDFNLNDKGYIENISNADWFMFAQRRFEN

SEQ ID NO: 234 - protein, 1306 aa, Unknown
  Description of Unknown: uncultivated organism sequence
  Category: MG31 effectors
  Description: MG31-6 effector
MKAVEKFCGQKNGYSRSITLRNRLIPIGKTEENIQKLKLLDKDMERAKAYDEVKKLIDEFHRTFIEEVLSKASFEWAPLYDQFDLFQTEKDKLKKNKIKKELEVLQGVMRKKIVESFKKDKRFEKLFKKELLTEFVPAVIKNDESGTITDKQAALNVFKGFATYFTGFHQNRQNMYSEEAQSTAISNRIVNENFPKFYANVKVFEYLKNNYPEIINETEKSLAEFLKGKKLADIFSPESFNAVMSQRGIDFYNTVIGGISDESGSKKIQGLNEKINLASQQLPSEEKYKLKKKMTILYKQILSDRNTASFIPVGFEKSEEVYESVKHFKEEILDKVITNTKKLFDSVDYDLGQIYVPAKEVTEFSLKVFGNWSISHNGLFLLEQDMAKKALTEKQIEALKKEISKRDLSLSDLQNAYERWTKENDVKAEKNVRNYFKLTELRVDEKSKEKDSIEILKNLDVLYSKIDFKKQENLIKEKTSATPIKDYLDEIQNLYHYLKLVDYRGEEQKDTDFYSKYDEIIQALSEIIPLYNKVRNFVTKKPNEIKKVKLNFDCPTLANGWDLNKESSNDAIILRKNGNYYLGIFNPKDKPKFEYNNEDSGYEKMIYKLLPGPNKMLPKVFFSAKGLETFRPPKDLVLGYEEGKHKKGDNFDKVFMHKLIDWFKYAINQHEDWKNFNFKFSPTEFYEDMSGFYKEVELQGYKITFSKVSDNCINSLIDSGKLFLFQIYNKDYSTGEEGGNGSTGKKNQHTLYWENLFSEENLRDVCFKLNGEAEFFWRDANPNVKAVCHKKDSVLVNRTTSDGKSIPEEIYQEIYKYKNPEKQEKEFTLSKDAKELLESGTVVCKKAKFTITKDRHFTQQTYLFHCPITMNFKASEITGRKFNEHVQEILRNNPEVKVIGLDRGERHLIYLSLINQKGEIELQKTLNLVEQVRNDKTVSVNYQEKLVQKEVERDKARKSWQSISNIKELKEGYLSNIVHEIAKLMVENNAIVVMEDLNFGFKRGRFPVERQVYQKFENMLIEKLNYLVFKDKNVTEPGGVLNAYQLADKAVNVSDVGKQCGWIFYIPASYTSKIDPKTGFANLFYTAGLTNIEKKKDFFDKFDSIRYDRKLDSFVFGFDYSNFSDNADYNKKWELYSRGERLVYSKAEKSTISVNPTENLKVLFDKQGIVWDSEDNFIDQIHAVQAERDNVPFYDGLYRSFTAILQMRNSVPNSSKQEDDYLISPVMADDGNFYDSRLEAAKGKDEKGNWISKLPVDADANGAYHIALKGLYLLKNDFNLNEKGYIENISNADWFKFVQNKEYQDC

SEQ ID NO: 235 - protein, 789 aa, Unknown
  Description of Unknown: uncultivated organism sequence
  Category: MG31 effectors
  Description: MG31-7 effector
MKSIEIFCGQSNGYSRSITLRNRLIPIGKTEENIKKLKLLDNDINRSKAYVEVKKLIDDFHRSFIEDVLSKVKLEWGPLYVQFDLFQNEKDKQKKNKIKKELETLQGVMRKKIIKKFKDDDRFDKLFKKELLTEFVPTVIKNDESGTISDKQAALDEFKGFATYFTGFHQNRQNMYSAEAQSTAISNRIVNENFPKFYANIKVFEYLQKEYPAIITETEESLSEILKGKKLADIFCADGFNSVLSQSGIDFYNTIIGGVAGEAGTKKLQGINEKINLTRQQLPVEEKSKLKRKMTVLYKQILSDRRTASFIPVGFESSDEVYESVKQFKEDSLNKILSEMKILFEKSDYELSQIYVPAKEVTEFSLKLFGNWSILHDGLFLIEKDNAKKSLSENQIDILRKEIAKRDCSLADLQSAYKRWAKENDVKVEKTVMNYFRIAELRAEEKSKEKASVEILKELESAFDKIDFEKRENLIKEKESATPIKEFLDEVQNLYHYLKLVDYRGEEQKDTDFYSKYDEILQTLSEIIPLYNKVRNFVTKKPNEVKKVKLNFDNVSLAKGWDVNKESDYTCILLRRNGLYYLGVLNPKDKPKFDSENNGETSINKNDCYEKLVYKYFKDVTTMIPKCSTQLNDVKQHFKNSNEDYILENDNFIKPLVISKRIFDLNNKTFDEKKMFQIDYYRNTGDLKGYTEAVKDWISFCITFVHSYKSTCIYDFSSLGDCSQFKQVDQFYKEINLLLYKIWFVNVTAEKINSLVDSGKLFLFQIYNKDYSTGKDGGNGSTGKKNLHT

SEQ ID NO: 236 - protein, 1307 aa, Unknown
  Description of Unknown: uncultivated organism sequence
  Category: MG31 effectors
  Description: MG31-8 effector
MKSIEQFCGQKNGYSRSITLRNRLIPVGKTEENLQKANMLEADFERAKAYAEVKNLIDDFHRSLIEDVLSNAKLDWKKLYVQFDLYQSEKDKLKKTKQKKDLQSVQGAMRKAIVKKFKDDERFSKLFKKDLLSDLLPSIIKNDESGTITDKNEALKVFKGFATYFSGFHQNRENLYSDEAKATAISNRIVNENFPKFHANVKVFEYLQKNFPKIISDTEESLKEFLNGKKLSEIFSPENFNAVLCQSGIDFYNTVIGGISDENKKQKIQGLNEKINLASQQLPPEEKSKLKKKMTVLYKQILSDKKTASFIPVGFEKSEEVYKSIKQFKEEYFDKAYKLIEKTFSAPDYDLSEIFVPAKELTAFSLAIFGNWSILNDGLFLLEKDKAKNELTEKQVENLHKEISKKDYSLADLQIAYERWANENGVQSDKTVKSYFTLSELRANEKTKKKEPIDIIEKIRIAYENIDFENIENLQAEKDAATPIKNFLDEVQCLFHHLKLVDYRGEEQKDSAFYSKFDEILIPLSEIIPLYNKVRNFVTKKPGEVKKIKLNFECPTLANGWDLNKESSNDAIILRNDGKYFLGIFNPENKPKFSNDSICKNQEEPHYEKMIYKLLPGPNKMLPKVFFSTKGQETFLPPKDLLLGYEQGKHKKGETFDKSFMYKLIDWFKYAIDQHEDWKNFNFQFSPTESYEDMSGFYKEVELQGYKITFQNISENYIDSLVDSGKLYLFQIYNKDFAEKADGKKNLHTLYWENLFSPENLKDICLKLNGEAELFYRPASENLKIIKHEKDSILVNRTTTDGETIRDEIYQEIYKFKNPAKQEKGFKLSDEAKSLLDSGKVVLKKARFEITKDKHFLQNTYLFHCPITMNFKAPEITGKKFNERVLEYLRNNPDVKIIGLDRGERHLIYLSLINQNGEIELQKTLNIVEQIRGDKENPVSVNYQEKLVQKEGDRDKARKNWQTIGNIKELKEGYLSNIVHEIAKLMVEQNAIVVMEDLNFGFKRGRFAVERQVYQKFENMLIEKLNYFAFKDRTATEPGGILNAYQLTDKSANVSDVGKQCGWIFYIPASYTSKIDPKTGFANLFNTKGLTNVEKKKEFFAKFDSIRYDSKEDCFVFNVNYSKLGDNADFRKNWEIYTHGERIVYSKKENKTFSVNPTENLKKAFDGQFAQSGIEWKNKENLIDLIENICAEKSNAKFFDELLRSFTTTLQMRNSVPNTEEDYLISPVKAADGTFFDSRNEIAKGKDSSGKWISKFPVDADANGAYHIALKGLYLLQNNFNLNEKGYIENISNADWFKFVQKKEYLK

SEQ ID NO: 237 - protein, 1335 aa, Unknown
  Description of Unknown: uncultivated organism sequence
  Category: MG31 effectors
  Description: MG31-9 effector
MKTIDDFCGQKNGYSRSITLRNALIPIGKTEENIQKLKLLDKDVERSKAYVEVKKLIDDFHRTFIEEVLSKTKLEWGLLYKQFELYQNEKDKQKKNKIKKQLEQLQSGMRKDIVKQFKKDERFDKLFKKELLSDFVPTVIKNDESGTISDKQAALDAFKGFATYFTGFHQNRQNMYSEEAQSTAISNRIVNENFPKFYANVKLFEYLQKEFPEIIKETEDSLSNFLNGKRLAEIFSENGFNAVLSQNGIDFYNTVIGGISDEAGSKKLQGLNEKINLASQQLPKEEKYKLKRKMTVLYKQILSDRSTASFIPVGFETSEEVYESVKQFKEQNFDKVVSLVKKLSSKTDYDLNQIYVPAKEVTEFSLKLFGNWSILHDGLFLLEKDNAKKNFSEKQMETLRKEIAKRDCSLAELQKVYEELCSYNGEQLGINEKGYLVKKTYNDKDKIELNVRDNFFRFTELRLDENTKEKSFVEILKEVNKNYLKIDFDKQENLIKEKESSTPIKNFLDEVQNLYHYLKLVDYRGEEQKDSDFYSELDKILLELSEIVPLYNKVRNFVTKKPNEIKKVKVMFDCSSLLNGWGTDYGTKEAHIFIDSGKYYLGIVNNKLDKEDVESLKVVGEHMISKVIYDFQKPDNKNTPRLFIRSKGDSYAPAVSKYNLPITDIIDIYDKGLFKTEYRKINPEEYKKSLEKIIDYFKLGFSRHDSYKHYNFSWKKTTDYADIADFYSDTIKSCYQLKFEKVNYGNLVSLVDSGKLFLFQIYNKDYSTGKDGGNGSTGNKNLHTLYWENLFSEENLRDVCLKLNGEAELFWRDANQNVKDVCHKKGSVLVNRTMTDGSTIPEDIYQEIYKFKNKKSESLSDKAKELLDSGKVVCKEARFDITKDRHFTKQTYLFHCPITMNFKASEISNKDFNSKVQTLLKNNSDVKIIGLDRGERHLIYLSLINQKGEIELQKTLNLVEQVRNDKTVKVNYQEKLVQKEGDRDKARKNWQTIGNIKELKEGYLSNIVHEIAKLMVENNAIVVMEDLNFGFKRGRFAVERQVYQKFENMLIEKLNYLVFKDKKLTESGGVLNAYQLTNKSANVSDVGKQCGWIFYIHAAYTSKIDPKTGFANLFYTAGLTNVEKKKEFFDKFDSIRFDSKTDSFVFSFDYSNFSDNADFKKNWDVYSRGERLVYSKAERTAVCVNPTENLKALFEKQGINWNTEDNFIDQIQAVQAERENCSFYDGLYRSFMAILQMRNSKPNSSNQEDDYLISPVKAEDGTFYDSRVEAAKGKDSNGRLISKLPVDADANGAYHIALKGLYLLKNDFNLNDKGYIENISNADWFKFAQEKDYAE

SEQ ID NO: 238 - protein, 1306 aa, Unknown
  Description of Unknown: uncultivated organism sequence
  Category: MG31 effectors
  Description: MG31-10 effector
MKTIENFCGQKNGYSRSITLRNRLIPIGKTEENIEKLQLLDNDIKRSKAYVEVKTMIDDFHRSFIEDVLSKAKLEWGPLYDLFDLFQNEKDKQKKSKIKKELETIQGVMRKQIVKKFKEDDRFDKLFKKELLTEFVPTVIKADESGTISDKRAALDVFKGFATYFTGFHQNRQNMYSEEAKATAISNRIVNENFPKFYANVKVFECLQKEYPEIITETEASLSEILNGKKLADIFSADGFNSVLSQSGIDFYNTIIGGIAGEAGTQKLQGVNEKINLARQQLPEEEKSKLKRKMTVLYKQILSDRSTASFIPVGFESSDEVYESVKQFKEDSLNKILSEIKTLFEKSDYDLSQIYVPAKEVTDFSLKLFGNWSILHDGLFLIEKDNAKKTFTEKQIENIRKDIAKRDCSLADLQNAYERWEKENDVKAEKTVKNYFKIAELRADEKSREKTSVEILNKIESAFEKIDFEKRDNLIKEKETAAPIKDFLDEVQNLYHYLKLVDYRGEEQKDTDFYSKYDQILQTLSEIVPLYNKVRNFVTKKPNEVKKVKLNFDCPTLASGWDLNKESSNDAILLRKDGNYYLGIFNSKDKPKFENCSTDGECYEKMIYKLLPGPNKMLPKVFFSTKGQETYLPSKEILLGYEEGKHKKGDNFDKDFMHKLIDWFKTAINQHEDWKNFNFKFSQTESYEDLSGFYKEVESQGYKIIFKKVSESYINSLVDSGKLFLFQIYNKDYSTGKDGGNGSTGKKNLHTMYWENLFSEENLRDVCLKLNGEAELFWRDANPDVKAVCHKKGSVLVNRTTSDGETIPEEIYQEVYKFKNPDKQENGFKLSDAAKELLDSGKVVCKEAKFDITKDRHFTQKTYLFHCPITMNFKASEITGRKFNEKVQQALKNNPDVKIIGLDRGERHLIYLSLINQKGEIELQKTLNLVEQVRNDKTVSVNYQEKLVQKEGERDKARKNWQSINNIKELKEGYLSNIVHEIAELMVENNAIVVMEDLNFGFKRGRFAVERQVYQKFENMLIEKLNYLVFKDKKVTEPGGVLNAYQLTDKSANISDVGKQCGWIFYIPAGYTSKIDPKTGFANLFYTAGLTNIEKKKDFFDRFDSIRYDRKTDSFVFSFDYSGVSDNADFNKKWEMYSRGERLVFSKAEKSIVRVNPTENLKALFDKQGISWSSEDNIIDQIQAVQAERENCAFYDGLYRSFTAILQMRNSVPNSSKEEDDYLISPVMAEDGTFYDSREEAAKGKTTDGKWISKLPVDADANGAYHIALKGLYLLKNNFNLNEKGYIENISNADWFKFVQEKKYAK

SEQ ID NO: 239 - protein, 1305 aa, Unknown
  Description of Unknown: uncultivated organism sequence
  Category: MG31 effectors
  Description: MG31-11 effector
MKTIENFCGQKNGYSRSITLRNRLIPIGKTEENIEKLQLRDKDIKRSKAYVEVKTMIDDFHRAFIEEVLSKAKLEWGPLYDLFDLFQNEKDKQKKSKIKKELETIQGVMRKQIVKKFKDDDRFDKLFKKELLTEFVPTVIKADESGTISDKRAALDVFKGFATYFTGFHQNRQNMYSEEAKATAISNRIVNENFPKFYANVKVFECLQKEYPAIITETEEALSEILNGKKLADIFSADGFNSVLSQSGIDFYNTIIGGVAGEAGTQKLQGINEKINLARQQLPTEEKNKLKRKMSVLYKQILSDRSTASFIPIGFESSDEVYESVKQFKEQSLDNVISAAKELFEKSDYDLSQIYVPAKEVTDFSLKLFGNWSILHDGLFLIEKDNAKKSFTEKQIENLRKDIAKRDCSLADLQNAYERWAKENDVKAEKTVKNYFKIAELRADEKSREKTSVEILNKIESAFEKIDFEKRDNLIKEKETAAPIKDFLDEVQNLYHYLKLVDYRGEEQKDTDFYSKYDEIAQTLSEIVPLYNKVRNFVTKKPNEVKKVKLNFDCPTLASGWDLNKESSNDAILLRKDGNYYLGIFNSKDKPKFDNCSTEGECYEKMIYKLLPGPNKMLPKVFFSIKGQETYLPPEEILLGYEEGKHKKGDNFDKDFMYKLIDWFKTAINQHEDWKNFNFKFSQTESYEDLSGFYKEVESQGYKITFQKVAESYINSLVDSGKLFLFQIYNKDYSTGNDGGNGSTGKKNLHTLYWENLFSEENLRDVCLKLNGDAELFWRDANPDVKAVCHKKGSVLVNRTTSDGETIPEEIYQEVYKFKNPDKQEKSFKLSDAAKKLLDSGKIVCKEAKFDITKDRRFTKPTYLFHCPITMNFKAPEISNKDFNAKVQKILKDNPDVKIIGLDRGERHLIYLSLINQKGEIELQKTLNLVEQVRNDKTVSVNYQEKLVQKEGGRDKARKNWQTIGNIKELKEGYLSNIVHEIAELMVENNAIVVMEDLNFGFKRGRFAVERQVYQKFENMLIEKLNYLVFKDRKVGEPGGVLNAYQLANKSANVSDVGKQCGWIFYIPAAYTSKIDPKTGFANLFYTAGLTNVEKKKEFFDKFDSVRFDRKTNSFVFAFDYGNFSDNADFKKKWEVYSCGERLVYSKADKTAICASPTEDLKTLFDKQSINWNSEENFIDQIHAVQAERENCAFYDGLYRSFMTILQMRNSKPNSSNQEDDYLISPVMAADGTFYDSRVEAAKGKDAEGKWISKLPVDADANGAYHIALKGLYLLKNDFNLNDKGYIENISNADWFRFAQSRFEN

SEQ ID NO: 240 - protein, 1237 aa, Unknown
  Description of Unknown: uncultivated organism sequence
  Category: MG31 effectors
  Description: MG31-12 effector
MKTVEQFCGQKNGYSRSITLRNRLILVGKTEENLQKANMLEADFNRAKAYSEVKNLIDDFHRSFIEDVLSNTKLGWKNLYDVFDLCQLEKDKIKKEKQKKDLQSIQAAMRKAIVKKFKDDERFSKLFKKELLSDLLPSIIKNDESGTITDKNEALKVFKGFSTYFSGFHQNRENLYSDEAKATAISNRIVNENFPKFHANVKVFEYLQKNFPEIISDTEESLKAFLNGKKLSEIFNPEKFNAVLCQSGIDFYNTVIGGISDENGKQKIQGLNEKINLASQQLPPEEKSKLKKKMTVLYKQILSDKKTASFIPIGFEKSEEVYKSIKQLKEEYFDKAYKLIERTFSAPDYDLSEIFVPAKELTAFSLAIFGNWSILNDGLFLLEKDNSKKELTEKQVENLHKEISKKDYSLADLQKAYERWANENGVPADKTVKSYFSLSELRANEKTKEKEPVDIVEKIKITYEKIDFENIENLQAEKEAATPIKNFLDEVQCLFHHLKLVDYRGEEQKDSAFYSKLDEILIPLSEIISLYNKVRNFVTKKPGEVKKIKLNFECPTLANGWDLNKESSNDAIILRKNGKYFLGIFNPEDKPKFSNDSICKNQQESHYEKMIYKLLPGPNKMLPKVFFSTKGQETFLPPKDLLLGYEQGKHKKGESFDKSFMHKLIDWFKYAINQHEDWKNFNFKFSPTESYEDMSGFYKEVELQGYKITFQNISENYIDSLIDSGKLYLFQIYNKDFAEKADGKKNLHTLYWENLFSPENLKDICLKLNGDAELFYRPASENLKVIKHEKDSILVNRTTTDGETIRDETYQEIYKFKNPAKQKKGFKLSNEAKSLLDSGKVVFKKARFEITKDKHFLQNTYLFHCPITMNFKAPEITGKKFNERVLEYLRNNPDVKIIGLDRGERHLIYLSLINQNGEIELQKTLNIVEQIRGDKENPVSVNYQEKLVQKEGDRNKARKNWQTIGNIKELKEGYLSNIVHEIAKLMVEQNAIVVMEDLNFGFKRGRFAVERQVYQKFENMLIEKLNYFAFKDRPATESGGILNAYQLTDKSANISDVGKQCGWIFYIPASYTSKIDPKTGFANLFNTKGLTNVEKKKEVFSKFDSIRYDSKENCFVFSVNYSKLGDNADFKKNWEIYTHGERIVYSRKENKTFSVNPTENLEKAFDGQFAQSGINWKNKENLIDLIENISAEKSNAKFFDELLRSFTTTLQMRNSVPNTEEDYLISPVKAADGTFFD

SEQ ID NO: 241 - protein, 779 aa, Unknown
  Description of Unknown: uncultivated organism sequence
  Category: MG31 effectors
  Description: MG31-13 effector
MKTVEQFCGQKNGYSRSITLRNRLIPVGKTEENLQKANMLEADFNRAKAYSEVKNLIDDFHRSFIEDVLSNTKLGWKNLYDVFDLCQLEKDKIKKEKQKKDLQSIQAAMRKAIVKKFKDDERFSKLFKKELLSDLLPSIIKNDESGTITDKNEALKVFKGFSTYFSGFHQNRENLYSDEAKATAISNRIVNENFPKFHANVKVFEYLQKNFPEIISDTEESLKAFLNGKKLSEIFNPEKFNAVLCQSGIDFYNTVIGGISDENGKQKIQGLNEKINLASQQLPPEEKSKLKKKMTVLYKQILSDKKTASFIPIGFEKSEEVYKSIKQLKEEYFDKAYKLIERTFSAPDYDLSEIFVPAKELTAFSLAIFGNWSILNDGLFLLEKDNSKKELTEKQVENLHKEISKKDYSLADLQKAYERWANENGVPADKTVKSYFSLSELRANEKTKEKEPVDIVEKIKITYEKIDFENIENLQAEKEAATPIKNFLDEVQCLFHHLKLVDYRGEEQKDSAFYSKLDEILIPLSEIISLYNKVRNFVTKKPGEVKKIKLNFECPTLANGWDLNKESSNDAIILRKNGKYFLGIFNPEDKPKFSNDSICKNQQESHYEKMIYKLLPGPNKMLPKVFFSTKGQETFLPPKDLLLGYEQGKHKKGESFDKSFMHKLIDWFKYAINQHEDWKNFNFKFSPTESYEDMSGFYKEVELQGYKITFQNISENYIDSLIDSGKLYLFQIYNKDFAEKADGKKNLHTLYWENLFSPENLKDICLKLNGDAELFYRPA

SEQ ID NO: 242 - protein, 874 aa, Unknown
  Description of Unknown: uncultivated organism sequence
  Category: MG31 effectors
  Description: MG31-14 effector
MKTVEQFCGQKNGYSRSITLRNRLIPVGKTEENLQKANMLEADFNRAKAYSEVKNLIDDFHRSFIEDVLSNTKLGWKNLYDVFDLCQLEKDKIKKEKQKKDLQSIQAAMRKAIVKKFKDDERFSKLFKKELLSDLLPSIIKNDESGTITDKNEALKVFKGFSTYFSGFHQNRENLYSDEAKATAISNRIVNENFPKFHANVKVFEYLQKNFPEIISDTEESLKAFLNGKKLSEIFNPEKFNAVLCQSGIDFYNTVIGGISDENGKQKIQGLNEKINLASQQLPPEEKSKLKKKMTVLYKQILSDKKTASFIPIGFEKSEEVYKSIKQLKEEYFDKAYKLIERTFSAPDYDLSEIFVPAKELTAFSLAIFGNWSILNDGLFLLEKDNSKKELTEKQVENLHKEISKKDYSLADLQKAYERWANENGVPADKTVKSYFSLSELRANEKTKEKEPVDIVEKIKITYEKIDFENIENLQAEKEAATPIKNFLDEVQCLFHHLKLVDYRGEEQKDSAFYSKLDEILIPLSEIISLYNKVRNFVTKKPGEVKKIKLNFECPTLANGWDLNKESSNDAIILRKNGKYFLGIFNPEDKPKFSNDSICKNQQESHYEKMIYKLLPGPNKMLPKVFFSTKGQETFLPPKDLLLGYEQGKHKKGESFDKSFMHKLIDWFKYAINQHEDWKNFNFKFSPTESYEDMSGFYKEVELQGYKITFQNISENYIDSLIDSGKLYLFQIYNKDFAEKADGKKNLHTLYWENLFSPENLKDICLKLNGDAELFYRPASENLKVIKHEKDSILVNRTTTDGETIRDETYQEIYKFKNPAKQKKGFKLSNEAKSLLDSGKVVFKKARFEITKDKHFLQNTYLFHCPITMNFKAP

SEQ ID NO: 243 - protein, 1328 aa, Unknown
  Description of Unknown: uncultivated organism sequence
  Category: MG31 effectors
  Description: MG31-15 effector
MNIIFGGIFMKTIDDFCGQTSGYSRSITLRNRLIPIGKTEEIIQKQHLLDNDIKRARAYLEVKKMIDDFHRIFIEEVLSKAKLEWGPLYDQFDLFQNEKDKQKKNKIKKELESLQGVMRKQIVKKFKADGRFDKLFKKELLTEFVPTVIKADESGTISDKQAALDVFKGFATYFTGFHQNRQNMYSEEAQSTAISNRIVNENFPKFYANVKVFEYLQNECPAIITETEESLSDFLKGKRLADIFTEEAFNAVLSQGGIDFYNTIIGGVAGEAGTQKIQGVNEKINLARQQLPEEEKSKLKRKMTVLYKQILSDRSTASFIPVGFESSDEVYESVKQFKEDSLNKILSEMKILFEKSDYELSQIYVPAKEVTEFSLKLFGNWSILHDGLFLIEKDNAKKSLTEKQIDILRKDIAKRDCSLSDLQSAYERWTKENDVKVEKTVKNYFGIAELRVDEKSKEKTSVEILKELESAFDKIDFEKRDNLIKEKETAAPIKNFLDEVQNLYHYLKLVDYRGEEQKDTDFYSKYDEILQTLSEIIPLYNKVRNFVTKKPNEVKKVKLNFDCSSFLNGWGTDYGTKEAHIFIDSGKYYLGIVNEKLAKEDEDELKTPTSKVIKKVVYDFQKPDNKNTPRLFIRSKGTAFAPAVSQYNLPIESVIEIYDKGLFKKEYRKINPQVYKESLIKMIDYFKLGFTRHDSYKHYSFNWKDSSEYNDISEFYADVMSSCYQLKFEDTNFEKLLSLVDSGKLFLFQIYNKDYSTGKDGGNGSTGKKNLHTLYWKNLFSEENLRDVCLKLNGEAELFWRDANPNVKNVCHKKGSVLVNRTTSDGDTIPEKIYQEIYKFKNPDKQEKGFKLSDVAKEFLDSGKVVCKEAKFDITKDRHFTQKTYLFHCPITMNFKASEIPGKKFNEKVQQVLKNNPDVKIIGLDRGERNLIYLSLINQKGEIELQKTLNLVDQVRNDKTVSVNYQEKLVQKEGERDKARKNWQTISNIKELKEGYLSNIVHEIAELMVDNNAIVVMEDLNFGFKRGRFAVERQVYQKFENMLIEKLNYLVFKDKISTEPGGVLNAYQLTVKAANVSDVGKQCGWIFYIPASYTSKIDPKTGFANLFYTAGLTNIEKKKDFFDKFDSIRYDEKTDSFVFSFDYREFGDNADFKKKWEVYSRGERLIFSKAEKSVIRVNPTENLKALFDNQGINWASENNFMAQIHAVRAERENCAFYDGLYRSFTAILQMRNSVSNSSKQEDDYLISPVMAEDGSFYDSREEAEKGKTPDGKWISKFPVDADANGAYHIALKGLYLLKNNFNQNERGGIENISNADWFEFVQEKKYAK

SEQ ID NO: 244 - protein, 1302 aa, Unknown
  Description of Unknown: uncultivated organism sequence
  Category: MG31 effectors
  Description: MG31-16 effector
MNVINKFCGQENGYSRSITLRNALIPIGKTEENIQKLKLLDKDIVRSKAYIEVKKLIDDFHRAFIEEVLSKIKLDWGPLFDQFELYQNERDKQKKNRIKNDLKKLQEGMRKDLVKKFKEDKRFDKLFKKELLSDFVPTVIKTDETGTISDKQAALDAFKGFATYFTGFHQNRQNMYSDEEQSTAISNRIVNENFPKFYANVKFFEYLQKDFPAIIKDTEESLAVFLKGKKLADIFSENGFNAVLSQSGIDFYNTVIGGISEEAGSKKIQGLNEKINLASQQLQAEEKHKLKKKMSVLYKQILSDRSTVSFIPVGFEASDEVYESVKQFKEQRLDKAISLVKKLTDKTDYDISQIYVPAKEVTEFSLKLFGNWSILYDGLFLLEKDGSKKNFTEKQVETLRKEIAKKDFSLEDLQNAYERWTKEYNSPVDKTTKNYFRIAELRLDENTKEKSFVEILKKLDESYSKIDFDKQKNLIKEKEAATPIKNFLDEVQNLYHYMKVVDYRGEEQKDSDFYSGLDEILQILSEIIPLYNKVRNFVTKKPNDVKKVKLNFDCPTLANGWDLNKESSNDAIILRKNGNYYLGIYNPKDKPKFETCTNGEECYEKMIYKLLPGPNKMLPKVFFSTKGKETFLPPEDILIGYEDGKHKKGGNFDKQFMYKLIDWFKAAINRHEDWKNFNFKFSPTESYEDLSGFYKEVELQGYKITFQNIAESYINSLVDSGKLFLFQIYNKDFSTGKDCGNGSTGKKNLHTLYWENLFSEENLRDVCLKLNGEAELFWRDANPNVKDVCHKKGSVLVNRTTSDGKSIPEDVYQEIYQFKNKLTDKISDKAKELLDSGKVVCKVAKFDITKDKHFTKSTYLFHCPITMNFRAPGISDKDFNVKVQSILKDNPDVKIIGLDRGERHLIYLSLINQKGEIELQKTLNLVEQVRNDKTVSVNYQEKLVQKEGDRDKARKNWQTIGNIKELKEGYLSNIVHEIAKLMVENNAIVVMEDLNFGFKRGRFAVERQVYQKFENMLIEKLNYLVFKDKKVTEPGGVLNAYQLANKSANVSDVGKQCGWIFYIPAAYTSKIDPKTGFANLFYTAGITNIEKKKDFFDKFDSIRYDRKTDSFVFSFDYSNFSDNADFKKKWEVYSCEDRLVFSKAEKTTVSVNPTENLKALFDKQEINWNTEDNFIDQIHAVQAERDNCAFYDGLYRSFMAILQMRNSKPNSSNQEDDYLISPVMADDGTFYDSRVEAAKGKDENGRWISKLPVDADANGAYHIALKGLYLLKNDFNLNDKGYIDNISNAEWFKFAQEKDYAE

SEQ ID NO: 245 - protein, 1334 aa, Unknown
  Description of Unknown: uncultivated organism sequence
  Category: MG31 effectors
  Description: MG31-17 effector
MRTIDEFCGQKNGYSLSKTLRNKLIPVGKTEDKIKEYHLMENDYGRAEAYVEVKNLIDDFHRSFIAERLDKVSLDWTNLFNALNEYQKNQKDKLLKAKCKKVLEAQQKEMRKKIVQLFTGDKDNKDPVYEKLFKKELIEDLLPEAIKKDTSGIITQKEEALAKFHQFCTYFTNFHENRKTIYSAEDKSTAISNRIVNENFPKYVANIKVFEYLSKNFPKIIDDTENQLKNDLSGKKLKDIFTINGFNNVLSQKGIDFYNIIIGGIPEKEGIPRKQGINEAINLLRQGLPPERKNELKQRMTFLYKQILSDKEKVSFIPEVFNDSKEVYLAVQAFNAKCISSIIDKIADLYKQHNAYNLEKIFVPAKSLTAFSQSVYGNWSLLSECIFEKEKGEKTLSEKKLEDLTKKIAKNDYSLIDLQSAYDIWADKNNIEFNKRISINSYFNLNEIRQQKRPDGTYEKVVSNLIEDVKSTYIRIDFDNIKDLQQEKNASIPIKEYLDAVQNLFHYLKLVDYKGDALKDEMFYSSYDEYLQILSEIMSLYNKTRNFVTKKVGEIKKIKLNFDCSSLLSGWGTDYGSKAAHIFKSDSCFYLGIINKKLDKTDIDSIYQNGNTMIEKIVYDFQKPDNKNTPRLFIRSKGNAYAPAVSTYDLPIESVIDIYDKGLFKTEYREKNLEVYKKSLIKLIDYFKLGFSRHDSYKHYNFCWKETKDYADISEFYADTMRSCYQLKTERINFDNLMTLVDEGKLFLFQIYNKDFSTGKDGGNGSTGRKNMHTLYWENLFSKENLDDVVLQLSGGAELFFRPKSLEEENATIHEKNSFIVNRTYLKEVKGNKEIYETIPEEIYQEIYQKLNGKTDTISDEAQELLSSGKVKYRAAPHRIIKDRHFTQDTYLFHCPISLNFKAQEITGKKFNDRVLEKIKNNSEIKIIGLDRGERNLIYLSLINQKGEIELQKTLNLVEQQKRLIDYQGKLVQKEGDRDKARKNWQTIGNIKELKEGYLSAVVHEIATLMVDNNAIVVMEDLNFGFKRGRFAVERQVYQKFEHMFIDKLNYLVFKDRKVTEPGGVLNAYQLTDKLEAFKDLGKQSGFLFYVPAGYTSKIDPATGFANLLDMTNLTNVQKKRDFFAKFDSICFDEEKQMFAFTFDYKNFPGKGSQEMSRTKWTVYSNGERIQFCGKGKASKHIENLTEEFKTLFREFDYQNGNNILDSILEVGAALKAGEKPAKEIADFWDKLLVLFKLVLQMRNSDAKTGDDYIISPVMSESGNFFDSREQEKLGNNAKLPKDADANGAYHIALKGLYLLKAFDKTPEDQLKKVDMKISNADWFRFAQEKEYNK

SEQ ID NO: 246 - protein, 1334 aa, Unknown
  Description of Unknown: uncultivated organism sequence
  Category: MG31 effectors
  Description: MG31-18 effector
MRTIDEFCGQKNGYSLSKTLRNKLIPVGKTEDKIKEYHLMENDYGRAEAYVEVKNLIDDFHRSFIAERLDKVSLDWTNLFNALNEYQKNQKDKLLKAKCKKVLEAQQKEMRKKIVQLFTGDKDNKDPVYEKLFKKELIEELLPEAIKEDTSGIITQKEEALAKFHQFCTYFTNFHENRKTIYSAEDKSTAISNRIVNENFPKYVANIKVFEYLSKNFPKIIDDTENQLKNDLSGKKLKDIFTVNGFNNVLSQKGIDFYNIIIGGIPEKEGIPRKQGINEAINLLRQGLPPERKNELKQRMTFLYKQILSDKEKVSFIPEVFNDSKEVYLAVQAFNAKCISSIIDKIADLYKQHNAYNLEKIFVPAKSLTAFSQSVYGNWSLLSECIFEKEKGEKTLSEKKLEDLTKKIAKNDYSLIDLQSAYDIWADKNNIEFNKRISINSYFNLNEIRQQKKPDGTYEKVVSNLIEDVKSTYIRIDFDNIKDLQQEKNASIPIKEYLDAVQNLFHYLKLVDYKGDALKDEMFYSSYDEYLQILSEIMSLYNKTRNFVTKKVGEIKKIKLNFDCSSLLSGWGTDYGSKAAHIFKSDSCFYLGIINKKLDKTDIDSIYQNGNTMIEKIVYDFQKPDNKNTPRLFIRSKGTAYAPAVSTYDLPIESVIDIYDKGLFKTEYREKNLEVYKKSLIKLIDYFKLGFSRHDSYKHYNFCWKETKDYADISEFYADTMRSCYQLKTERINFDNLMTLVDEGKLFLFQIYNKDFSTGKDGGNGSTGRKNMHTLYWENLFSKENLDDVVLQLSGGAELFFRPKSLEEENATIHEKNSFIVNRTYLKEVKGNKEIYETIPEEIYQEIYQKLNGKTDTISDEAQELLSSGKVKYRAAPHRIIKDRHFTQDTYLFHCPISLNFKAQEITGKKFNDRVLEKIKNNSEIKIIGLDRGERNLIYLSLINQKGEIELQKTLNLVEQQKRLIDYQGKLVQKEGDRDKARKNWQTIGNIKELKEGYLSAVVHELATLMVDNNAIVVMEDLNFGFKRGRFAVERQVYQKFEHMFIDKLNYLVFKDRKVTEPGGVLNAYQLTDKLEAFKDLGKQSGFLFYVPAGYTSKIDPATGFANLLDMTNLTNVQKKRDFFAKFDSICFDEEKQMFAFTFDYKNFPGKGSQEMSRTKWTVYSNGERIQFCGKGKASKHIENLTEEFKTLFREFDYQNGNNILDSILEVGAALKAGEKPAKEIADFWDKLLVLFKLVLQMRNSDAKTGDDYIISPVMSESGNFFDSREQEKLGNSAKLPKDADANGAYHIALKGLYLLKAFDKTPEDQLKKVDMKISNADWFRFAQEKEYNK

SEQ ID NO: 247 - protein, 1334 aa, Unknown
  Description of Unknown: uncultivated organism sequence
  Category: MG31 effectors
  Description: MG31-19 effector
MRTIDEFCGQKNGYSLSKTLRNKLIPVGKTEDKIKEYHLMENDYGRAEAYVEVKNLIDDFHRSFIAERLDKVSLDWTNLFNALNEYQKNQKDKLLKAKCKKVLEAQQKEMRKKIVQLFTGDKDNKDPVYEKLFKKELIEELLPEAIKKDTSGIITQKEEALAKFHQFCTYFTNFHENRKTIYSAEDKSTAISNRIVNENFPKYVANIKVFEYLSKNFPKIIDDTENQLKNDLSGKKLKDIFTVNGFNNVLSQKGIDFYNIIIGGIPEKEGIPRKQGINEAINLLRQGLPPERKNELKQRMTFLYKQILSDKEKVSFIPEVFNDSKEVYLAVQVFNAKCISSIIDKIADLYKQHNAYNLEKIFVPAKSLTAFSQSVYGNWSLLSECIFEKEKGEKTLSEKKLEDLTKKIAKNDYSLIDLQSAYDIWADKNNIEFNKRISINSYFNLNEIRQQKRLDGTYEKVVSNLIEDVKSTYIRIDFDNIKDLQQEKNASIPIKEYLDAVQNLFHYLKLVDYKGDALKDEMFYSSYDEYLQILSEIMSLYNKTRNFVTKKVGEIKKIKLNFDCSSLLSGWGTDYGSKAAHIFKSDSCFYLGIINKKLDKTDIDSIYQNGNTMIEKIVYDFQKPDNKNTPRLFIRSKGNAYAPAVSTYDLPIESVIDIYDKGLFKTEYREKNLEVYKKSLIKLIDYFKLGFSRHDSYKHYNFCWKETKDYADISEFYADTMRSCYQLKTERINFDNLMTLVDEGKLFLFQIYNKDFSTGKDGGNGSTGRKNMHTLYWENLFSKENLDDVVLQLSGGAELFFRPKSLEEENATIHEKNSFIVNRTYLKEVKGNKEIYETIPEEIYQEIYQKLNGKTDTISDEAQELLSSGKVKYRAAPHRIIKDRHFTQDTYLFHCPISLNFKAQEITGKKFNDRVLEKIKNNSEIKIIGLDRGERNLIYLSLINQKGEIELQKTLNLVEQQKRLIDYQGKLVQKEGDRDKARKNWQTIGNIKELKEGYLSAVVHEIATLMVDNNAIVVMEDLNFGFKRGRFAVERQVYQKFEHMFIDKLNYLVFKDRKVTEPGGVLNAYQLTDKLEAFKDLGKQSGFLFYVPAGYTSKIDPATGFANLLDMTNLTNVQKKRDFFAKFDSICFDEEKQMFAFTFDYKNFNRKDAQEMSRTKWTVYSNGKRIQFCGKGKASKHIENLTEEFKTLFREFDYQNGNNILDSILEVGAALKAGEKPAKEIADFWDKLLVLFKLVLQIRNSDAKTGDDYIISPVMSEDGIFFDSREQEKLGNNAKLPKDADANGAYHIALKGLYLLKAFDKTPEDQLKKVDMKISNADWFRFAQEKEYNK

SEQ ID NO: 248 - protein, 1334 aa, Unknown
  Description of Unknown: uncultivated organism sequence
  Category: MG31 effectors
  Description: MG31-21 effector
MRTIDEFCGQKNGYSLSKTLRNKLIPVGKTEDKIKEYHLMENDYGRAEAYVEVKNLIDDFHRSFIAERLDKVSLDWTNLFNALNEYQKNQKDKLLKAKCKKVLEAQQKEMRKKIVQLFTGDKDNKDPVYEKLFKKELIEELLPEAIKEDTSGIITQKEEALAKFHQFCTYFTNFHENRKTIYSAEDKSTAISNRIVNENFPKYVANIKVFEYLSKNFPKIIDDTENQLKNDLSGKKLKDIFTVNGFNNVLSQKGIDFYNIIIGGIPEKEGIPRKQGINEAINLLRQGLPPERKNELKQRMTFLYKQILSDKEKVSFIPEVFNDSKEVYLAVQAFNAKCISSIIDKIADLYKQHNAYNLEKIFVPAKSLTAFSQSVYGNWSLLSECIFEKEKGEKTLSEKKLEDLTKKIAKNDYSLIDLQSAYDIWADKNNIEFNKRISINSYFNLNEIRQQKKPDGTYEKVVSNLIEDVKSTYIRIDFDNIKDLQQEKNASIPIKEYLDAVQNLFHYLKLVDYKGDALKDEMFYSSYDEYLQILSEIMSLYNKTRNFVTKKVGEIKKIKLNFDCSSLLSGWGTDYGSKAAHIFKSDSCFYLGIINKKLDKTDIDSIYQNGNTMIEKIVYDFQKPDNKNTPRLFIRSKGNAYAPAVSTYDLPIESVIDIYDKGLFKTEYREKNLEVYKKSLIKLIDYFKLGFSRHDSYKHYNFCWKETKDYADISEFYADTMRSCYQLKTERINFDNLMTLVDEGKLFLFQIYNKDFSTGKDGGNGSTGRKNMHTLYWENLFSKENLDDVVLQLSGGAELFFRPKSLEEENATIHEKNSFIVNRTYLKEVKGNKEIYETIPEEIYQEIYQKLNGKTDTISDEAQELLSSGKVKYRAAPHRIIKDRHFTQDTYLFHCPISLNFKAQEITGKKFNDRVLEKIKNNSEIKIIGLDRGERNLIYLSLINQKGEIELQKTLNLVEQQKRLIDYQGKLVQKEGDRDKARKNWQTIGNIKELKEGYLSAVVHELATLMVDNNAIVVMEDLNFGFKRGRFAVERQVYQKFEHMFIDKLNYLVFKDRKVTEPGGVLNAYQLTDKLEAFKDLGKQSGFLFYVPAGYTSKIDPATGFANLLDMTNLTNVQKKRDFFAKFDSICFDEEKQMFAFTFDYKNFPRKGSQEMSRTKWTVYSNGKRIQFCGKGKAYKHIENLTEEFKTLFREFDYQNGNNILDSILEVGVDLKIGEKPTKEISDFWDKLLVLFKLVLQMRNSDAKTGDDYIISPVMAEDGFFFDSREQEKLGNSAKLPKDADANGAYHIALKGLYLLKAFDKTPEDQLKKVDMKISNADWFRFAQEKEYNK

SEQ ID NO: 249 - protein, 1332 aa, Unknown
  Description of Unknown: uncultivated organism sequence
  Category: MG31 effectors
  Description: MG31-22 effector
MRTIDEFCGQKNGYSLSKTLRFELKPQGKTLENINKAGLVKVDEQRAKDYQDVKKLLDNYHKYFIDDILKNASEKDLDWKPLKDAVEEYQKDKTKDEQLKKEQDKMRSSIVKCFSADKKRFDHLTAATPYDLFKTELPEWLSKNSFPNLNNKAVETFKKFSTYFTGYQETRKNIYSAEAISTAVPFRIVHDNFPKFLQNLSIYKWINEKCPEVIKNAQNEIGSILAGKKLEDFFTLNSFNIFLTQTGANEQRGIDFYNQLIGGVKQQNIQIKGINQCINEYWQQHPEFAKENRRVKMVPLYKQILSDRSTLSFVIESIENDKELFDAVTKFNESITLIKDTETEKTSVLENISTLIKNISDFDANHVFVNAKDLAGISLVLFGKWDALQIRMNEFAKATFSTKQERSRWVKNLEENSTTKRKGVFSFAELDRVLAFSSEEINATEISIKDYFDTQYKKFFDAEKNEVVVTKEVTVLSVDDLLISIQSKWNSLQKVVNNSTTENQLKENTENVAILKDYLDCVNELFTRLKVLNVDKSEARDTSFYSVYDEVMETLSEIMPLYNKVRNYITKKSFDIGKYKLNFDNPTLASGWDLNKEDANTCVILEKDGNYYLGVMNAKNKPKFSAIQPDDSVPCYKKMVYKLLPGPNKMLPKVFFSTKGIATFNPPKEILEGYNAGKHKKGDTFDLNFCHKLIDYFKSAINQHPDWKNFNFKFSDTSTYKDTSDFYKEISEQGYKLSFVNVPVSIIDSWVDEGKLYLFQIYNKDFSPNSTGTPNMHTLYWRNLFSKENLDDVVLKLNGEAELFYRGVGIKNPVVHSVGSKVVNRTTKDGKTISEAIHDEIYKYVNRKIPELSQETKKLYENGLVVVKTIQKNHELIKDKHYTQEKFLFHVPITINYKASGNSYINENVRQFLKNNPDVNIIGLDRGERHLIYMSLIDQKGNIIQQKTFNTVERKKNGATVSVDYHEKLDQKEKERDAARKNWQTIGKIAELKEGYLSAVIHELVTLMIEHNAIIVMEDLNFGFKRGRFHVEKQVYQKFEHMLIDKLNYLVFKDRGLKESGGVLNGYQLAGIFESFQKLGKQSGFLFYVPAGYTSKIDPATGFANLLDMTNLTNVQKKRDFFAKFDSICFDEEKQMFAFTFDYKNFNRKDAQEMSRTKWTVYSNGKRIQFCGKGKASKHIENITEEFKTLFREFDYQNGNNILDSILEVGAALKAGEKPAKEIADFWDKLLVLFKLVLQMRNSDAKTGDDYIISPVMSEDGIFFDSREQEKLGNNAKLPKDADANGAYHIALKGLYLLKAFDKTPEDQLKKVDMKISNADWFRFAQEKEYSK

SEQ ID NO: 250 - protein, 1332 aa, Unknown
  Description of Unknown: uncultivated organism sequence
  Category: MG31 effectors
  Description: MG31-23 effector
MRTIDEFCGQKNGYSLSKTLRFELKPQGKTLENINKAGLVKVDEQRAKDYQDVKKLLDNYHKYFIDDILKNASEKDLDWKPLKDAVEEYQKDKTKDEQLKKEQDKMRSSIVKCFSADKKRFDHLTAATPYDLFKTELPEWLSKNSFPNLNNKAVETFKKFSTYFTGYQETRKNIYSAEAISTAVPFRIVHDNFPKFLQNLSIYKWINEKCPEVIKNAQNEIGSILAGKKLEDFFTLNSFNIFLTQTGANEQRGIDFYNQLIGGVKQQNIQIKGINQCINEYWQQHPEFAKENRRVKMVPLYKQILSDRSTLSFVIESIENDKELFDAVTKFNESITLIKDTETEKTSVLENISTLIKNISDFDANHVFVNAKDLAGISLVLFGKWDALQIRMNEFAKATFSTKQERSRWVKNLEENSTTKRKGVFSFAELDRVLAFSSEEINATEISIKDYFDTQYKKFFDAEKNEVVVTKEVTVLSVDDLLISIQSKWNSLQKVVNNSTTENQLKENTENVAILKDYLDCVNELFTRLKVLNVDKSEARDTSFYSVYDEVMETLSEIMPLYNKVRNYITKKSFDIGKYKLNFDNPTLASGWDLNKEDANTCVILEKDGNYYLGVMNAKNKPKFSAIQPDDSVPCYKKMVYKLLPGPNKMLPKVFFSTKGIATFNPPKEILEGYNAGKHKKGDTFDLNFCHKLIDYFKSAINQHPDWKNFNFKFSDTSTYKDTSDFYKEISEQGYKLSFVNVPVSIIDSWVDEGKLYLFQIYNKDFSPNSTGTPNMHTLYWRNLFSKENLDDVVLKLNGEAELFYRGVGIKNPVVHSVGSKVVNRTTKDGKTIPEAIHDEIYKYVNRKIPELSQETKKLYENGLVVVKTIQKNHELIKDKHYTQEKFLFHVPITINYKASGNSYINENVRQFLKNNPDVNIIGLDRGERHLIYMSLIDQKGNIIQQKTFNTVERKKNGATVSVDYHEKLDQKEKERDAARKNWQTIGKIAELKEGYLSAVIHELVTLMIEHNAIIVMEDLNFGFKRGRFHVEKQVYQKFEHMLIDKLNYLVFKDRGLKESGGVLNGYQLAGIFESFQKLGKQSGFLFYVPAGYTSKIDPATGFANLLDMTNLTNVQKKRDFFAKFDSICFDEEKQMFAFTFDYKNFNRKDAQEMSRTKWTVYSNGKRIQFCGKGKASKHIENLTEEFKTLFREFDYQNGNNILDSILEVGAALKAGEKPAKEIADFWDKLLVLFKLVLQIRNSDAKTGDDYIISPVMSEDGIFFDSREQEKLGNNAKLPKDADANGAYHIALKGLYLLKVFDKTPEDQLKKVDMKISNADWFRFAQEKEYSK

SEQ ID NO: 251 - protein, 1332 aa, Unknown
  Description of Unknown: uncultivated organism sequence
  Category: MG31 effectors
  Description: MG31-24 effector
MRTIDEFCGQKNGYSLSKTLRFELKPQGKTLENINKAGLVKVDEQRAKDYQDVKKLLDNYHKYFIDDILKNASEKDLDWKPLKDAVEEYQKDKTKDEQLKKEQDKMRSSIVKCFSADKKRFDHLTAATPYDLFKTELPEWLSKNSFPNLNNKAVETFKKFSTYFTGYQETRKNIYSAEAISTAVPFRIVHDNFPKFLQNLSIYKWINEKCPEVIKNAQNEIGSILAGKKLEDFFTLNSFNIFLTQTGANEQRGIDFYNQLIGGVKQQNIQIKGINQCINEYWQQHPEFAKENRRVKMVPLYKQILSDRSTLSFVIESIENDKELFDAVTKFNESITLIKDTETEKTSVLENISTLIKNISDFDANHVFVNAKDLAGISLVLFGKWDALQIRMNEFAKATFSTKQERSRWVKNLEENSTTKRKGVFSFAELDRVLAFSSEEINATEISIKDYFDTQYKKFFDAEKNEVVVTKEVTVLSVDDLLISIQSKWNSLQKVVNNSTTENQLKENTENVAILKDYLDCVNELFTRLKVLNVDKSEARDTSFYSVYDEVMETLSEIMPLYNKVRNYITKKSFDIGKYKLNFDNPTLASGWDLNKEDANTCVILEKDGNYYLGVMNAKNKPKFSAIQPDDSVPCYKKMVYKLLPGPNKMLPKVFFSTKGIATFNPPKEILEGYNAGKHKKGDTFDLNFCHKLIDYFKSAINQHPDWKNFNFKFSDTSTYKDTSDFYKEISEQGYKLSFVNVPVSIIDSWVDEGKLYLFQIYNKDFSPNSTGTPNMHTLYWRNLFSKENLDDVVLKLNGEAELFYRGVGIKNPVVHSVGSKVVNRTTKDGKTIPEAIHDEIYKYVNRKIPELSQETKKLYENGLVVVKTIQKNHELIKDKHYTQEKFLFHVPITINYKASGNSYINENVRQFLKNNPDVNIIGLDRGERHLIYMSLIDQKGNIIQQKTFNTVERKKNGATVSVDYHEKLDQKEKERDAARKNWQTIGKIAELKEGYLSAVIHELVTLMIEHNAIIVMEDLNFGFKRGRFHVEKQVYQKFEHMLIDKLDYLVFKDRGLKESGGVLNGYQLAGIFESFQKLGKQSGFLFYVPAGYTSKIDPATGFANLLDMTNLTNVQKKRDFFAKFDSICFDEEKQMFAFTFDYKNFNRKDAQEMSRTKWTVYSNGKRIQFCGKGKASKHIENLTEEFKTLFREFDYQNGNNILDSILEVGAALKAGEKPAKEIADFWDKLLVLFKLVLQIRNSDAKTGDDYIISPVMSEDGIFFDSREQEKLGNNAKLPKDADANGAYHIALKGLYLLKVFDKTPEDQLKKVDMKISNADWFRFAQEKEYSK

SEQ ID NO: 252 - protein, 1332 aa, Unknown
  Description of Unknown: uncultivated organism sequence
  Category: MG31 effectors
  Description: MG31-25 effector
MRTIDEFCGQKNGYSLSKTLRFELKPQGKTLENINKAGLVKVDEQRAKDYQDVKKLLDNYHKYFIDDILKNASEKDLDWKPLKDAVEEYQKDKTKDEQLKKEQDKMRSSIVKCFSADKKRFDHLTAATPYDLFKTELPEWLSKNSFPNLNNKAVETFKKFSTYFTGYQETRKNIYSAEAISTAVPFRIVHDNFPKFLQNLSIYKWINEKCPEVIKNAQNEIGSILAGKKLEDFFTLNSFNIFLTQTGANEQRGIDFYNQLIGGVKQQNIQIKGINQCINEYWQQHPEFAKENRRVKMVPLYKQILSDRSTLSFVIESIENDKELFDAVTKFNESITLIKDTETEKTSVLENISTLIKNISDFDANHVFVNAKDLAGISLVLFGKWDALQIRMNEFAKATFSTKQERSRWVKNLEENSTTKRKGVFSFAELDRVLAFSSEEINATEISIKDYFDTQYKKFFDAEKNEVVVTKEVTVLSVDDLLISIQSKWNSLQKVVNNSTTENQLKENTENVAILKDYLDCVNELFTRLKVLNVDKSEARDTSFYSVYDEVMETLSEIMPLYNKVRNYITKKSFDIGKYKLNFDNPTLASGWDLNKEDANTCVILEKDGNYYLGVMNAKNKPKFSAIQPDDSVPCYKKMVYKLLPGPNKMLPKVFFSTKGIATFNPPKEILEGYNAGKHKKGDTFDLNFCHKLIDYFKSAINQHPDWKNFNFKFSDTSTYKDTSDFYKEISEQGYKLSFVNVPVSIIDSWVDEGKLYLFQIYNKDFSPNSTGTPNMHTLYWRNLFSKENLDDVVLKLNGEAELFYRGVGIKNPVVHSVGSKVVNRTTKDGKTIPEAIHDEIYKYVNRKIPELSQETKKLYENGLVVVKTIQKNHELIKDKHYTQEKFLFHVPITINYKASGNSYINENVRQFLKNNPDVNIIGLDRGERHLIYMSLIDQKGNIIQQKTFNTVERKKNGATVSVDYHEKLDQKEKERDAARKNWQTIGKIAELKEGYLSAVIHELVTLMIEHNAIIVMEDLNFGFKRGRFHVEKQVYQKFEHMLIDKLNYLVFKDRGLKESGGVLNGYQLAGIFESFQKLGKQSGFLFYVPAGYTSKIDPATGFANLLDMTNLTNVQKKRDFFAKFDSICFDEEKQMFAFTFDYKNFPGKGSQEMSRTKWTVYSNGKRIQFCGKGKASKHIENITEEFKTLFREFDYQNGNNILDSILEVGAALKAGEKPAKEIADFWDKLLVLFKLVLQMRNSDAKTGDDYIISPVMSESGNFFDSREQEKLGNSAKLPKDADANGAYHIALKGLYLLKAFDKTPEDQLKKVDMKISNADWFRFAQEKEYSK

SEQ ID NO: 253 - protein, 1332 aa, Unknown
  Description of Unknown: uncultivated organism sequence
  Category: MG31 effectors
  Description: MG31-26 effector
MRTIDEFCGQKNGYSLSKTLRFELKPQGKTLENINKAGLVKVDEQRAKDYQDVKKLLDNYHKYFIDDILKNASEKDLDWKPLKDAVEEYQKDKTKDEQLKKEQDKMRSSIVKCFSADKKRFDHLTAATPYDLFKTELPEWLSKNSFPNLNNKAVETFKKFSTYFTGYQETRKNIYSAEAISTAVPFRIVHDNFPKFLQNLSIYKWINEKCPEVIKNAQNEIGSILAGKKLEDFFTLNSFNIFLTQTGANEQRGIDFYNQLIGGVKQQNIQIKGINQCINEYWQQHPEFAKENRRVKMVPLYKQILSDRSTLSFVIESIENDKELFDAVTKFNESITLIKDTETEKTSVLENISTLIKNISDFDANHVFVNAKDLAGISLVLFGKWDALQIRMNEFAKATFSTKQERSRWVKNLEENSTTKRKGVFSFAELDRVLAFSSEEINATEISIKDYFDTQYKKFFDAEKNEVVVTKEVTVLSVDDLLISIQSKWNSLQKVVNNSTTENQLKENTENVAILKDYLDCVNELFTRLKVLNVDKSEARDTSFYSVYDEVMETLSEIMPLYNKVRNYITKKSFDIGKYKLNFDNPTLASGWDLNKEDANTCVILEKDGNYYLGVMNAKNKPKFSAIQPDDSVPCYKKMVYKLLPGPNKMLPKVFFSTKGIATFNPPKEILEGYNAGKHKKGDTFDLNFCHKLIDYFKSAINQHPDWKNFNFKFSDTSTYKDTSDFYKEISEQGYKLSFVNVPVSIIDSWVDEGKLYLFQIYNKDFSPNSTGTPNMHTLYWRNLFSKENLDDVVLKLNGEAELFYRGVGIKNPVVHSVGSKVVNRTTKDGKTIPEAIHDEIYKYVNRKIPELSQETKKLYENGLVVVKTIQKNHELIKDKHYTQEKFLFHVPITINYKASGNSYINENVRQFLKNNPDVNIIGLDRGERHLIYMSLIDQKGNIIQQKTFNTVERKKNGATVSVDYHEKLDQKEKERDAARKNWQTIGKIAELKEGYLSAVIHELVTLMIEHNAIIVMEDLNFGFKRGRFHVEKQVYQKFEHMLIDKLNYLVFKDRGLKESGGVLNGYQLAGIFESFQKLGNQSGFLFYVPAGYTSKIDPATGFANLLDMTNLTNVQKKRDFFAKFDSICFDEEKQMFAFTFDYKNFNRKDAQEMSRTKWTVYSNGKRIQFCGKGKASKHIENITEEFKTLFREFDYQNGNNILDSILEVGAALKAGEKPAKEIADFWDKLLVLFKLVLQMRNSDAKTGDDYIISPVMSESGNFFDSREQEKLGNSAKLPKDADANGAYHIALKGLYLLKAFDKTPEDQLKKVDMKISNADWFRFAQEKEYNK

SEQ ID NO: 254 - protein, 1332 aa, Unknown
  Description of Unknown: uncultivated organism sequence
  Category: MG31 effectors
  Description: MG31-27 effector
MRTIDEFCGQKNGYSLSKTLRFELKPQGKTLENINKAGLVKVDEQRAKDYQDVKKLLDNYHKYFIDDILKNASEKDLDWKPLKDAVEEYQKDKTKDEQLKKEQDKMRSSIVKCFSADKKRFDHLTAATPYDLLKTELPEWLSKNSFPNLNNKAVETFKKFSTYFTGYQETRKNIYSAVAISTAVPFRIVHDNFPKFLQNLSIYKWINEKCPEVIKNAQNEIGSILAGKKLEDFFTLNSFNIFLTQTGANEQRGIDFYNQLIGGVKQQNIQIKGINQCINEYWQQHPEFAKENRRVKMVPLYKQILSDRSTLSFVIESIENDKELFDAVTKFNESITLIKDTETEKTSVLENISTLIKNISDFDTNHVFVNAKDLAGISLVLFGKWDALQIRMNEFAKATFSTKQERSRWVKKLEENSTTKRKGVFSFAELDRVLAFSSEEINATGIRIKDYFDTQYKKFFDAEKNEIVVTKEVTVLSVDDLLISIQAKWNSLQKLINNSKNENQLKENEENVAILKDYLDCVNDLFTRLKVLNVDKSEARDTSFYSVYDEVMETLSEIMPLYNKARNYITKKTFDIGKYKLNFDNPTLASGWDLNKEDANTCVILEKDGSYYLGVMNAKNKPKFSAIQPDDSVPCYKKMVYKLLPGPNKMLPKVFFSTKGIATFNPSKEILEGYNAGKHKKGDTFDLNFCHKLIDYFKSAINQHPDWKNFNFKFSDTSTYKDTSDFYKEISEQGYKLSFVNVPVSIIDSWVDEGKLYLFQIYNKDFSPNSTGTPNMHTLYWRNLFSKENLDDVVLKLNGEAELFYRGVGIKNPVVHAVGSKVVNRTTKDGKTIPEAIHDEIYKYVNRKIPELSQDAKKLYENGLVVVKTIQKNHELIKDKHYTQEKFLFHVPITINYKASGNSYINENVRQFLKNNPDVNIIGLDRGERHLIYMSLIDQKGNIIQQKTFNTVERKKNGATVSVDYHEKLDQKEKERDAARKNWQTIGKIAELKEGYLSAVIHELVTLMIEHNAIIVMEDLNFGFKRGRFHVEKQVYQKFEHMLIDKLNYLVFKDRGLKESGGVLNGYQLAGVFESFQKLGKQSGFLFYVPAGYTSKIDPATGFANLLDMTNLTNVQKKRDFFAKFDSICFDEEKQMFAFTFDYKNFNRKDAQEMSRTKWTVYSNGKRIQFCGKGKASKHIENLTEEFKTLFREFDYQNGNNILDSILEVGAALKAGEKPAKEIADFWDKLLVLFKLVLQIRNSDAKTGDDYIISPVMSEDGIFFDSREQEKLGNNAKLPKDADANGAYHIALKGLYLLKAFDKTPEDQLKKVDMKISNADWFRFAQEKEYNK

SEQ ID NO: 255 - protein, 1332 aa, Unknown
  Description of Unknown: uncultivated organism sequence
  Category: MG31 effectors
  Description: MG31-28 effector
MRTIDEFCGQKNGYSLSKTLRFELKPQGKTLENINKAGLVKVDEQRAKDYQDVKKLLDNYHKYFIDDILKNASEKDLDWKPLKDAVEEYQKDKTKDEQLKKEQDKMRSSIVKCFSADKKRFDHLTAATPYDLFKTELPEWLSKNSFPNLNNKAVETFKKFSTYFTGYQETRKNIYSAEAISTAVPFRIVHDNFPKFLQNLSIYKWINEKCPEVIKNAQNEIGSILAGKKLEDFFTLNSFNIFLTQTGANEQRGIDFYNQLIGGVKQQNIQIKGINQCINEYWQQHPEFAKENRRVKMVPLYKQILSDRSTLSFVIESIENDKELFDAVTKFNESITLIKDTETEKTSVLENISTLIKNISDFDANHVFVNAKDLAGISLVLFGKWDALQIRMNEFAKATFSTKQERSRWVKKLEENSTTKRKGVFSFAELDRVLAFSSEEINATEISIKDYFDTQYKKFFDAEKNEVVVTKEVTVLSVDDLLISIQSKWNSLQKVVNNSTTENQLKENTENVAILKDYLDCVNELFTRLKVLNVDKSEARDTSFYSVYDEVMETLSEIMPLYNKVRNYITKKSFDIGKYKLNFDNPTLASGWDLNKEDANTCVILEKDGNYYLGVMNAKNKPKFSAIQPDDSVPCYKKMVYKLLPGPNKMLPKVFFSTKGIATFNPPKEILEGYNAGKHKKGDTFDLNFCHKLIDYFKSAINQHPDWKNFNFKFSDTSTYKDTSDFYKEISEQGYKLSFVNVPVSIIDSWVDEGKLYLFQIYNKDFSPNSTGTPNMHTLYWRNLFSKENLDDVVLKLNGEAELFYRGVGIKNPVVHSVGSKVVNRTTKDGKTIPEAIHDEIYKYVNRKIPELSQETKKLYENGLVVVKTIQKNHELIKDKHYTQEKFLFHVPITINYKASGNSYINENVRQFLKNNPDVNIIGLDRGERHLIYMSLIDQKGNIIQQKTFNTVERKKNGATVSVDYHEKLDQKEKERDAARKNWQTIGKIAELKEGYLSAVIHELVTLMIEHNAIIVMEDLNSGFKRGRFHVEKQVYQKFEHMLIDKLNYLVFKDRGLKESGGVLNGYQLAGIFESFQKLGKQSGFLFYVPAGYTSKIDPATGFANLLDMTNLTNVQKKRDFFAKFDSICFDEEKQMFAFTFDYKNFNRKDAQEMSRTKWTVYSNGKRIQFCGKGKASKHIENLTEEFKTLFREFDYQNGNNILDSILEVGAALKAGEKPAKEIADFWDKLLVLFKLVLQIRNSDAKTGDDYIISPVMSEDGIFFDSREQEKLGNNAKLPKDADANGAYHIALKGLYLLKVFDKTPEDQLKKVDMKISNADWFRFAQEKEYSK

SEQ ID NO: 256 - protein, 1332 aa, Unknown
  Description of Unknown: uncultivated organism sequence
  Category: MG31 effectors
  Description: MG31-29 effector
MRTIDEFCGQKNGYSLSKTLRFELKPQGKTLENINKAGLVKVDEQRAKDYQDVKKLLDNYHKYFIDDILKNASEKDLDWKPLKDAVEEYQKDKTKDEQLKKEQDKMRSSIVKCFSADKKRFDHLTAATPYDLFKTELPEWLSKNSFPNLNNKAVETFKKFSTYFTGYQETRKNIYSAEAISTAVPFRIVHDNFPKFLQNLSIYKWINEKCPEVIKNAQNEIGSILAGKKLEDFFTLNSFNIFLTQTGANEQRGIDFYNQLIGGVKQQNIQIKGINQCINEYWQQHPEFAKENRRVKMVPLYKQILSDRSTLSFVIESIENDKELFDAVTKFNESITLIKDTETEKTSVLENISTLIKNISDFDANHVFVNAKDLAGISLVLFGKWDALQIRMNEFAKATFSTKQERSRWVKNLEENSTTKRKGVFSFAELDRVLAFSSEEINATEISIKDYFDTQYKKFFDAEKNEVVVTKEVTVLSVDDLLISIQSKWNSLQKVVNNSTTENQLKENTENVAILKDYLDCVNELFTRLKVLNVDKSEARDTSFYSVYDEVMETLSEIMPLYNKVRNYITKKSFDIGKYKLNFDNPTLASGWDLNKEDANTCVILEKDGNYYLGVMNAKNKPKFSAIQPDDSVPCYKKMVYKLLPGPNKMLPKVFFSTKGIATFNPPKEILEGYNAGKHKKGDTFDLNFCHKLIDYFKSAINQHPDWKNFNFKFSDTSTYKDTSDFYKEISEQGYKLSFVNVPVSIIDSWVDEGKLYLFQIYNKDFSPNSTGTPNMHTLYWRNLFSKENLDDVVLKLNGEAELFYRGVGIKNPVVHSVGSKVVNRTTKDGKTIPEAIHDEIYKYVNRKIPELSQETKKLYENGLVVVKTIQKNHELIKDKHYTQEKFLFHVPITINYKASGNSYINENVRQFLKNNPDVNIIGLDRGERHLIYMSLIDQKGNIIQQKTFNTVERKKNGATVSVDYHEKLDQKEKERDAARKNWQTIGKIAELKEGYLSAVIHELVTLMIEHNAIIVMEDLNFGFKRGRFHVEKQVYQKFEHMLIDKLNYLVFKDRGLKESGGVLNGYQLAGIFESFQKLGKQSGFLFYVPAGYTSKIDPATGFANLLDMTNLTNVQKKRDFFAKFDSICFDEEKQMFAFTFDYKNFNRKDAQEMSRTKWTVYSNGKRIQFCGKGKAYKHIENLTEEFKTLFREFDYQNGNNILDSILEVGAALKAGEKPTKEIADFWDKLLVLFKLVLQMRNSDAKTGDDYIISPVMSESGNFFDSREQEKLGNSAKLPKDADANGAYHIALKGLYLLKAFDKTPEDQLKKVDMKISNADWFRFAQEKEYNK

SEQ ID NO: 257 - protein, 1332 aa, Unknown
  Description of Unknown: uncultivated organism sequence
  Category: MG31 effectors
  Description: MG31-30 effector
MRTIDEFCGQKNGYSLSKTLRFELKPQGKTLENINKAGLVKVDEQRAKDYQDVKKLLDNYHKYFIDDILKNASEKDLDWKPLKDAVEEYQKDKTKDEQLKKEQDKMRSSIVKCFSADKKRFDHLTAATPYDLFKTELPEWLSKNSFPNLNNKAVETFKKFSTYFTGYQETRKNIYSAVAISTAVPFRIVHDNFPKFLQNLSIYKWINEKCPEVIKNAQNEIGSILAGKKLEDFFTLNSFNIFLTQTGANEQRGIDFYNQLIGGVKQQNIQIKGINQCINEYWQQHPEFAKENRRVKMVPLYKQILSDRSTLSFVIESIENDKELFDAVTKFNESITLIKDTETEKTSVLENISTLIKNISDFDTNHVFVNAKDLAGISLVLFGKWDALQIRMNEFAKATFSTKQERSRWVKKLEENSTTKRKGVFSFAELDRVLAFSSEEINATGIRIKDYFDTQYKKFFDAEKNEIVVTKEVTVLSVDDLLISIQAKWNSLQKLINNSKNENQLKENEENVAILKDYLDCVNDLFTRLKVLNVDKSEARDTSFYSVYDEVMETLSEIMPLYNKARNYITKKTFDIGKYKLNFDNPTLASGWDLNKEDANTCVILEKDGSYYLGVMNAKNKPKFSAIQPDDSVPCYKKMVYKLLPGPNKMLPKVFFSTKGIATFNPSKEILEGYNAGKHKKGDTFDLNFCHKLIDYFKSAINQHPDWKNFNFKFSDTSTYKDTSDFYKEISEQGYKLSFVNVPVSIIDSWVDEGKLYLFQIYNKDFSPNSTGTPNMHTLYWRNLFSKENLDDVVLKLNGEAELFYRGVGIKNPVVHAVGSKVVNRTTKDGKTIPEAIHDEIYKYVNRKIPELSQDAKKLYENGLVVVKTIQKNHELIKDKHYTQEKFLFHVPITINYKASGNSYINENVRQFLKNNPDVNIIGLDRGERHLIYMSLIDQKGNIIQQKTFNTVERKKNGATVSVDYHEKLDQKEKERDAARKNWQTIGKIAELKEGYLSAVIHELVTLMIEHNAIIVMEDLNFGFKRGRFHVEKQVYQKFEHMLIDKLNYLVFKDRGLKESGGVLNGYQLAGVFESFQKLGKQSGFLFYVPAGYTSKIDPATGFANLLDMTNLTNVQKKRDFFAKFDSICFDEEKQMFAFTFDYKNFNRKDAQEMSRTKWTVYSNGKRIQFCGKGKASKHIENLTEEFKTLFREFDYQNGNNILDSILEVGAALKAGEKPAKEIADFWDKLLVLFKLVLQIRNSDAKTGDDYIISPVMSEDGIFFDSREQEKLGNNAKLPKDADANGAYHIALKGLYLLKAFDKTPEDQLKKVDMKISNADWFRFAQEKEYNK

SEQ ID NO: 258 - protein, 1332 aa, Unknown
  Description of Unknown: uncultivated organism sequence
  Category: MG31 effectors
  Description: MG31-31 effector
MRTIDEFCGQKNGYSLSKTLRFELKPQGKTLENINKAGLVKVDEQRAKDYQDVKKLLDNYHKYFIDDILKNASEKDLDWKPLKDAVEEYQKDKTKDEQLKKEQDKMRSSIVKCFSADKKRFDHLTAATPYDLFKTELPEWLSKNSFPNLNNKAVETFKKFSTYFTGYQETRKNIYSAEAISTAVPFRIVHDNFPKFLQNLSIYKWINEKCPEVIKNAQNEIGSILAGKKLEDFFTLNSFNIFLTQTGANEQRGIDFYNQLIGGVKQQNIQIKGINQCINEYWQQHPEFAKENRRVKMVPLYKQILSDRSTLSFVIESIENDKELFDAVTKFNESITLIKDTETEKTSVLENISTLIKNISDFDANHVFVNAKDLAGISLVLFGKWDALQIRMNEFAKATFSTKQERSRWVKNLEENSTTKRKGVFSFAELDRVLAFSSEEINATEISIKDYFDTQYKKFFDAEKNEVVVTKEVTVLSVDDLLISIQSKWNSLQKVVNNSTTENQLKENTENVAILKDYLDCVNELFTRLKVLNVDKSEARDTSFYSVYDEVMETLSEIMPLYNKVRNYITKKSFDIGKYKLNFDNPTLASGWDLNKEDANTCVILEKDGNYYLGVMNAKNKPKFSAIQPDDSVPCYKKMVYKLLPGPNKMLPKVFFSTKGIATFNPPKEILEGYNAGKHKKGDTFDLNFCHKLIDYFKSAINQHPDWKNFNFKFSDTSTYKDTSGFYKEISEQGYKLSFVNVPVSIIDSWVDEGKLYLFQIYNKDFSPNSTGTPNMHTLYWRNLFSKENLDDVVLKLNGEAELFYRGVGIKNPVVHSVGSKVVNRTTKDGKTIPEAIHDEIYKYVNRKIPELSQETKKLYENGLVVVKTIQKNHELIKDKHYTQEKFLFHVPITINYKASGNSYINENVRQFLKNNPDVNIIGLDRGERHLIYMSLIDQKGNIIQQKTFNTVERKKNGATVSVDYHEKLDQKEKERDAARKNWQTIGKIAELKEGYLSAVIHELVTLMIEHNAIIVMEDLNFGFKRGRFHVEKQVYQKFEHMLIDKLNYLVFKDRGLKESGGVLNGYQLAGIFESFQKLGKQSGFLFYVPAGYTSKIDPATGFANLLDMTNLTNVQKKRDFFAKFDSICFDEEKQMFAFTFDYKNFPGKGSQEMSRTKWTVYSNGERIQFCGKGKASKHIENLTEEFKTLFREFDYQNGNNILDSILEVGAALKAGEKPTKEIADFWDKLLVLFKLVLQMRNSDAKTGDDYIISPVMSESGNFFDSREQEKLGNNAKLPKDADANGAYHIALKGLYLLKAFDKTPEDQLKKVDMKISNADWFRFAQEKEYNK

SEQ ID NO: 259 - protein, 1332 aa, Unknown
  Description of Unknown: uncultivated organism sequence
  Category: MG31 effectors
  Description: MG31-32 effector
MRTIDEFCGQKNGYSLSKTLRFELKPQGKTLENINKAGLVKVDEQRAKDYQDVKKLLDNYHKYFIDDILKNASEKDLDWKPLKDAVEEYQKDKTKDEQLKKEQDKMRSSIVKCFSADKKRFDHLTAATPYDLFKTELPEWLSKNSFPNLNNKAVETFKKFSTYFTGYQETRKNIYSAEAISTAVPFRIVHDNFPKFLQNLSIYKWINEKCPEVIKNAQNEIGSILAGKKLEDFFTLNSFNIFLTQTGANEQRGIDFYNQLIGGVKQQNIQIKGVNQCINEYWQQHPEFAKENRRVKMVPLYKQILSDRSTLSFVIESIENDKELFDAVTKFNESITLIKDTETEKTSVLENISTLIKNISDFDANHVFVNAKDLAGISLVLFGKWDALQIRMNEFAKATFSTKQERSRWVKNLEENSTTKRKGVFSFAELDRVLAFSSEEINATEISIKDYFDTQYKKFFDAEKNEVVVTKEVTVLSVDDLLISIQSKWNSLQKVVNNSTTENQLKENTENVAILKDYLDCVNELFTRLKVLNVDKSEARDTSFYSVYDEVMETLSEIMPLYNKVRNYITKKSFDIGKYKLNFDNPTLASGWDLNKEDANTCVILEKDGNYYLGVMNAKNKPKFSAIQPDDSVPCYKKMVYKLLPGPNKMLPKVFFSTKGIATFNPPKEILEGYNAGKHKKGDTFDLNFCHKLIDYFKSAINQHPDWKNFNFKFSDTSTYKDTSDFYKEISEQGYKLSFVNVPVSIIDSWVDEGKLYLFQIYNKDFSPNSTGTPNMHTLYWRNLFSKENLDDVVLKLNGEAELFYRGVGIKNPVVHSVGSKVVNRTTKDGKTIPEAIHDEIYKYVNRKIPELSQETKKLYENGLVVVKTIQKNHELIKDKHYTQEKFLFHVPITINYKASGNSYINENVRQFLKNNPDVNIIGLDRGERHLIYMSLIDQKGNIIQQKTFNTVERKKNGATVSVDYHEKLDQKEKERDAARKNWQTIGKIAELKEGYLSAVIHELVTLMIEHNAIIVMEDLNFGFKRGRFHVEKQVYQKFEHMLIDKLNYLVFKDRGLKESGGVLNGYQLAGIFESFQKLGKQSGFLFYVPAGYTSKIDPATGFANLLDMTNLTNVQKKRDFFAKFDSICFDEEKQMFAFTFDYKNFNRKDAQEMSRTKWTVYSNGERIQFCGKGKASKHIENITEEFKTLFREFDYQNGNNILDSILEVGAALKAGEKPAKEIADFWDKLLVLFKLVLQMRNSDAKTGDDYIISPVMSESGNFFDSREQEKLGNSAKLPKDADANGAYHIALKGLYLLKAFDKTPEDQLKKVDMKISNADWFRFAQEKEYNK

SEQ ID NO: 260 - protein, 1332 aa, Unknown
  Description of Unknown: uncultivated organism sequence
  Category: MG31 effectors
  Description: MG31-33 effector
MRTIDEFCGQKNGYSLSKTLRFELKPQGKTLENINKAGLVKVDEQRAKDYQDVKKLLDNYHKYFIDDILKNASEKDLDWKPLKDAVEEYQKDKTKDEQLKKEQDKMRSSIVKCFSADKKRFDHLTAATPYDLFKTELPEWLSKNSFPNLNNKAVETFKKFSTYFTGYQETRKNIYSAEAISTAVPFRIVHDNFPKFLQNLSIYKWINEKCPEVIKNAQNEIGSILAGKKLEDFFTLNSFNIFLTQTGAKEQRGIDFYNQLIGGVKQQNIQIKGINQCINEYWQQHPEFAKENRRVKMVPLYKQILSDRSTLSFVIESIENDKELFDAVTKFNESITLIKDTETEKTSVLENISTLIKNISDFDANHVFVNAKDLAGISLVLFGKWDALQIRMNEFAKATFSTKQERSRWVKNLEENSTTKRKGVFSFAELDRVLAFSSEEINATEISIKDYFDTQYKKFFDAEKNEVVVTKEVTVLSVDDLLISIQSKWNSLQKVVNNSTTENQLKENTENVAILKDYLDCVNELFTRLKVLNVDKSEARDTSFYSVYDEVMETLSEIMPLYNKVRNYITKKSFDIGKYKLNFDNPTLASGWDLNKEDANTCVILEKDGNYYLGVMNAKNKPKFSAIQPDDSVPCYKKMVYKLLPGPNKMLPKVFFSTKGIATFNPPKEILEGYNAGKHKKGDTFDLNFCHKLIDYFKSAINQHPDWKNFNFKFSDTSTYKDTSDFYKEISEQGYKLSFVNVPVSIIDSWVDEGKLYLFQIYNKDFSPNSTGTPNMHTLYWRNLFSKENLDDVVLKLNGEAELFYRGVGIKNPVVHSVGSKVVNRTTKDGKTIPEAIHDEIYKYVNRKIPELSQETKKLYENGLVVVKTIQKNHELIKDKHYTQEKFLFHVPITINYKASGNSYINENVRQFLKNNPDVNIIGLDRGERHLIYMSLIDQKGNIIQQKTFNTVERKKNGATVSVDYHEKLDQKEKERDAARKNWQTIGKIAELKEGYLSAVIHELVTLMIEHNAIIVMEDLNFGFKRGRFHVEKQVYQKFEHMLIDKLNYLVFKDRGLKESGGVLNGYQLAGIFESFQKLGKQSGFLFYVPAGYTSKIDPATGFANLLDMTNLTNVQKKRDFFAKFDSICFDEEKQMFAFTFDYKNFNRKDAQEMSRTKWTVYSNGKRIQFCGKGKASKHIENLTEEFKTLFREFDYQNGNNILDSILEVGAALKAGEKPAKEIADFWDKLLVLFKLVLQIRNSDAKTGDDYIISPVMSEDGIFFDSREQEKLGNNAKLPKDADANGAYHIALKGLYLLKAFDKTPEDQLKKVDMKISNADWFRFAQEKEYNK

SEQ ID NO: 261 - protein, 1294 aa, Unknown
  Description of Unknown: uncultivated organism sequence
  Category: MG32 effectors
  Description: MG32-1 effector
MTIFDSFTGLYKLSKTLRFELKPVGKTVEFLKEHNGLLGDFKRAEDYPKVKAILDEAHKDLIERALTGVELDWQPLADALEESRIGEKNTNLKDVQKKFREKIATLLSEDKGYEKLTDPTPRNFIQEKLKLTSNNLITPLKTFEKFACYFKGFQENRKNVYSSEEIVTAVPYRVVNDNFPKYYSNVKVFESLQAKYPGIIKAVEDNLKDYLNGCKLSSIFTLNNYSSCLTQSGISFINTIIGGYSVKDAPKIRGVNEEVNQYLQKHPELLREERPPRMTLLFKQILSDRETQSFVMTQFQNDTEAIAAIDAFAELLKEEKVLSFVVELLSTISSTTQNIYVAGSELAKISMRLSGYWGLIRDAQESCIETILAMTKVTKAKEKELREALEANVFALTDLLALDLTLVDEEDNEKKYSLLDYWSRENCDSVIQKVKDTETAYNTLKARVTTSNWLHESHDNVEIVKAYLDALQELLHYLKPLRVSNEINKNQGFYAEFDALYDTLELIIPLYNRVRNYLTRKVGDAQKVRLYFDLTTRTEGWMESKIKERKTVLFERDGAYYLGFIPSKNRLPAFNKFIPQGGDATYRRMVYKQIGNVSNYLSIKQMKPTLLRQISLASSDEKREYYTNILKWLGGEYDADKKVWKNGKFDKHTLSALELAQLISYVINEFIPNYDNLRGYKFKFNAPESYPNWKSFTDHVQMMGCYSINFEEVSKCKIDDLVERGDLYLFQLWNKDFSENSTGLPNLHTLYWRSLFAPENLQQAILQLNGGAELFYRFAPLQKPQTIHKKGTKLVNRHTCDGKLIPEVYYQEIYKWANGKLPEGLSATAKDWMAHATIKDAKHQITKDRRYTEDKYFFHVPITFNFTIANKSKSLNSLIQDATRNNPDVNIIGLDRGERNLLYLTLINQKGEILQQKSFNVVEHVNSEGKTIETNYHDKLKDRERDRDRARKSWDTIGKIKDLKEGYLSAVIHEIVTLMLEHNAIIVLEDLNSDFKRGRFCVERQVYQKFEKMLIDKLNYLSLKTRAITVPGGILKGYQLTEKFESFQKLGKQSGILFYVPAAYTSKIDPTTGFTNLFKLKKCTNAANRKVFFELFDEIRYDEKRKAFAFTFDYDKFKTSQTSYQKKWTVYSAETRLTYQREKDGNGREIIIRPTTLITDAVKLLGIEVKDGLNLLEVIQKTPAEPRTAKFYGDLFYAFERTLQMRNSSSETGDDYIESPVENTDGIRFDTREEAKKGKDAKLPIDADANGAYHIALKGLWYLKNDFNRDKDGKIQKITHAQWLKFMQAKEWLK

SEQ ID NO: 262 - protein, 1460 aa, Unknown
  Description of Unknown: uncultivated organism sequence
  Category: MG37 effectors
  Description: MG37-1 effector
MASTNQSAVPTTQRAYMLRLHPARPFGNHEWKREAADMQAALWATHEAVNRGAKTFGEWLLTLRGGLSYRLADEPITEATGRSERTPTDRARRNRRILLALSWFSVEDESGAPVNSDVIVAYGDGCKLRQEAQQERNRKLIEALGSVLHAQGVPPSEIGELQAPGTWLGDCAQSLSSAIRPDAVWVNRSEVFSQLCTELPGLDADYAAVTTFSFFGGSEKYFYVDDGAAEENEAGEAGEEAADFRQKARQWISTNFGTGKKSDNARISAALKSLAGGNLDEFSGRSKADLVKYCVGLLGIDPSNATEDALRVAVGWNTGRPSKGRLAIQNLPDLLTKDGIGVFRRKIMEEADEKSKNASAKNVPAWIANMRAKIEAGIGIPYVTDRNLIGEYSVMLDHAARRVSIAQTWTKRAEAERRRFSDDSERMHDVPHAARSWLDRFSETRSSDTGAVGEYRIRPRALQGWELVVQRWSKSNCRTEEDRIAAVREIQADWEDNKKIGDIPLFEALATDDARCVWSPDGSSDPDILKRYVAASHARAKQAAFKVPAYRHPHPLSHPVFCDFGNSRWKIRFAVHEREYARRNGKGTVNKPGDAQGLQMGLWNGNGVQPHEMRWASKRLSVDLALDDLAVSDAVPVTLGSRFGRAALPSVLPVSVLNVFDEGDWNGRLQVPRSQLERIASLLAKNKVAAAKEFRQKLRWSLTFSPRLQPTGPFHDFAAQHGITPNRKGEYFPNGEQNRITKREGKAKLVLSRLPGLRLLSVDLGHRFAAACAVWESLSGPDFAKEIFGLTIESGSAEGLYLHTRHMDESGKERSTIYRRIGSDALPDGSDHPAPWARLSRQFLIKLQGEERSARKAAPTEIYSVRELEAGFGRVSEKDDLPTQVDELMSHTIRVSRLALRRHGDRARIAFAMISSYKPMPGDRKYNFFPNDTSDGFDDTPEQRHRKHIEFIQDALLLWHDLISSKGWQDQAAEQLWKQHIATLLGYQHPEPINRDGSGPERKKKRNENFDRLRGAAEALINNAPLRLTLNAEWKGRWESDDQDWRSHLRRLQDWARPPASKGSQAIRHVGGLSLTRLATLTELRRKVQVGFFTRLLPNGDKARIGERFGQKTLGVIEEMREQRVKQLASRITEAALGIGRVQPGTKHDPRRPRVRVDLPCHAIVIESLRNYRPDDLQTRRENRALMEWSSGKVRKYLEEACYLYGLHLREVPPNYTSRQCSRTGLPGIRCADVPIEQFRAAPFWRKIVDSARKRISQNKGTEEDRFFCDLDETYGNDVNPQAGRVATLRLPRKGGDLFVSAPVWAQLNRKDQYGNDRVSARPNDWSSKRALQADLNAAANIGLRALLDPDFPGTWWYVPCTARDGRATQDKVKGSSCFVAENWRILSVSERSATKREVVNAWHDPSTCSLSNRLDWRETTHYWNTVRARAVEALRQFNGLPRSNSAPVHNSLESALRER

SEQ ID NO: 263 - protein, 804 aa, Unknown
  Description of Unknown: uncultivated organism sequence
  Category: MG37 effectors
  Description: MG37-2 effector
LAELDLFNGRTIKAVRLRWQSKRLTNDLALHQTAVIDDATPVSRANRLGRAAAGAGSRSAVRILGVFDHKHWNGRLQAPRAQLHKLAKIRDNATVPEPARRQKYERGLSTIRWILTFSPRLQQKGPWLEYAAAQNLSAKSPHFAENRGRGWLAQHLLGRLDGLRILSVDLGQRYAAACAVWEAMSGDQVRATCASAGAPEPDKSALSIRVSVGGRRTILRRVGEDAWARLDRCFVIRLAGEDVPARKASPAEIQAVQTLCRELGYSDASRAAAAVDKLMSYALRVLRLGLQRHARRAMVVFGLAAKEKVVLGNQLRALSEDERTDSIGTALADWWTFAVSSRWPDPHAAALWDEHIADRAAGIELPPDLESFSFRERLLVREKLLKDVRPIAQALRPEEVEQLTEIWRLQWLGEEARWCKRLRWIKDWLLPRGSGAQCNSIRRVGGLSLRRLNNLRALYRLEKSFAGRLRVGVGGHRCESQVPSEEFGRKTLTALERLRENRVKQTASRIVAAALGLGKDLKRGHGERFAPCHAVVIENLTNYRPDEVRSRRENRQLMDWCAAKVKKYLNESCDLHGILLREVQAAYTSRQDSLSGAPGVRCADVPIRDFMACGGYWERELRRADKANSSGRSDARSRYLIALRDRISAAIPYPAAAATKGAVRIPVDGGPVFVSADPQSPAAHGTQADMNAAANIGLRALLDPDWAGRWWYVPCNASTGVPVADGLKGSALIQPNLTLFSSHNGAEKKPKRQVVNLWRDVSARPLNVGIWRTYAQYRASVMERVTAILLTGLQTLGDDVDLPF

SEQ ID NO: 264 - protein, 1484 aa, Unknown
  Description of Unknown: uncultivated organism sequence
  Category: MG37 effectors
  Description: MG37-3 effector
MPDEALVNGSTAGTDLMVVTQRAYTLRLQGVDPQDHSWRDALWKTHEAVNKGAWAFGDWLLTLRGGLDHSLADAKVKGGKGNPDRDPTDEERKARRILLALSWLSVESKKGAPEKYRLDKQSSARSNLNPEEALREILKGRGLGKSEIESWVQDCSASLSAPIRDDAVWVNRSKAFDDAVKSVGCSLTRDEAWDMLERFFGSRDAYLAPAKGSEDESSETEQEDKAKDLVQKAGQWLSSRFGTGKGADFSRMAKIYEEIANRAGKAQPGMTGDKAIADLATALSKFSPTSNDLQGVLGLISGPGYKSATRKLLKRFRDKTPVTQEDFQNLQDKAREDAQKCKNKTGSKGHRPYADAVLRDVESVCGFTYLQDGGSARHSEFAVMLDHAARRVSLAHTWIKRAEAERSRFQEDAKKVDQVPEAAKKWLNNFCLERSRAAGALEPYRIRRRAVDGWKEVVAAWSKPDCKTTEDRIAAARALQDDPEIDKFGDIQLFEALAEDDAVCIWHKDDDPANPPDPQPLLDYVAATDAEFKKRHFKVPMYRHPDELLHPVFCDFGNSRWNICFDVHKNTKTPFPRTLCLTLWTGSEGMKPVPLRWQSKRLARDLAFGQDTRKDGASDVTRADRLGRAASNVGKNDAVNIAGLFEEKHWNGRLQAPRRQLEAIARYVEKHGWNEKAKNIRDAIQWSVTFSAKLQPNGPWCAYAKEHGLRKDPQYWPHTEVNKDRKGHARLILSRLPGLRVLSVDLGHRYAAACAVWEAISTRQFQQNIEDKKILRGGTDAESLYCHTEHTTDGKKHTTIYRRIGADTLPDGKPHPAPWARLDRQFLIKLQGEAEGAREASNEEIWAVHKMETVLGRSVPLIDRLVAAGWGSTEKQKARLDAIKKLGWVPIKRADASEDADTEEEEELAFRPSLSVDDLMSSAVRTMRLALKRHGDRARIAFAMTAAYKPMPGDRRYYFTESKDLSATEDATARNSKHIEFIQDALLLWYGLISSRGWRDEAARQLWDDHVAKLHGYKAPEEIGEDVSGAEREKKQKENREKLYDVGKALAQNESLRKTLHHAWKTRWEEDDGRWKKQLRWFKDWILPRGKYASDPSIRKVGGLSLTRLATLTEFRRKVQVGFFTRLKPYGTRAETKEQFGQSTLDALEHLREQRVKQLASRIVEAALGIGSENKQHWEGGKRPRARSKDPRFAPCYAVVIEDLTHYRPEETRTRRENRQLMSWSSSKVKKYLAEACQLHGLHLREVSAGYTSRQDSRTGAPGIRCHDVPVKEFMRSPFWRKQVAQAEKKQDEGKGDARERFLCVLNAKWKGQPEADWEKAGAVRVPLKGGEIFVSADQNSPAAKGLHADLNAAANIGLRVLTDPDWPGKWWYVPCDPVSFLPVKDKVEGSAVVKPDQPLPKSAQAQSGDGAKDKKKPGKRGASKSKESKKVVNLWCDISSSPLECREEWKEYAAYQNEVQSRVIHILEKQIKRLRQATARGVQ

SEQ ID NO: 265 - protein, 1500 aa, Unknown
  Description of Unknown: uncultivated organism sequence
  Category: MG37 effectors
  Description: MG37-4 effector
MATAINYPTTQRAYTLRLRGIDPQDQSWRDALWATHEAVNRGAKVFGEWLLTLRGGLDHQLADAPVKVRGGTTRLPSDEERRDRRVLLALSWLSVEDAHGAPPDASLIVAKGTDSADCRARKLADALIAILQARSVAASEIGDPSKPPEDQPGTWLGDCMGSLSAAIRDDAVWVNRSKAFDAATQSCPSLTRDEIWDFLEPFFASPDAYLKPERAESDEGDSTSAATEDKAKDLVQKAGGWLSKRMGAGGGANFQDLARAYQAIAQWASSAQPGQSAQQAVGSLAGYLSQHGFSPTANDATGVLAVISGPGYKSATRNHITAIATSPEITPQDLSKLQELATKDKAGCSSKIGGKGPRPYATMILQQVEAACGFTYLQSDGPARHREFSVMLDHAARRVNVAHSWIKNAEAERRQFESDARRIKKVPQDALNWLRGYCEERGGASGSLEGYRIRRRAIDGWDQVVIRWSRSDCQSADDRIAAARQLQDDPEIDKFGDIQLFEALAAEEALCVWKPDGNPTAQPLKDFVAATEADAKKKRFKVPAYRHPDPLRHPVFTDFGNSRWGIEYSAHRAPAKCDELGQQVDRLTQAVAEAQRNLDGATAAQRASRESKLAEAQSKLVAAQTEFAAINDPHRVELKLWNGQAVAAIPMRWSSKRLIADLSLRRATQPSSDQRIGVTRADRLGRAAGNADDGRPVTITGLFQQDHWNGRLQAPRAQLDAIAKHVDKHGWDAKARRQIARIRWVVSFSAELSQQGPWFEFCHRFGEDAPARPFVSRHGEYAVKHRDNDQRKGHAKLILSRLPGLRVLAVDLGHRYAAACAVWEAISSDQMRQACAAANAPAPHPLAMYIHLKSTTAKGKPTTTIYRRIGPDKLPDDTPHPAPWARLDRQFLIKLPGEDRPARAASPDEIKAVEDFEDSVGRVRTAVDPPRKRGVDLLMHDAVRTARLALARHGRRARIAFQLISQVRILPGGRPQTLDDAGRRDLLNDTLADWYALATDSRWTDAAARQLWNERLAALNGGFTIDPPADASQPEAERTRAQRRQAEQELRHRLASLVEALFCNPTLCQQLHQAWTDRWNADDQQWRSRLKWLSRWLLPRGGSRRDGSRRHVGGLSLTRISTLIDFRRKVQVGYFTRLRPDGSRAEIGPQFGQSTLDAIQRLKDQRIKQLTSRIVEAALGIGVEQDRIWDAAKRKWRTVKRPREPRYHVDDQGVQQRDPRFQACHAVVIEDLSHYRPEETRTRRENRATMDWKSAETRKRLADHCQLYGLHLRDVNPQYTSRQDSRTGAPGCRCVDVSVADFLTKPAWRKQVAQARGKVASNRGDARDRLLVELDHQLTTANSLRGEMDSLRIPVNGGEVFVSADPRSPLAAGIQADLNAAANIGLRALMDPDFLGTWWYVPCDPSTKKPHIEKVKGSILATVGALQATSEEAAAPPRRGRGGTRSAAPREVINLWRDPSAVRIQDATAGEVWDVTPVYWSIVKDRVVDVLRQRNTKSGD

SEQ ID NO: 266 - protein, 1427 aa, Unknown
  Description of Unknown: uncultivated organism sequence
  Category: MG37 effectors
  Description: MG37-5 effector
MTQHAYTLKLRSLYEQRSTNDEKTIVLKAKDAKHLWQTHLLINRGAQVFGDWLLTMRGGLSPSLADELIMEGKGTNKRNREPTEQEKADRHILLALSWLSVESYEGAPDKYVIASAVDDKDKRSKALITALEKVLKRQKITTNDINIWRRDCEDVFSSAIRDDAVWVNRADAFNDLSAEINWDYNDASSLLFHFIKQKDYFNLESKDNDKNNTIKDKESFGQVARGWLSANWGKGKKSDFSEIINKLQKIVNYDFNSLYKKSGYKIISVITQHLTTKKDSDNKETFKKLCKYIGWQGRSSKGRLALEKLYNKKSVTKKDIVYLNEKLQQEIKEKKSKNRVIPKWVAKIQKYLEEKINIKYQPLDMSRNLIGEFGVMFDHALRHVSVAHSWIKNAEINRRRFHEDAQKIDNVTKDAKEWLNEYTHEKQEFTGALGKYIINPRAIDGWKDILKGWKGCSNYEERVEVINTIQTNKNDADKHFGDANLFKRLAKDDTRAVWINNDNKFDETILKNYVDAKKASYDMQRFKVPAYRHPHPLLHPVYCDYGNSRLNVKYDAFDIINYVLNNKKIKGAEKVINKLSISLWDGTSFQNIPFFWGGKRFKTDLALDNINNLYSSNKHLSLKNSIETTKADRFGRSLVTADSIRLEIYNKGEWNARLQVDRRLLENINKKLKASNINCYSDIFSIKTSNAMKIQQLVYKLPWFLTTSPELQSAHTLKLGPWADYINSCKDKSPFLRNNKISYIGWPHYNKNKKRNKKGSMILSHLPNLRVLSVDLGHRYGATCVVWETISNKDIINLCKKHNVNQPKVDTIYHVIKTDKKIKIHFRRIAGNTLPDGLPHPASWARLERQFMIKLQGEDRSSRKIFNNEKQIAKQVAEFCGNLHDEKAFFNNNKNIEQLMSATVSILLDGIRRHNDIAKIAYYLSPERGRNPGDESLKKGLENALQLWHQLWNSKHYKHEFAKETWDKYIISFFSNKERQELTSIGDNKNKTCRKKQKAIFKNIAQKLSADDRMMMYKAWDNYWHERDGHGDKGKTKLCRQCIRLVRDWIMPRRDSDYVFSKQFRNVGGLSLTRINTFKKLYRVIKAYAGRPEPENIKINIAEKGDTSSKGMGDRILKAMENMRDTRIKQLASRIVEAALGLGKEQGKKDKNTKDISRPRENIFKPCHALIIENLKNYRPDELQTRRENRQLMTWSSHRIFDFLKDECDLFGIHLRTVSPSYTSRQDSRTGAPGIRCTDIPLTNFLKENSYWQQQVKKADEKKLKDDYSSFIVNAYSILIKKYGHTPPKDKWIRLPRRGGEIFVTADNNSPIAKGIHADINAAANIGLRALLDPDWAGSWWYVPCNKDGTPKSTEIKGSTIFKEINKLPLQGDIGGKGDIVNLWSDVSSSNLENKVWKYSTNYKSNVRKRVIERLMQQSILKKDQND

SEQ ID NO: 267 - protein, 1338 aa, Unknown
  Description of Unknown: uncultivated organism sequence
  Category: MG37 effectors
  Description: MG37-6 effector
MAKETTTQRSYTVSLCKPELGAKAWKALAATHIGMAKGAKACGDMLLNMAAGIAPCAIEELGFSGAEAVRNARRMLTLTWFDVESEDGSPQEFVVPVEELPQKLRDHLISAGLDREEADSWLEDCQDVFATPIREDSCWIDRRSSFEAMEARLGVDISQSDIEDFCFGQFAILGSLKDYLIIPDYESLQPDGISDAPSKIQAARNMLSSRLGAGIGSDTAAMADAYDLINRALEGLSSGEHCPKNEFRRVIELELDDSMPDISFEEFVNSKIKGIGRPTATAQRMEAALACREFIPWSQIEALMEKSADDARKQRAKVGLKGRRPYFDAIMGDLEKKTGIPYPAEGNQTPARNWYSCLFDHAARGVSAHHTWVKRAESTRNATYANNEAFETLPDEARAFLSKYEKERSLSLGAVEPYVIRRKAITGWTKDHVKQLHNAKSAEERVEILKEAQSQGDMGDMTLLIDLVRDDALCAWHDVEGKPAEKILEVWAKHQELERERLHFKTPSYRHPDHLLHPVFADFGKSRPEATYTFGESLEQRTVTLMLVDGGGFSRFTFHWNSKRLMDDFDFSALEKEGKAAACAMTTRFGNSLEEERKPRLLLTKAAKKPIVSDVGTRLQLTRASLERCAKRQNDAMKNPDELDWFLSLALNIKPAPFTPKALIAQAKERKDENKARTSALSKLRYSRIHGLTFIGVDLGHRKAASCSVWKTCSAEEIEQLCIEAGHELPDKNTLHLTLDCIDRRINARRIGADTLPSSEQHPAPWAVLQREFAIELPGAKEEEQRAATKNELSFLANPYAISVETRSAKAKKSAYRTTSEAQYAAVEAIRRDVKQHASMASFIHLIRSKKITKPGGAEMLLSDDELVKTVEKRLEKELGNKYAKPAPWVENLPRSNDPSTCAHILCTEKEYVDALEKQWEEDDENIRIALRILRNWIFKGIEPYSDSRTACKGVGGLSLNRIATMQMAYQLVRSFSMRPFPTDTRRGIAMAERGELAELGRRMSAHINTMREQLAKHVASRIVEAALGLGGSQNTSEKRNVRTPGDRFQPCDLVVIESLTNYRPEQTRSRAENRRIMQWASARVGEMLRDECEIYGIALYETPAAYTSRQDSRTGLPGFRFKEVPVAAFVNGGSYHGVNIDRALSSDCENERRFYGELLKRWNKGKGEWDEPLRPEKTVWTLKRGAWVSKNGMLLKKGMAPQPIPIVANGSELFMASTDEGVLKIQADINAAGNIALRGVTDPDWAGSWWRVNIQAKSGMVEKRHRGSLAFDGTAIDPEGKAPHEGVIGAWSTVGATPLSDEKRKWSTYQKYWDDQRSKIFARLCRRYGIPPAIEEE

SEQ ID NO: 268 - protein, 1397 aa, Unknown
  Description of Unknown: uncultivated organism sequence
  Category: MG37 effectors
  Description: MG37-7 effector
MAVKTTQRAYTLRLTGTDRNDQTWRENLWRTHEVVNKGAKAFGDWLLTLRGGLSHKLAEPEPDAKLPKGYTRDDLRRDRRILLALSWLSVESKVGAPERLIVAEADDPQRKEKVVKALERILNQRRCSPADAASWVANCRDSLSAAIREDAVWVNRKEAFDDLAGNWNGLTDDDALMTLSGFFGEASEYLCLPEGDSDSAGADGEHFSNLARAWLSSNWGTGTKSDKTQIAHALDVLAKANLSRLVGRAGTELAAALVGLLGKKLEDDQDPWEVLRLLIGWSTGRSSKGRMAIEKASSVSALAPEDLTRLQTKLGEEAASKLGKAGVSSPTWSADLRREIESVTQMQFVTGRNLIGEYATMLDHAARRVSQTHSWVKLAEARRQTFTAETARLGAVPRDIRDWLDAFCERRSMESGALAGYRIRRRAVDGWDEVVRAWSKSGNRTEADRVKAARGVEADPEMDKFGDIQLFEALADDEAKCVWLRDGKPDSGPLKDYVRAKDAEDRMRRYKVPAYRHPDPLLHPVFCDFGCSRWTISFGVHDSVRELDGLREALAKLAGSTEEMAEARRLKAKKAIAEARETLMKPEVLHGLSMGLWDGSAITPIGLKWQSKRLPGDLALADAGSTELTWLSRADRLGRAAGAVSSKDSAGIIGLFDQKEWNGRLQAPRVQLEAVARCKDTAKRARLRYRLEWLVTLSAELQPQGPWCDYAKAHDIKDDPKYWPHSDENKKRQGHAKLILSRLPSLRVLSVDLGHRYAATCAVWEALSEKEVRKVCSAAGQAAPKPDDTWLRLKTGQRTAVYRRTSADTWAHLDRQFTIKLQGENAPARMASPMEMKLVQELEKALGRTRSNENPFPQQVDELMSEAVFILRRGLRCHGDRARIAFNLTTDKRLLSGGRQEKLDKPGRVTLLQETLASWRNLADDNAWQDGCAKQWWDDFVAPLAADATLPATPAEDALLPTIKAYRRKLTDSLKSVAEVLSGNPQLRQKLHVLWATRWRADDAGLRVHLHEVHRWILPRGKGRADATIRHAGGLSLRRLATIRGIWQLQKAYSMRPDPDDLRKNVPKAGVTNEEFGRRTLDSFERLRENRVKQLASRIVEATLGIGREQSKVNCKDPKRPRERVYATCHAVVVEDLDNYRPDEVRTRRENRQLMQWSAAKVRDYLAESCQLHGLHLRKVYAGYTSRQDSRTGRPGVRCSDVPVPDFLRRIKPRIVDLRKKGDSESRFLAAAYDFWSGKPHTKGETVRIPQRGGDIFVSADPNSPAAKGLQADLNAAANIGLKALLDPDWPGKWWYVPCDAKTHIPVPEKVKGGAADIPDALAPVSSGDDDGKKRKRKTASGDITNFWRDPAATAVAQDGWVETPEYWSRVKDQVIRILMRQLSGKELAGIPYEPRL

SEQ ID NO: 269 - protein, 1148 aa, Unknown
  Description of Unknown: uncultivated organism sequence
  Category: MG37 effectors
  Description: MG37-8 effector
DERGAPNGKGLRVATGRDTGDQRREAVEAALREILEKRGVNEEEIRAWLRDCGPSVEARIRDDAVWVNRSAVFDEVANGWDTANARGDAHTLLSFILGDEFLTPPTPNKLKKAADQVDEGDEDEQQERQQAIKASSRGAGQKTRHPFSHLLGQGGPFGKPTRNLLLRDRWRDHIKAELEQSTGIPVVDSQKDKGKMKKASGPSHTELQREMFSKAASRLAQIVTKQRQQEADRLARKEADDELCKMESDSSFADALAALRAYCDEYRVTSGAIGEFLIRPRQITGWESVLRRWASIGEQDPERALEARIDAVKEAQDADEEKKFGDVNLFFRLAEDKFKAAWQRAGKPDPTILQRFVKGMKARSDTERLKVAAFRHPDPCRYPVFAQFGVSRPDIRFRRLKAFADAPAGDDPRAVGMLLWHPKLKSARLTLMFGASKRLDREIGSACDNALRGTDRLPEVSRRGRLGAAAAGLQTADTLARVVRVFDLRSVKSRPAGDEQGDGDGDENGAEKLKAPKWNGTLSTNRRDLAEIGKLVNEDAKKAARSRLRWTLTVSMEMEGRGPWFRYVVASQDQTPFVRTVRKDKPNDKNDLGKGYSERKGDKRVEAEGRPYQEFNKPLKENKNQTALVEDSSTARGGKACLILSRLPSLRLLSVDLGHRFAAACAAWETLAKDAFEKECRDAEANGAKIVLGPEGCKPDEADYVHVVWPEKNSNAATNKARAEGRGKFQPVTVYRRIGSDQIPDGTAHPAPWARLDRQFFIKLQGENEGAREASNEEIWAVHQLEAELGRTAPLIERMVRGGFGQHEKQKRRLEALRGMGWEPATSDVLPGTADEDEGEARKVSRSVDELMFAAVRTMRLALRRHGDRARIAFAMTADHKPMPGGRKYYFDKAEDASTNDDEATRRGKHIEFFQDALSLWHDLFSSRGWKDGAAKALWDQHIATLSGYLAPEEIAEDLTGSERKKKRKENRDKLRVTAEALAKDSNRRRGLQEKWKQRWEADDGAPAEVDQTTGRKLKEGSGWHARLRWFQNWVMPSSRQGLKSIRHVGGLSLTRLALLTEFRRKVQVGFFTRLHPDGTKTETKEEFGQSTLDTLEHLRQQRVKQLASRIVEAALGIGRIKIPKRGKAPQRPRQAVDAPCHAVVIES

SEQ ID NO: 270 - protein, 777 aa, Unknown
  Description of Unknown: uncultivated organism sequence
  Category: MG37 effectors
  Description: MG37-9 effector
DIKWLLTFSPKLRPLGPWLEYGGKEKIKERQEVEEKGGRGNDARLLLCRLPRLRVLSVDLGHRYAAACAVWETLGEEDFKREIKGRKVLCGGSSGECMYCHTLHRDREGKVLKTIYRRIGADTLPDGRPHPAPWARLDRQFLIKLQGEREGAREASVEEIWKVHELEARLGRTKPLIDRLVAAGWGQTPGQKKRLRILEGLGWKQTQGVVDVTKDNEMSYKPSLSVDELMFSTVRTLCLALGRHGDRARIAHALTADYKKMPGGQRYYFNRAEDASVGDDESVRHEKHVEYILDALLRWHDLFEAKGWQDEEARELWDKYIANLSCCLEVSEMDDSLTDAELKKRRKDFKERLRPVAEAIVKDGKLRKKIQQEWKRRWERDDEKWREDIRWFKHWIFPRKKQAGPSIYRMGGLSLTRLATMTEFRRKVQVGFFTRLHPDGTTGEIGEDFGRKVLEDLEVMREQRVKQLVSRLVEAALGIGSEDLSHWEGQKRPQQRIEDPRFSPCHAIIIEDLTHYRPDETRTRRENRQLMTWSSSKVKKYLAEACELHGLYLLEVPARYTSRQDSRTGAPGIRCSDVSVAEFKNSPYWRKEVARAKAKNEKNQGDARDRYLCELDAQLAGSGRLKNVRVPIAGGEIFVSADTGSPATKGIQADLNAAANIGLRALVDPDWPGKWWYVPCDSSSFKPINDRVKGCKVIDTQESLKEASPGLAVKGEKNSEKKRQRRAKHREVVNLWRDISAKPVSAAYGPWDEYSVYWNRVQDQVVKILRNNLALSK

SEQ ID NO: 271 - protein, 755 aa, Unknown
  Description of Unknown: uncultivated organism sequence
  Category: MG37 effectors
  Description: MG37-10 effector
DRLGRAAAGVPASATVRIAGIFEQKDWNGRLQAPRARLNAIAARVARHGWDDKAKRMRARLRWLITFSARLQPSGPWVDYTATFPDDASAKPFVSRKGDYAVRHQGNDAREGHAKLVLSRLPGLRVLSVDLGHRYAAACAVWETLAKVVFEKERHDAEAKGAHVVLGPEGCKPEEAIYAHFVWPEKESNAATKKARQEGREKFHPVTVYRRIGPDELVDTSTGEVKEHPAPWARLDRQFLIKLQGEDHEARKASPAEVEAVQELERAVGREPPDQRSLRVDDLMSETVRTVRLTLQRHGRRARIAFNLTASKRLLPGGREEVLTDEGRVGLLADTLADWYALFAGKGWNDEWARQQWETYVTPLLQGAALPQIPEDAEATPKARKKYRADLTENLKPAAESLAQNEPLRMKLHCLWATRWSKDDIALRKCLRWLRDWILPRGKKVKEKAGRAIRHVGGLSLTRIATIKSLYQVQKAFHMRPEPEDLRKNAPSQGDDALLDFGRSILDVMEHLREQRVKQLASRIVEAALGIGIERQVGKKTPKRPRQRLYWKDEKGNEHGDRRFAPCHAVVIENLTHYRPDETRTRRENRQLMSWSSSKVKKYLAEACQLNGLHLREVQAGYTSRQDSRTGAPGVRCQDVPVKEFMRSPFWRKQVAQAEKKQAGDKGDARERLLCDLNAEWKGKPEADWEKAGTVRVPLKGGEIFVSARPCSCCKHGKRGGAPGLQADLNAAANIGLKALTDPDWPGKWWYVPCD

SEQ ID NO: 272 - protein, 788 aa, Unknown
  Description of Unknown: uncultivated organism sequence
  Category: MG37 effectors
  Description: MG37-11 effector
DWNGRLQAPRAQLNAIAARVTRHGWDDKAKQMRDRLRWLIAFSARLQPSGPWVEYARAFPDDAPAKPFVSRKGDYAVRHQDNDARKGHAKLILSRLPGLRLLSVDLGHRYAAACAVWETLSTEQVRKACQEAGNEPPKDSDLYLHLKNGQRTVVYRRIGPDTIEAVDESTGEIKPVPHPAPWARLDRQFLIKLQGEDHEARKASPAEAEAVQELERAVGREPPDQRSLRVDDLMSKTVHTVRLALRRQHGRRASIAFNLTAAKRLLPGGREEDLDEEGRVELLADRLSDWYTLFKGKGWNDEWAKEQWETHIAPLLQGAALPQISEDAEATPKARKKYRADLTEQLKPAAESLARNPSLCKKLHCLWATRWRDDDGALRKRLRWLRDWILPRGKNARRDPAIRHVGGLSLTRIATIKALYQVQKAFRTRPEPDDLRKNIPAKGDDALRDFGRSVLDVMEHMREQRVKQLASRIAEAALGVGRVKRFAGGKDPKRPREQVDRPCHAIVIENLAHYRPEETRTRRENRQLMTWSSSKVRKYLAEACQLYGLHLSEVNAGYTSRQDSRTGAPGIRCQDVPVQKFMQSPSWRREVAHAEKKHAEGKSEARERFLCDLNAKWKGREAEWEKAGTVRIPLNGGEIFVSAGPCKCCERNDRNGPAGLQADLNAAANIGLKALTDPDWPGKWWYVPCDPKTFKPVKDKVAGSAAIRLDKPLKDLPAAQGTDGARKKPSKTKAQQREIVNLWRDVSSQPISANDDWREYKPYWDHVQERVVKILRQWAGLTPNYKNQ

SEQ ID NO: 273 - protein, 1249 aa, Unknown
  Description of Unknown: uncultivated organism sequence
  Category: MG37 effectors
  Description: MG37-12 effector
FGTGKGADFNHMSRVYRKIAEWVNSSSATPGQNGREFMVSLAEGLAEFNPRSKDLDGVKSLISGPGYKSATRNLLDHLWGSDTVTEDHLQRLREAASNDAASCSGKVGEKGRRPYADKILLDVEETCGFSYLTDSNGGDVLTKTRDSYPENYDWGTSRHKSFAVMLDHAARRVSIAHTWIKKAESRRQRFEADAQKIHEVPHNIREWLDNFCTEWSDITGALDGYRIRRRAIDGWKEVVKAWSLPDCRTKEDRVAAARQLQDNPELDKFGDIQLFEALAEDDALCVWHRNGELDSEPDPQPLIDYVAAEEAEFKKQQFKVPAYRHPDPLLHPVFCDFGNSRWDITFSAHRSGQNRNEQHDSYFTMTLWDGMRIGNIDLRWHSKRLTRDLALKDKNSPVKPQKEVTRADRLGRAAAGVSGYEAVRVAKLFQEKYWNGRLQAPREQLEAIARHVKQHGWDQRACLMRDRIRWTVTFSAPLQPSGPWLKYVEQHTSLSKWPHNEDNKTRKEMARLILCRLPGLRVLSVDLGHRFAAACAIWESLSSLDFQKETSSRKILRGGTGPDHLFCHTEHRDESGKRHVTIYRRIGADLLPDGTTHPAPWARLDRQFLIKLQGEEEGTREASNAEIWAVHQFEKAIGRALPLIDRLTNAGWGSTEKQQQRLQELNKLGWFPARQEKADLPDDEEVDFFRPSIAVDDLMASATRSARLALRRHGDRARIAFALKGEYKTLPGNRKYYFNSPRDASAEHDEKTRHSEYVQFLRDALEMWYNLASSNTWYDRKAREWWVEYIPEVPLPRDDTKIPARGTSGSDKQALKQQLLSVAERLQKNAELRRQLSDAWEKQWKEDDQKWRGYLRWLRQWILPRGGRVDRRAIRHTGGLSLARLATITALRRQVQVAYYTRLRPDGSRAEISENFARKTLDALEELRLQRVKQLASRIVEAALGVGSENRNHWEKERRRPRQQICDPRFNPCQAVVIERLDHYRPEEVRTRRENRQLMTWSAAKVKKYLAEECLLNGLHLREVSAAYTSRQDSRTGAPGMRCQDVSPREFAKSPLWRKLVGRKTTGQTNDLNPIQCFLIDMDETLRNGSWPGRTIRLPLRGGELFISADPSSPAAQGLQADLNAAANIGLRALTDPDWPGRWWYVPCDPATSRPKADRVNGSSAINISNPLRNVPTDNSPSTSTKKRGAKKTGSGDDKTVNLWRDISCAPVSSENGPWQEFSDYWEYVTQRVLGILAAHKQYGDSVPY

SEQ ID NO: 274 - protein, 839 aa, Unknown
  Description of Unknown: uncultivated organism sequence
  Category: MG37 effectors
  Description: MG37-14 effector
GRAGGGGTGDVAARYVKRLHKKYGNCRPQAPRAQLADIARHVQQHGLDQRACLMRDRIRWTVTFSAPLQPSGPWLKYVEQHTSLSKWPHNEDNKTRKEMARLILCRLPGLRVLSVDLGHRFAAACAIWESLSSLDFQKETSSRKILRGGTGPDHLFCHTEHRDESGKRHVTIYRRIGADLLPDGTTHPAPWARLDRQFLIKLQGEEEGTREASNAEIWAVHQFEKAIGRALPLIDRLTNAGWGSTEKQQQRLQELNKLGWFPARQEKADLPDDEEVDFFRPSIAVDDLMASATRSARLALRRHGDRARIAFALKGEYKTLPGNRKYYFNSPRDASAEHDEKTRHSEYVQFLRDALEMWYNLASSNTWYDRKAREWWVEYIPEVPLPRDDTKIPARGTSGSDKQALKQQLLSVAERLQKNAELRRQLSDAWEKQWKEDDQKWRGYLRWLRQWILPRGGRVDRRAIRHTGGLSLARLATITALRRQVQVAYYTRLRPDGSRAEISENFARKTLDALEELRLQRVKQLASRIVEAALGVGSENRNHWEKERRRPRQQICDPRFNPCQAVVIERLDHYRPEEVRTRRENRQLMTWSAAKVKKYLAEECLLNGLHLREVSAAYTSRQDSRTGAPGMRCQDVSPREFAKSPLWRKLVGRKTTGQTNDLNPIQCFLIDMDETLRNGSWPGRTIRLPLRGGELFISADPSSPAAQGLQADLNAAANIGLRALTDPDWPGRWWYVPCDPATSRPKADRVNGSSAINISNPLRNVPTDNSPSTSTKKRGAKKTGSGDDKTVNLWRDISCAPVSSENGPWQEFSDYWEYVTQRVLGILAAHKQYGDSVPY

SEQ ID NO: 275 - protein, 1402 aa, Unknown
  Description of Unknown: uncultivated organism sequence
  Category: MG37 effectors
  Description: MG37-15 effector
HTLADTKVKGGKGKPDRDPTDEERKARRILLALSWLSVESKLGAPADFIIASGKVVAALEEILKSRNVAKNEIDEWKNDCSASLSAAIRDDAVWINRSKAFDDAVKSIGSSLTREEAWDMLERFFGIRDAYLAPAKGSEDESSEAEQEDKAKDLVQKAGQWLSSRFGTGKGADFRRMADVYNKIAEWAGNPQTSTTGNEAINNLAAALSEFNPASNDLQGVLGLISGPGYKSATRNLLTQIAAKATVTQQDLASLKDKATKDAQKCNQNTGSKGKRRYSDAILNNVEAVCGFTYLQDGDSARHSEFAVILDHAARRVSLAHTWIKRAEAERSRFEEDAKKVDQVPEAAKDWLNNFCLERSGLSGAQEPYRIRRRAVDGWKEVVTAWSKADCKTAEDRIAAARALQDDPEIDKFGDIQLFEALAENDAVCVWHKDGDAAKAPDPQPLIDYALAAEAEFKKRHFKVPAYRHPDALLHPIFCDFGKSRWGICFDVHKNAQTPFPRALCLTLWTGSGMVSVPLCWQSKRLARDLALGQDAQKDGTPKVTRADRLGRAASNVGKSDMVNIAGLFEQKDWNGRLQAPRQQLEAIAKRVDKHGWNDETAKKMLDRLQWLITFSARLQPQGPWCAYAKKHGLKENPQYWPHAKENENRKGHARLILSRLPGLRVLSVDLGHRYAAACAVWEAVNAEQVKEACKAAGRVEPEASDLYLHLKRKVTKQKKGNQVVVEETTIYRRIGADTLPDGKLHPAPWARLDRQFLIKLQGEEERVREASNEEIWAVHQLEAELGRTVPIIDRLVKAGWGQAGKQKTRLEALRELGWTPAKEAQGSDETEEGEPRKPSLSVDELMSSAVRTMRLALKRHSDRARIAHYLITDEKTKPGGIKERLDENGRIDLLQDALVMWHDLFSSRGWRDDAARQLWDDHIAKLSGYKAPEEIGEESSSPERRNKQKENREKLHDVAKALAQDVTLRKALHDAWKKRWEEDDGRWKKQLRRFKDWVLPRGKHASDPTIRKVGGLSLPRLATLTEFRRKVQVGFFTRLHPDGTRAETGEKFGQSTLDALEHLREQRVKQLASRIVEAALGIGSEGGKGWDGAKRPRQRISEPRFAPCHAIIIEDLTHYRPEETRTRRENRQLMTWSSSKVKKYLAEACQLHGLHLREVSASYTSRQDSRTGAPGTRCQDVPVKEFMRSPFWRKQVAQAEKKQAESKGDSRERFLCGLNAMWKDKAVADWEKAGAVRVPLKGGEVFVSADRISPSAKGLQADLNAAANIGLRALTDPDWPGKWWYVPCEPASFRPVKDKVDGSAVVNPDQPLRQSAQAQSGDAAKDKKKRGNKGAGKSKEVVNLWRDISSSPLECIEFGEWKEYAAYQNEVQSRVIRILEEQIKGRDKQPHEGSKEDDIPF

SEQ ID NO: 276 - protein, 820 aa, Unknown
  Description of Unknown: uncultivated organism sequence
  Category: MG37 effectors
  Description: MG37-16 effector
IAGLFEQKHWNGRLQAPRHQLEAIARYVGKHGWDQKAQKMRDAISWLVTLSANLQPQGPWCEFAERFHLRSDPKYRPHADINKNRKGHGRLILSRLPGLRVLAVDLGHRHAAACAVWEALSTEAFKDEVSAKRILRGGTDNDALYCHAEQETGGRKHVVIYRRIGSDTLPDGKPHPAPWARLDRQFLIKLQGEEEGVRQASNDEIWSVHQLEAELGRKRPLIDLLYKTRWAQKKNQTGTENKKLAELRNRGWVPTDDTHDPHDTEKHTSASPSLAVDELMSYAVRTMRLALKRHGDRARIAHYLITDEKTLPGGVRQKLDEKGRIDLVQDALVIWHGLFSSAAWRDDAAKQLWDDHISKLAGYKILNEIEEDLSALERRKKERQIRDELRETAAALAQKGDLRIALYDAWKRRWKEDDAQWKKRIRWFKDWILPRGKSANSRAIRRVGGLSLTRIATLTEFRRKVQVGFFTRLRPDGTKTEINEQFGQSVMDAIERLREQRVKQLASRIVEAALGIGRMKRPKKGKTPKRPDIRVDKPCHAVVIENLTHYRPEETRTRRENRQLMTWSSSKVHKYLDEACRLHGLHLRGEIPAAYTSRQDSRTGAPGLRCQDVSVDEFRRSPFFRKQVAQAKERMDENRGDARDRFLCDLDSTNGPGTFRIPLSGGEIFVSADPASPAAKGIQADLNAAANIGLRALLDPDWPGKWWYVPCEAASFKPVADKVKGSHAVKLDQPLRSPAEDNSAHGRRKSGKGDGRSKEVINLWRDVSSHPLECTAGGVWKEYAAYHEDVQCRVIKILDQQLNNGNRRGLDEFEADPLPF

SEQ ID NO: 277 - protein, 801 aa, Unknown
  Description of Unknown: uncultivated organism sequence
  Category: MG37 effectors
  Description: MG37-17 effector
KKQRFKVPAYRHPDAFLHPVFCDFGNSRWSIDYAVHRAPEKLARAQQLLEKKKEELTRAEQALSKASDPSKRSSIEKKLKTLNVAFKQQEAEVLWLESHHAMTMGLWNGSRIEDTPLLWQSKRFGSDIGQAGAEHPLVASRADRFGRAVAMAKDNAPVVPSGLFDLADWNGRLQAPRRQLDAIAAIHDRTDLSVEEKRQLVAKRIRTIRWLVTFSAKLQSRGPFIAYAAQHGLDWRYGAHGIENKSREGLAKLVLCRLPGLRILSVDLGHRYAAACAVWETLSAAQMQNACLEAGMEAPSQRTLYLHLKHFVNGKEKKTIYRRIGADTLPDGSPHPASWARLDRQFLIKLQGEDRDARPATCDEVVAVEQLETELGYVRPIKRKGREHLVDELMSDALRTLRLGLQRHGARARIAFNLTATKRTRPGGIQELLDQESRIGLLTETLLEWNELYAGERWADELARDMWNKQIQPLLGGTILQETNNQDVTPSAAKRRMQREETREKLRPVAKQIAENDSLCRQLNVLWSTRWQIEDAAWRMRLRWMRRWLLPRGINRDPQFRKSIRDVGGLSLIRIASFKSLYQVQKAYWMRPHPDDLRRNIPERGDSSLTSFGQRVLDAMERMRENRVKQLASRIAEAALGIGDETSVNAKNGRQKRPTERSNDPRFAPCHAVVIEDLTHYRPDETQTRRENRQLMSWSSSKVKKYLGEACQLNGLYLREVPPAYTSRQDSRTGAPGLRCNDVTVAEFYTSRFWRKQVEAAEKNQKDGKKGDARERYLLSIDERIRSEAYDRDVFRIPVKG

SEQ ID NO: 278 - protein, 1468 aa, Unknown
  Description of Unknown: uncultivated organism sequence
  Category: MG37 effectors
  Description: MG37-18 effector
KQAAVTQRAYTLRLRGVDPQDQSWRDALWATHEAVNKGAKAFGDWLLTLRGGLDHALADAKVKGGKGKPDRDPTDEERKGRRILLALSWLSVESEKGAPEEYLVPHDLDKQSGTRSNWKTVDALREILRGRRLDESEIESWVRDCSASLSAAIRDDAVWVNRSKAFDDAVESVSSSLTRDEVWDMLERFFGSREAYLAPAKGAEDESAEVEQEDKAKDLVQKAGQWLSSRFGTGKGADFSRMATVYKEIANWAGKAQPGMTGDKAIADLAGALSEFSPTSNDLRGVLSLISGPGYKSATRNFLSQLATRTVVAESDLQSLQKSAKHDAQKCTANTGAKGQRPYSRVVLEQVESACGFTYLQDGGPARHSEFAVMLDHAARRVSLAHTWLKRAEAERRRFEEDAGRMGNVPASVKQWLDSFCADRSEASGALEPYRIRRRAVDGWKEVVAAWSKADCKTAEDRIAAARALQDDPEIQKFGDIQLFEVLADDEALCVWHKDGDSAKAPDPQPLIDYVLATDAEFKKRQFKVPAYRHPDALLHPVFCDFGNSRWDISFAVHEAGKSTVRKKKGQWQNSDPHALSMTLWTGSTVEPRRLRWQSKRLTRDLAFKEGKQNGNAPTVGRADRLGRAAAGVPEHGAVSIAGIFELEDWNGRLQAPRAQLNAIAARVARHDWDAKAKQMRDHLRWLITFSAKLQPSGPWLEYAAAFPDDAPAKPFVSRKGDYAVRHQGNDAREGHAKLILSRLPGLRVLSVDLGHRYAAACAVWETLSAKQVKAACQAAGHEPPKDSDVYLHLTKKVKKQKKGKEVEVEETTIYRRIGADTLPDGKPHPAPWARLDRQFLIKLQGEEEGAREASNQEIWAVHQMETVLGLSVPFIDRLIAAGWGCTEKQKSRLEELKKIGWTPAPKAESSGVQKENEEVDVCKPSLAVDELMSGAVRTVRLALQRHGRRARIAFNLTASKKLLSGGREEGLTDEGRVELLADTLADWYALFTGKGWTDEWARQQWETHVTPLLQGAALPKIPEDAEAAPKARKEYRADLTEHLKPVAETLAKDESLCARLHCLWATRWRENDVALRKRLRWLRDWILPRGRKAEADRAIRRVGGLSLTRIATIKSLYQVQKAFHMRPEPEDLRKNIPSKGDDALLDFGRSILDVMEHLREQRVKQLASRIAEAALGIGRMKRFAGGKDPKRPRERVDRPCHAVVIENLTHYRPDETRTRRENRQLMSWSSSKVKKYLAEACQLNGLHLREVSASYTSRQDSRTGAPGVRCQDVPVKEFMQSPFWRKQVAQAEKKQAKGKGDARERFLCDLNAKWKGRPEADWEKAGAVRVPLKGGEIFVSADEKSPAAKGLQADLNAAANIGLRALTDPDWPGKWWYVPCDPTNFKPAKDKVAGSPAICLDKPLKDTDGKAGARSREVVNLWRDVSSQPISANDDWREFTPYWNDAEARVVNILRQSAGLARDQGER

SEQ ID NO: 279 - protein, 804 aa, Unknown
  Description of Unknown: uncultivated organism sequence
  Category: MG37 effectors
  Description: MG37-19 effector
LAELDLFNGRTIKAVRLRWQSKRLTNDLALHQTAVIDDATPVSRANRLGRAAAGAGSRSAVRILGVFDHKHWNGRLQAPRAQLHKLAKIRDNATVPEPARRQKYERGLSTIRWILTFSPRLQQKGPWLEYAAAQNLSAKSPHFAENRGRGWLAQHLLGRLDGLRILSVDLGQRYAAACAVWEAMSGDQVRATCASAGAPEPDKSALSIRVSVGGRRTILRRVGEDAWARLDRCFVIRLAGEDVPARKASPAEIQAVQTLCRELGYSDASRAAAAVDKLMSYALRVLRLGLQRHARRAMVVFGLAAKEKVVLGNQLRALSEDERTDSIGTALADWWTFAVSSRWPDPHAAALWDEHIADRAAGIELPPDLESFSFRERLLVREKLLKDVRPIAQALRPEEVEQLTEIWRLQWLGEEARWCKRLRWIKDWLLPRGSGAQCNSIRRVGGLSLRRLNNLRALYRLEKSFAGRLRVGVGGHRCESQVPSEEFGRKTLTALERLRENRVKQTASRIVAAALGLGKDLKRGHGERFAPCHAVVIENLTNYRPDEVRSRRENRQLMDWCAAKVKKYLNESCDLHGILLREVQAAYTSRQDSLTGAPGVRCADVPIRDFMACGGYWERELRRADKANSSGRSDARSRYLIALRDRISAAIPYPAAAATKGAVRIPVDGGPVFVSADPQSPAAHGTQADMNAAANIGLRALLDPDWAGRWWYVPCNASTGVPVADGLKGSALIQPNLTLFSSHNGAEKKPKRQVVNLWRDVSARPLNVGIWRTYAQYRASVMERVTAILLTGLQTLGDDVDLPF

SEQ ID NO: 280 - protein, 904 aa, Unknown
  Description of Unknown: uncultivated organism sequence
  Category: MG37 effectors
  Description: MG37-20 effector
LTRAEQALSKASDPSKRSSIEKKLKTLNVAFKQQEAEVLWLESHHAMTMGLWNGSRIEDTPLLWQSKRFGSDIGQAGAEHPLVASRADRFGRAVAMAKDNAPVVPSGLFDLADWNGRLQAPRRQLDAIAAIHDRTDLSVEEKRQLVAKRIRTIRWLVTFSAKLQSRGPFIAYAAQHGFDWRYGAHGIENKSREGLAKLVLCRLPGLRILSVDLGHRYAAACAVWETLSAAQMQNACLEAGMEAPSQRTLYLHLKHFVNGKEKKTIYRRIGADTLPDGSPHPASWARLDRQFLIKLQGEDRDARPATCDEVVAVEQLETELGYVRPIKRKGREHLVDELMSDALRTLRLGLQRHGARARIAFNLTATKRTRPGGIQELLDQESRIGLLTETLLEWNELYAGERWADELARDMWNKHIQPLLGGTILQETNNQDVTPSAAKRRMQREETREKLRPVAKQIAENDSLCRQLNVLWSTRWQIEDAAWRMRLRWMRRWLLPRGINRDPQFRKSIRDVGGLSLIRIASFKSLYQVQKAYWMRPHPDDLRRNIPERGDSSLTSFGQRVLDAMERMRENRVKQLASRIAEAALGIGDETSVNAKNGRQKRPTERSNDPRFAPCHAVVIEDLTHYRPDETQTRRENRQLMSWSSSKVKKYLGEACQLNGLYLREVPPAYTSRQDSRTGAPGLRCNDVTVAEFYTSRFWRKQVEAAEKNQKDGKKGDARERYLLSIDERIRSEANDRDVFRIPVKGGEIFVSACGQDGGSNANRKAPPGLQADLNAAANIGLRAIFDPDWEGRWWYIPCDATTICPVAKKFNGCKAVDSSKPLRIVAEKVAVSSSGIDEKRSGRKGIALTDGSRIVNLWRDPSGAPIRRDVPSNSEWQDYAEYWNKVQSRVIANLRKSYGLREI

SEQ ID NO: 281 - protein, 869 aa, Unknown
  Description of Unknown: uncultivated organism sequence
  Category: MG37 effectors
  Description: MG37-21 effector
LWDGTHIEDTPLIWQSKRFGSDIGQPVEAQPLPVSRADRFGRAVALAQDNVPVIPSGLFDLSDWNGRLQAPRRQLEAIAAIRDSAKLSVNEKQQLVAKRIQSIRWLLTFSAKLQSHGPFIAYAAQHGFDWRYGAHGPENKSRQGLAKLILCRLPGLRILSVDLGHRYAAACAVWETLNAGQIQKACLDAGKEAPGPCTLYLHLKQIANGKEKKTIFRRIAADTLPDGSPHPAPWARLDRQFLIKLQGEDRDARLATSEEIAAVEQMENELGVVRQLKRKGRELLVDELMSDALRTLRLGLRRHGVRARIAFNLTANKRIRPGGKEEVLDQEGRVLLLTETLLAWYELYTAERWTDEPARELWNRHIQPLLGATILQNTVNQEDTPSAAKRRKLREETSGKLKHVAEEIAKNDSLCRQLHVLWSAQWQTEDVIWRTRLRMMRRWLLPRGVKRNAQLRISIRDVGGLSLTRIASFKSLYQVQKAYQMRPHPEDPRLNIPERGDSRLENFGQRVLDAMERMRENRVKQLASRIAEAALGIGGETGISSKDGSQKKRPTERSSDPRFAPCHAVVIEDLTHYRPDETQTRRENRQLMSWSSSKVKKYLGEACELNGLYLREVSPAYTSRQDSRTGAPGLRCNDVTVVEFNNSPFWRKQVGAAEKNQKEGNKGDARERYLLSIEEGIRGAANDRDIFRIPVKGGEIFVSACITDGGNNAKKNAPPGLQADLNAAANIGLRAIFDPDWEGRWWYIPCDAATLCPDAKKFIGCKAVDPTKPLRVVAEEGAISASGIGSKKSGRKKNAATDGTRIVNLWRDPSGAPIHRDVLRSPEWQDYAGYWNEVQHRVIRNLKTCYEQTSQQEDPFVSQDADKPF

SEQ ID NO: 282 - protein, 1171 aa, Unknown
  Description of Unknown: uncultivated organism sequence
  Category: MG37 effectors
  Description: MG37-22 effector
MAAETTTRAYTIKISGEGNWRKLLWDTHVAVNRGAWVWGDWLLTLRGGLPASLTADHPDRRVLLALSWLSVESPASLAPDKHIVAYGTDEDRAAKVMARFREILSRKQVSDVAGWEGACEPALSARIRDDAVWVDRSAAFSGMQAKFPGLTTDWAANTLFDLLGGSEAYFAMPDDEEPAPTEAKDFVQKAGGWLSRNWGAGQKSDSTAISARLRRLADTPPKTVAGTSGDDAIARLLELVDADSESADAKNRSKLLKKAIGWKGRSSKGAVALQKLASASRVTPEQWEQTRTKFLEEADAQDSKATHRGVKPPWMDDLRNALEGWIGVPYRTTRDLIWEHGVSLDHALRRVSSAHSWIKRAEVERRQFQEAAEKEILPKATKRLDDFCTTRSGESGAIGEYVIHRRAIDGWDKIVRAWRQLSETATAKDRTQAARDVQSNLDDNEKFGDIFLFEALAADDAKCVWRDAKGRPDSQILKDYSAQTVAEHNQRRFKVPAYRHPDPLRNPIYVDFGNSRWGISYEALAASQRRQSLQVKLVKAKTDEAREKLRQDLAESADLRGVTLNLWTGVGVEPTKLRWHGSRLWKDLDLAHFGLPGDVSVTRADRLGRAVAGQPQGAVSVAEVFAAKDWNGRLQVPRKQLSRLADLVYGKENGVRRGADYFRLIATVENSRAKKEFERFNWFLTTSARFQPSGPWIEFIEKGLPSGIEYRSGRSGSYLNYEANKDRKGRARIQLARIPGLRVLSFDLGHRYAAACAVWETLTEAALQREIKGRQVLSGGVKAKSIYLHTYHTGDNGKSHRTIYRRTGEGMWARLDRQFLIKLQGEDWTARRAHHEEWEGFNKFRTFLGMQPSAELLRIDELQREAVKLARVGLRRLGDAARVALAMTATSKPISGGRTSGAFTPEERIGYLQEALVRWQELAQSGEFVDDWAKEQWHAWVIAKLGGPQSIAVEPDSRASDRKKRKETTAAPLKPVAEIIAEPQSRIAVELNHMWTERFRKLEHDWRLHLRWLRRLILPSKRDNDKNPRQIRNVGGLSVQRLQTIRALYETLKAFRMRPEPDDLRKNVPAWGDESLAQFGRRVLNRLERLREQRIKQLASRIVEGALGAGRMNVVRGRDHKRPQMSVDAPCHVVVAEDLEFYRPEETRFRRENRRLMDWAARNVRKYIVEG

SEQ ID NO: 283 - protein, 1478 aa, Unknown
  Description of Unknown: uncultivated organism sequence
  Category: MG37 effectors
  Description: MG37-23 effector
MAASISPTQRAYTLRLTGHKNDENWRDALWRTHEAVNKGAKAFGEWLLTLRGGLDHNLATATLGKKPPSDRDVRDRRVLLALSWLSVEDERGAPTEFIVAKGAGAPEERKRKVRQRFEEILLGRGLSPDEAKEWATDCDDSLSAAIRDDAVWVDRSAAFDAARNRIGDTLTREEPWDVFNRFFRSQANYFAGIERPPDVLEDNDESDLESDDSKDERAKDLAQHAGKWLSNRFGGGSGANFGEMAEAYDALARAIREIPEGIPGDKAFFHLAVSLAAFQPKSDDLSGIRSLVSGPGHKSATHNLLEKLSSSGSSDQLIHQISEAAAQDASNCREKLGIKGPRTWSDTILKNVEDATGITYQHDGAGGARHTEYSVILDHAARRVSAGHSWIKRAESLRLRFERDKQRLDEVPADALAFLDLYCEDRTGLSGAAGRYRIRRRAIDGWTDVVRAWGKCADSQERIDRARELQSDPEMKFGDIQLFEALAEDAARCVWQSSGKPDPEILKSYVFARDAEDRMQRYKVPAYRHPDPLRNPVFCDFGKSRWSIDFAAHSGTPEKLDKARRGIEKAQVALEKAQAKKVRAGDNTAADKAQKDVEKCERQLAEKKAELQWLENPRSLRLGLWTGRQLEPTQLRWRSKRLAADLCIGGERGAPEGEVSRADRLGRAVGGVAAGGNPEIVGLFDLKDWNGRLQVPRAQLDAIARLLEKGRKSKADEAIRYLDWLVSFSAKLQPQGPWVDYAETTGLVRPDPKYWPHSDANKKRKERGRLILSRLPGLRLISVDLGHRYGASCAVWEAVSGKAVADACGAAGLAPPSADRVHLSIPCSKDGARRKQFYRRIAGDLLPDGKPHPAPWARLDREFTIKLQGEDKTPRKPFSNERKDVAAFKDWLGYSREKGGREPATVLDLMTHAVWLARLGLGRHGCRARIAWGLTANERLLPGGCKAAFNDAADQERFLTDLLLEWHGLAQPGSRNDPAAKQLWEEHIQPMGAETPQEEADTSFRERKKAREKLAERLAPVAAALRKNESLRKKLSIAWEQRWSRDDGEWKKRLKWLNRWLLPRGIMVEDEKTGRQRPPHAIRLKTIRNVGGLSLDRLAAIRSLYQVQKQYRMKPEPDNPRKNVPEKDDHSLDNFGKKTLDALEKMREQRVKQLASRIAEAALGIGSENARHWEGSRRPCERIADPRFAPCHAVVIENLTHYRPDETRTRRENRQLMAWSSSKVKKYLQEQCELHGLHLREVQAAYTSRQDSRTGAPGMRCVDVPVREFLREGGFWRGRVGKEQEKKEPERTHVEQLLVDLHGLWSKAPEAARWNKSVRVIQRGGEVFVPAAASSPIGKGLQADLNAAANIGLKALVDPDWPGAWWYVPCIAGSLIPVADKIKGAECAFADSKAPLRRNKESGEGNQRPAKSKGKSGKTKEIYNLWRDPGTGILAPGGWAFHKNYWQDVERRVAQNLRVSNGLAASIEPPPITEDVPY

SEQ ID NO: 284 - protein, 788 aa, Unknown
  Description of Unknown: uncultivated organism sequence
  Category: MG37 effectors
  Description: MG37-24 effector
MAEKNSKEQPVVTTQRAYTLRLSGTDKHDNSWCDRLWKTHEAVNKGAKVFGDWLLTMRGGLCHTLAEADVPGKGKKPARRPTQQEIKNRRIVLALSWLSVESKCGAPESYIVPHDSNTATGERKNWKTVEALREILRSRGLTEERAIEWADDCRDSLRATIREDAVWVNRSKAFDLAATNIGASLTREELWDFLQPFFANRHSYLEMDTVASATNGDSETDTEESKAASSDEKAKDLSQKAGQWLSSRFGTGPGADFSRFSKVYEVLATACRSIAPEVSGVEAINRLAIAIKKCSPSSNDIEGILGLISGPGYKSATRNILQQINRLQSVSEQDLSRLCDACEKDASQSRQKVGGKGSRPYADAILQDVERTCGICYARTEDHPSRHWQYAVILDHAARRVSMAHSWIKRAEEQRSKFEIEKNKLLRVPRDALAWLAAFCAKRSSDSGANDAYRIRRSAVDGWKQVVAAWAALPAKSEIAGSELRSDAERARIQVARELQDTVEKFGDIQLFEALAIREAKCVWMPDGKPDAQPLLDYVFGTDAIAKKQRFKVPAYRHPDAFLHPVFCDFGNSRWSIDYAVHRAPGKLTKARQLLEKKSAEISKAELALGKMDDALRHAAISETLQNLRAAYKQQQAEVAWLKTLQAITMGLWDGNGIQDTQLLWRSKRFGANIGQPDAVHPSPVSRADRFGRAVALAEDNVPVIPSGLFDLPEWNGRLQAPRRQLEAIAAMRDSAKLSAGEKQQLVAKRIHSIRWLVTFSAKLQSHGPFITYAEQHGFDWRYGMHGF

SEQ ID NO: 285 - protein, 918 aa, Unknown
  Description of Unknown: uncultivated organism sequence
  Category: MG37 effectors
  Description: MG37-25 effector
MAEKNSKEQPVVTTQRAYTLRLSGTDKHDNSWCDRLWKTHEAVNKGAKVFGDWLLTMRGGLCHTLAEADVPGKGKKPARRPTQQEIKNRRIVLALSWLSVESKCGAPESYIVPHDSNTATGERKNWKTVEALREILRSRGLTEERAIEWADDCRDSLRATIREDAVWVNRSKAFDLAATNIGASLTREELWDFLQPFFANRHSYLEMDTVASATNGDSETDTEESKAASSDEKAKDLSQKAGQWLSSRFGTGPGADFSRFSKVYEVLATACRSIAPEVSGVEAINRLAIAIKKCSPSSNDIEGILGLISGPGYKSATRNILQQINRLQSVSEQDLSRLCDACEKDASQSRQKVGGKGSRPYADAILQDVERTCGICYARTEDHPSRHWQYAVILDHAARRVSMAHSWIKRAEEQRSKFEIEKNKLLRVPRDALAWLAAFCAKRSSDSGANDAYRIRRSAVDGWKQVVAAWAALPAKSEIAGSELRSDAERARIQVARELQDTVEKFGDIQLFEALAIREAKCVWMPDGKPDAQPLLDYVFGTDAIAKKQRFKVPAYRHPDAFLHPVFCDFGNSRWSIDYAVHRAPGKLTKARQLLEKKSAEISKAELALGKMDDALRHAAISETLQNLRAAYKQQQAEVAWLKTLQAITMGLWDGNGIQDTQLLWRSKRFGANIGQPDAVHPSPVSRADRFGRAVALAEDNVPVIPSGLFDLPEWNGRLQAPRRQLEAIAAMRDSAKLSAGEKQQLVAKRIHSIRWLVTFSAKLQSHGPFITYAEQHGFDWRYGMHGFENKSRQGLAKLILCRLPGLRILSVDLGHRYAAACAVWETLSTGQIQKSCGVAGMEAPGPRTLYLHLKQIVDGKEKKTIYRRIGADTLPDGSPHPAPWARLDRQFLIKLQGEDRDARPATSEEIAAVEHME

SEQ ID NO: 286 - protein, 1503 aa, Unknown
  Description of Unknown: uncultivated organism sequence
  Category: MG37 effectors
  Description: MG37-26 effector
MAELDPTQRAYTLRLQGQRREDYSWSDALWATHEAVNKGVKVFGDWLLTLRGGLDPGLAERPVKDKKGERPPEDKERKNRRILLALSWLSVESEQGAPEKYIVASGRDLTSERIEKVKTAFHEILKCKGLDENQIQAWTTDCLPSLSAAIREDAVWVNRNKAFEDAKRQYDITDEDVWDILEPFLGNVDAYFFIKDLPADDQDESAEESSGGGEEPKDLVKQAGQWLSSRFGTGKGADFDRMSAVYEKMAELTSRLEGEMTSGAFFESLAEHLSEFNPDSSEPQAILKLVSGPGYKSATRNLIKKFAEQPTLNSDDLMNFTNAAREDAQESRNKVGSKGQRNYADAILSSVERVCGFTYLTASDGSDVSVETRYQLPENYTWGTSRHKEFAVMLDHAARRVSIAHSWIKKAEARRNKFEADAQKIKDIHPDVKAYLDAYCESRASLVGSLEEYLIRPRAVSGWEEVVKAWAKLEKQPGWDNKEPDQRKQARVDVARELQDQIEKFGDIQLFESLASDDATLVWHKDGKADGEPDPELLKNYVKATVANFNKQRFKVPAYRHPDAYYHPVFCDFGNSRWDVRFSVHEAHTVLAEKKAQLERLQQEMQTTRNLTKKSKLQSQIKDLEEELRWLENPRLVQMKLWTGKSIAPVILRWQSKRLVQDLALKQNASTAPEVVSVSRADRLGRAAAGLSANHIVQVKNIFDEDHWNGRLQAPREQLEELARHVEKHGWDARAIKLRRSIQWLVTFSPKLEPWGPWCEYVNTHPDFKGLKTKNPSAWPHAEENKKRSGDARLILCRLPNLRVLSVDLGHRYAAACAVWETLSKEDFIKQTEGKKIKAGGTGSDSLYCHVEHECDGKKRTIIFRRIGSDILPDGSEHPAPWARLDRQFFIKLQGEQEGAREASNEEIWQVHELEKELGVNTPLIDRLVTTGWGETDGQQARLEDLRKRGWKPKTSLGITVDESAEEHDEEEARFRPSLSVDDLMAYTVRSLRLALKRHGDRARIAFAMEGKYMHVSGGRKYYFDEQRDASEGASSDERGKSYTEYLAKALQIWADLAYRVAYEPENNCQNGAESASKEAASFDSKYSDPKAEELWTKYIAHLPEYEKLERFGGSKKRAETQKKKKNEERLEKLAKALIDDVDRRTKIHDEFKAYWEEEDKRWSDRIKRVKRWLTGKGLGDTAESNSKHGRKVGGLSLTRIATLTEFRRKVQVGFYTRLRPDGSKKEIKEGFSQKLLDALEELREQRVKQLCSRIIEAALGVGSENVEHWEDTKKRPRGPLSAKDPRFAPCHAIVIENLEHYRPKEVRTRRENRQLMTWSAGHIRKLLKEETYLYGLHLREVSPSFTSRQDSRTGAAGIRCSDVTVREFLYSPRWRKRVLQARENGNKDVESEFLHMIDERLNDKQKHHTLSSVIRLPDRGGEIFVSSDPRSPAAVGIQADLNAAANIGLRALMDPDWPGKWWYVSCSASSFAPAQKYVKGSACMPPRLPVQRNESTDLDDGS

SEQ ID NO: 287 - protein, 1100 aa, Unknown
  Description of Unknown: uncultivated organism sequence
  Category: MG37 effectors
  Description: MG37-27 effector
MAELELPKTQRAYTLRLRGADPADSSWRDALWATHEAVNKGAQVFGDWLLTLRGGLDHTLADTKVKGAKGKPDRDPTRDERCDRRILLALSWLSVESAPRQGDTHEKFVIASGKDDTPSSRDKKVVGKLREILKKRGLKDDDLAGWISDCEPSLSAAIRDDAVWVDRSAAFDAAQKCVGLSLTREEVWDLLQPFFGSREAYLASLEAAEDSDSEAAAEDKAKDLVQEAGQWLSSRFGTGKGADFAGMVNVYNTIAAWAKEQTGKTNRFGSEALSSLGKRLTVFKPKTNDADGILGLISGPGYKSATRNIILAWKEPSAQVTAENVAKLGEAAAEDAQKCTTNIGGKGHRQWSDALLREVEAACGFTYLQNDGPARHSEFAVMLDHAARRVSMGHNWIKRAESERRKFKADAAKVNNVPSKARSWLDQFCEQRAGISGAIDAYRIRKRAVGGWKEVVVKWNRPACKTVEDRVAAARELQDDPDIDKFGDIQLFEALAEDDAVCVWRMNGEANAQSLIDYAAATDAGARQRRFKVPAYRHPDPLSHPVFCDFGNSRWDISFSVHKARSDKAETEKKVALKKEAVEKARCAVEKDRGDNKETEAQSKLKKAQADLAEAEAKLAWLSSRHAISMGLWNGVKVGNSTPLFWSCKRLTNDMALRQNGYPTASMKVTRADRLGRAAVGATSDALIDILGVFDEEHWNGRLQAPRTQLNAIAAHVSKHGWDVKARKMRDRIRWLVSFSAKLRATGPWIDYAKKFSENAPAKPFVSRWGEYAVKHKENDSRAGHAKFALSRLPGLRVLSVDLGHRFAAACAVWEALPISTMKQEIVDRKIVAGGTAEHDLYCHVAKPTAKIAESGRNKGKPITEITIYRRIGADTLAKDTPHPAPWARLDRQFFIKLQGEEEGAREASNEEIWAVHQMETALGRSVALIDRLVAAGWGGTDKHKQKARLEALTKLGWQRSSEKPPYGKRPSLSVDELMSSAVRTLRLALKRHGDRARIAHYLIADEKTKPGGIKEKLDIKKGRIELLQDALVLWHDLFSSRGWRDDSARQLWDTHIARLSGYQTPEEIGEEASARERTAKEKETREKLSGAAQSLASNE

SEQ ID NO: 288 - protein, 1448 aa, Unknown
  Description of Unknown: uncultivated organism sequence
  Category: MG37 effectors
  Description: MG37-28 effector
MAEQVAATQRAYTLRLRGVDPQGPSWREALWRTHEAVNKGAKAFGDWLLTLRGGLDHALADAKVKDGKSERCPTDDERKGRRILLALSWLSVESEKGAPAEHFVPHDLDKQSGTRSRWKTVDALKEILKGRGLCESEIELWVQDCSASLSATIRDDAVWVNRSKAFDTICNGQKIVEARKDCQTMLWYLLGDDYLTLPKKPEKPKEEPTETEGEPSEEESNQERRSAVIQSGKGAGQRTRHPFSHIFGDSTGFGKPLRKLDLRDHWKTHLETRVTASQIPMRDAKKKKEEGVSQKEGVSPEEGVSPTELHREMFSKAASRLAQIWTKQKQQEVERQNRKAADEALKTLEADTQCKSALDLLDALCVERGTASGAQEEYRIRPRQIDGWDRVVKAWDPTANTCDPTVAEEQRIAAAKRLQDEDSDEKFGDINLFIALAEDKYKAVWWHANAPKPEILKTYVKGKKARADAVRLKVAAFRHPDPYFNPVFCQFGVSRPRIEFRRLRDFTSKPEGRDVRAVGLLLWNGEKADLHVLHAVSKRMDREVGDACGSVQKGAADLAEVTRRSRLSIATLAQLPEKGSVRVAHVFDRKKVKARKTNEKGAGAEGASEPAREKEPEWNGTLLGERRALEAIGRLVEDGKHTEAKECRRRLHWWLIVSLEMRPQGPWLKYGEDNNLLEVRYDKQQKENVVATAPRNSRDEWRGLAYPFRHPCNEKGRKGMARHQLSRLSGLRVLSVDLGHRYAAACAVWETLTTGCFQTEIEGRRILRGGTGEDALYCHTEHEANGRTHTTIYRRIGPDKWPDRTPHPAPWARLDRQFLIKLQGEEDSAREASNDEIWAMHRMETALGRAVPLIDRLVAAGWGHTEKQKARLEGLKTLGWTPAPRAQQSADPEGTQEEGYRPSLCVDELMFSAVRTLRLGLRRHGDRARIAHYLITDEKIKPGGVKERLDENGRVELLLDALVLWHNLFSSRSWQDAAAKQLWDAHVAKMSGYQRPEEIREGISRQERKKKQEEIRHNLRCAAAALAKDANLRKALHDAWNERWKHDDEQWKKHLRWFKAWVLPHGPAANSCSIRKAGGLSLTRIATLTEFRRKVQVGFFTRLHPDGTKAQINEQFGQSTLDAIEHLREQRVKQLASRIAEAALGIGRMKRSEGGKDPRRPRARVDRPCHAVVIENLTRYRPEETRTRRENRQLMSWSSSKVKKYLAEACQLNGLHLREVQAGYTSRQDSRTGAPGIRCQDVPVKEFMQSPFWRRQVAQAEKRQAEGKGDARECFLCELNAKWKGKPEADWEKAGAVRIPLKGGEIFVSADPKSPAAKGLQADLNAAANIGLKALLDPDWAGRWWYVPCDPTSFKPVEDKVGGCAAICLDKPLKNASAAQDTDKPGKKRRKAGKQTGACVNLWRDVCSQPISAGDGWREFTPYWNGVQARVVNILRQAAGFARDPEER

SEQ ID NO: 289 - protein, 1420 aa, Unknown
  Description of Unknown: uncultivated organism sequence
  Category: MG37 effectors
  Description: MG37-29 effector
MAERATVATTQRAYTLRLRGMDKSDNSWRDALWATHEAVNSGAKVFGDWLLTLRGGLSHKLADKPDVQGEPPSEQERKNRRILLALSWLSVEDRHGAPADFIVEQPVEALRTVLAARGLGEDELGSWIEDCSPSLSAHIREDAAWVNRSDAFDQFRSRTGGSADREYACRVVLGFLELKGPYFHVPSVDDDSSSSPAASGDDKPLVNEATGWLCDNWGVGKKTDKARVSGILDRLGRLDFDKFVGKSSIELLRFACQEIGLDAAEGAAAHTLCSNLIAHIGWQGRPSSARMALEAISAAPNVTDALAQRLTKKLRQEAAAKLEESGIAVPSWMPDERVRLERAIGLAYRDGKDRTFEFAVMLDHALRRVSGAHSWIKLAEGERRKFAEDAAKLQAVPAAVRELLNRFCEDRGGISGAVEAYRIRKRAIGGWDQIVAAWRACPDSEEARIDAARRVQAEWEDTDGKFGDIQLFEALATDDAKCVWENGPQPLQDYVAATTARADQLRFKVPAYRHPDPLRHPVFCDFGNSRWTIKFAVHERHKLNGGRPRKNVDADWLRDDSALSMQLWNGEALAPKPMRWSCKRLVNDLAIKQKPVSDGDAVTAVTRADRLGRAAAGATRDQQVRIANIFDEKDWNGRLQAPRVQLDAIARHVDRCGWDAKAQTMLRRIRWLVSFSPKLTPRGPWVDYCSQFDDASATRPFVSGKGEYAVKHAGNEARQGHARLILSRLPGLRVLSVDLGHRFAAACAVWQTITARQMEEACRTRGHQAPSPDDLFIHLKRRIRKTVKDKEREVEQTDVYRRIGPDRLPDGTEHPAPWARLERQFVIRLQGEGNARRATRDERDRVKDFETHIGFRNAADERMPSMVDELQFHALRLARLGIARHACRAKIAWALTSLCSLRPGGGQECFAEGSPEHAEHLTRCLMDWHAMAAESRWNDSQMRDLWNQNVAAIDPDLKIVEPPIEPPSERPTRQEREKNQNQTEERIRAAVGRLTIDSRTAAAGEIARRWNDDDARWREHLRWLRSWLLPRGLKKDKARARLARRMGGLSLTRIAAFKSLYQVQKAFFMRPDPANPRKRVPSPGDESLERFGQRVLDAMERLRDQRVKQLASRIAEAALGIGAEGIPGRRPDRCVHDPCHAIVIEDLTHYRPDDLQTRRENRQLMDWSSSKVRKHLSEACQLHGLHLREVSPAYTSRQSSRTGLPGVRCQDVSIMTFLKAPHWRKRARVAKERLEAHRGGALDCYLCELDEQLSRLANDRKSPWPPLRLPVRGGDLFVSVDGHTVQADLNAAANIGLRALLDPDFGGRWWYVPCNSVGKPLPEKVKGCPLFTGKPLTSADANPPTPRPAGKGRKKGARTDEPRTINLWRNPVAQPPESTTAWTTFDRFWPNVEAQVVKALQQQNEHRARIARNPLEETPF

SEQ ID NO: 290 - protein, 1392 aa, Unknown
  Description of Unknown: uncultivated organism sequence
  Category: MG37 effectors
  Description: MG37-30 effector
MAESLPATQRAYTLRLRGADPDDESWREALWRTHEAVNKGAKAFGDWLLTLRGGLSHELADEPVKAKGGRRQPSADEKRDRRIVLALSWLSVESERGAPQQFIVASGKDNDKQRQHKLVKALRDILQKRGVGKAELDEWVKACEGPLGAAIREDAVWVNRSAAFDQAVKRIGKSLSRDQVWDLLERFFGSKNAYLAPIVLKDEAEPSEKAKDLVQKAGQWLSSRFGKGKGAKFEVLSGAYQEIERWAKSARPSSPAHLMAHLARLLKAPSEDLDGVLSIISGPGYKSATRNLLKKLSGQQRVSSEDLARLAKTAADDRVKCKSKVGEKGKRPWADTILEDVQRACGFKYIPDGGPARHRQFAVMLDHAARRVSVAHTWIKRAEAKRRSFEEDARKIGQVPSQAKQWLDDFCLERSRSSGSLEGYRIRKRAADGWEHVVSRWAGADCTTVADRIAVVRELQSDPEIDKFGDIQLFEALAEDDATCVWKPEGEPDPQPLKDYVAAKDAEFKRRRFKVPAYRHPDPLLHPIFCDFGCSRWDIKFDVHEAYKRKERKSTQTQTNPHGLTMRLWDGTDVSDVRLRWRTKRLFGDLNLGGAGAGKDVSRADRLGRAAAGAQEGEAVQIAGLFEDKDWNGRLQAPRPQLDAIARRVDAHGWDKQAVRMRARLEWLLTFSARLRPRGPWTEFAKKNDLRPDPVYWPHAAENKNRQGRGRLILSRLPGLRLLSVDLGHRYAAACAVWEAVSAEAVKKACKEAGHPNVKEDDLYLHLKRKDQGKLRTTIYRRIGADRLGQPTPRKEVAHPAPWARLERQFLIKLQGEDETPRKARKDEFKAVENLERELGRERSEADKLPHRIDELMSEAVRTVRLALGRHGNRARIAHYLVATEKTMPGGVVQSLDQSGRVRQIAYALELWYELAASSKWKDDWAAELWEKQAWAKDVPLQKRDEETVTRQALKKEKKERCGKLEAAAENLLRDGARCRDLSARWAKRWGEEDKKFRERLRWLRDWILPRGKKAAKNPAIRHVGGLSLTRLATIRSLWQVQKAFFTRMTPEGRRRDEDGRPLTAGEGFGQKVLDALDRMRDQRVKQLASRIVEAALGVGKEQEKCANRDPRRPRECVFEPCHAIVIENLTNYRPEETRTRRENRQLMRWSAGKVKKYLSELCQLHGLHLREVGAEYTSRQDSRTGAPGIRCQDVPVREFMRSPFWRKQVAQAEKKLEKGEGGARERLLCELNANWKDSSEKELKEAGVIRVPLNSGEIFVSADAKSPAAKGLQADLNAAANIGLRALLDPDWPGAWWYVPCDAKTMKPSKEEASGSAAVDMEKPLVQVSEAKPGARGGRGKSEKPVVNLWRDVSARALEPGDWRRWEPYWNDVSARVVRLLRKQQGLPDFA

SEQ ID NO: 291 - protein, 1451 aa, Unknown
  Description of Unknown: uncultivated organism sequence
  Category: MG37 effectors
  Description: MG37-31 effector
MAGNDQNTTQRAYTLRLCGTDPNDQSWRVALWCTHEAVNKGAYAFGDWLLTMRGGLDHTLADAPIADRDPTDEERKARRILLALSWLSVESELGAPEEFIIASGEDAEMERNGRVLTALEDVLKKRGLRKEKIQEWIEDCSPSLSAAIRKDAVWVNRSKAFDAAIGTYHGLTREYAYTVINSFFRLDDKYLQLPDIGVDDQSGAGADVAESPEFRTLARQWVSTNFGTGEKSDADLILKKLNILVAADLIRFAKQSKVSFIKEMCNLLGIQGEDVDALRTGIGWKTGRKSKGRLAIDSLPEQVTSESIQRLQQKFEEEVSDKQRKTRDVPGWMPSFRQAIEKECGMPFRGDRDHIGEFAVMLDHAARRVSQAHSWIKRAEAERRRFEEDARKMDDVPEKTKEWLDSFCSERSDTSGALEPYRIRKRAVDGWKEVVAAWSKADCLTTEDRIAAARALQDDPEISKFGDIQLFEALAEEDAMCVWHKDGDPANAPDPQPLIYYALASEADFKKRQFKVPAYRHPDALKHPVFCDFGKSRWAIDYEIHRNAKTPSPRALTLTLWTGKEMKPVSLRWQSKRLAHDLNIKSDGRGEGASLVTRADRMGRAASGVSKDDEVEIAGLFETKEWNGRLQAPRCQLEDIARHVDKHGWDSKASVMLNAVQWLVTFSARLQPQEPWREYAKNNENVNLNLDKKNRQPHTDENKNRKGRHAKLVLSRLPGLRVLSVDLGHRYAAACAVWETLSIESFRKEIRGRTILRGGKDAEALYCHTEHEENGNKHVTIYRRIGADKLPDGATHPAPWARLDRQFLIKLQGEGEEAREASNEEIWAVHRMESELGRAVPLIDRLVAAGWGRTEKQAERLEALKRLGWEPPLATAPVVEDASGEDADAYRPSLAVDELMSSAVRTLRLALKRHGDRARIAYAMTATYKSMPGDRKYYFTKAEELSSNDDQATREEKHIEFILDALVLWQSLISSRGWRDEAAKLLWDKHIAKLPVYEAPEELGEDITSVERKKKRDNNREKLYGVAKALVQDRPLRNELHDAWNKRWEQDDARWREWLRWSRDWILPRGRQAGDHSIRKVGGLSLNRLATLTEFRRKVQVGYYTRLRPDGTRKEIGEAFGQKVLDDLEQMREQRVKQLASRIVEAALGIGSEDRAHWEGGKRPRQRIDDRRFAPCHAVVIENLTHYRPEETRTRRENRQLMTWSSSKIKKYLKEACQLHGLHLCEVTASYTSRQDSRTGAPGIRCQDVAVREFMLSPFWRKQVKRAEAKQAENKGDSRERFLCELNAKWKNKTEVEWRNAGVVRIPLRGGAVFVSADRRSPASKGIQADLNAAANIGLRALIDPDWPGKWWYVPCFSSSFIPTDESTKGSEAITGKPLKERPTDDTGKMATRKRSGRSSRSSGGVVNLWRDVSSLPVSADKGPWEEYQPYWNKVQERVVRILHDNMVDSG

SEQ ID NO: 292 - protein, 1472 aa, Unknown
  Description of Unknown: uncultivated organism sequence
  Category: MG37 effectors
  Description: MG37-32 effector
MAHQAAVTQRAYTLRLRGEDPQDRSWRDALWATHEAVNKGAKAFGDWLLTLRGGLDHALADAKVEGGKGKPDRDPTDEERKGRRILLALSWLSVESEKGAPEEYLVPHDLDKQSGARSNWKTVDALREILKGRGLGESEIESWVQDCSASLTAAIRDDAVWVNRSKAFDDLCPRFRGLDRDYAAKTISFFFGNQGTYLALPNRDNDEDATTAVQSGDSSDFRERARQWVSTNFGTGTKSDNARICSALHTLATSNLMSFDGCSKADFLKHLATLLGRSEPNKEPEEVLRIAIGWTTGRPSAGLLAIKSLPDPVTANDIDTLQRKFADEKAKKEEKADLLRVPEWIRTFRETVERECGIPYVGKRDHIGEYSVMLDHAARRVSIVHSWIKRAEAERRRFDEDAKRMANVPEPAKNWLETFCLERSGASGARDQYRIRRRAVDGWEEVVAAWSKADCKTAEDRIAAARALQDDPEIQKFGDIQLFEALADDDALCVWHKDGDSAKAPDPQPLIDYVLASDAESKKGRFKVPAYRHPDALLHPVFCDFGKSRWDIKFDVHEARKSTARKKEGATQNSDPHALSMTLWTGSTFKSQKLRWQSKRLTHDLALGQGKQDHRAPEVARADRLGRAAAGVPASATVRIAGIFEQKDWNGRLQAPRARLNAIAARVARHGWDDKAKRMRARLRWLITFSARLQPSGPWVEYTATFPDDASAKPFVSRKGDYAVRHQGNDAREGHAKLVLSRLPGLRVLSVDLGHRYAAACAVWETLAKEVFEKERHDAEAKGAHVVLGPEGCKPEEAIYAHFVWPEKESNAATKKARQEGREKFHPVTVYRRIGPDELVDTSTGEVKEHPAPWARLDRQFLIKLQGEDHEARKASPAEVEAVQELERAVGREPPDQRSLRVDDLMSETVRTVRLALQRHGRRARIAFNLTASKRLLPGGREEVLTDEGRVGLLADTLADWYALFAGKGWNDEWARQQWETYVTPLLQGAALPQIPEDAEATPKARKKYRADLTENLKPAAESLAQNEPLRMKLHCLWATRWSKDDIALRKCLRWLRDWILPRGKKVKEKAGRAIRHVGGLSLTRIATIKSLYQVQKAFHMRPEPEDLRKNAPSKGDDALLDFGRSILDVMEHLREQRVKQLASRIVEAALGIGIERQVGKKTPKRPRQRLYWKDEKGNEHGDRRFAPCHAVVIENLTHYRPDETRTRRENRQLMSWSSSKVKKYLAEACQLNGLHLREVQAGYTSRQDSRTGAPGVRCQDVPVKEFMRSPFWRKQVAQAEKKQAGDKGDARERLLCDLNAEWKGKPEADWEKAGTVRVPLKGGEIFVSARPCSCCKHGKRGGAPGLQADLNAAANIGLKALTDPDWPGKWWYVPCDPTNFKPARDKVAGSAAICLDKPLKNAPAAQDTEGPRKKRDEAGARSRGVVYLWRDVSSRPISANDAWREFTPYWNDVQARVVNILQQLAKNQGVR

SEQ ID NO: 293 - protein, 809 aa, Unknown
  Description of Unknown: uncultivated organism sequence
  Category: MG37 effectors
  Description: MG37-33 effector
MAKDNAPVVPSGLFDLADWNGRLQAPRRQLDAIAAIHDRTDLSVEEKRQLVAKRTRTIRWLVTFSAKLQSRGPFIAYAAQHGFDWRYGAHGIENKSREGLAKLVLCRLPGLRILSVDLGHRYAAACAVWETLSAAQMQNACLEAGMEVPSQRTLYSHLKHFVNGKEKKTIYRRIGADTLPDGSPHPASWARLDRQFLIKLQGEDSDARPATCDEVVAVEQLETELGYVRPIKRKGREHLVDELMSDALRTLRLGLQRHGTRARIAFNLTATKRTRPGGIQELLDQESRIGLLTETLLEWNELYAGERWADELAMDMWNKHIQPLLGGTILQETNNQDVTPSAAKRRMQREETRKKLRPVAKQIAENDSLCRQLNVLWNTRWQIEDAAWRMRLRWMRRWLLPRGINRDPQFRKSIRDVGGLSLIRIASFKSLYQVQKAYWMRPHPDDLRRNIPERGDSSLTSFGQRVLDAMERMRENRVKQLASRIAEAALGIGDETSVNAKNGRRKRPTERSNDPRFAPCHAVVIEDLTHYRPDETQTRRENRQLMSWSSSKVKKYLGEACQLNGLYLREVPPAYTSRQDSRTGAPGLRCNDVTVAEFYTSRFWRKQVEAAEKNQKDGKKGDARERYLLSIDERIRSEANDRDVFRIPVKGGEIFVSACGQDGGSNANRKAPPGLQADLNAAANIGLRAIFDPDWEGRWWYIPCDATTICPVAKKFNGCKAVDSSKPLRIVAEKVAVSSSSIDEKRSGRKGIALTDGSRIVNLWRDPSGAPIRRDVPSNSEWQDYAEYWNKVQSRVIANLRKSYGLREI

SEQ ID NO: 294 - protein, 1325 aa, Unknown
  Description of Unknown: uncultivated organism sequence
  Category: MG37 effectors
  Description: MG37-34 effector
MAKETTTQRSYTVSLCKPELGAKAWKALAATHIGMAKGAKACGDMLLNMAAGIAPCAIEELGFSGAEAVRNARRMLTLTWFDVESEDGSPQEFVVPVEELPQKLRDHLISAGLDREEADSWLEDCQDVFATPIREDSCWIDRRSSFEAMEARLGVDISQSDIEDFCFGQFAILGSLKDYLIIPDYESLQPDGISDAPSKIQAARNMLSSRLGAGIGSDTAAMADAYDLINRALEGLSSGEHCPKNEFRRVIELELDDSMPDISFEEFVNSKIKGIGRPTATAQRMEAALACREFIPWSQIEALMEKSADDARKQRAKVGLKGRRPYFDAIMGDLEKKTGIPYPAEGNQTPARNWYSCLFDHAARGVSAHHTWVKRAESTRNATYANNEAFETLPDEARAFLSKYEKERSLSLGAVEPYVIRRKAITGWTKDHVKQLHNAKSAEERVEILKEAQSQGDMGDMTLLIDLVRDDALCAWHDVEGKPAEKILEVWAKHQELERERLHFKTPSYRHPDHLLHPVFADFGKSRPEATYTFGESLEQRTVTLMLVDGGGFSRFTFHWNSKRLMDDFDFSALEKEGKAAACAMTTRFGNSLEEERKPRLLLTKAAKKPIVSDVGTRLQLTRASLERCAKRQNDAMKNPDELDWFLSLALNIKPAPFTPKALIAQAKERKDENKARTSALSKLRYSRIHGLTFIGVDLGHRKAASCSVWKTCSAEEIEQLCIEAGHELPDKNTLHLTLDCIDRRINARRIGADTLPSSEQHPAPWAVLQREFAIELPGAKEEEQRAATKNELSFLANPYAISVETRSAKAKKSAYRTTSEAQYAAVEAIRRDVKQHASMASFIHLIRSKKITKPGGAEMLLSDDELVKTVEKRLEKELGNKYAKPAPWVENLPRSNDPSTCAHILCTEKEYVDALEKQWEEDDENIRIALRILRNWIFKGIEPYSDSRTACKGVGGLSLNRIATMQMAYQLVRSFSMRPFPTDTRRGRRMSAHINTMREQLAKHVASRIVEAALGLGGSQNTSEKRNVRTPGDRFQPCDLVVIESLTNYRPEQTRSRAENRRIMQWASARVGEMLRDECEIYGIALYETPAAYTSRQDSRTGLPGFRFKEVPVAAFVNGGSYHGVNIDRALSSDCENERRFYGELLKRWNKGKGEWDEPLRPEKTVWTLKRGAWVSKNGMLLKKGMAPQPIPIVANGSELFMASTDEGVLKIQADINAAGNIALRGVTDPDWAGSWWRVNIQAKSGMVEKRHRGSLAFDGTAIDPEGKAPHEGVIGAWSTVGATPLSDEKRKWSTYQKYWDDQRSKIFARLCRRYGIPPAIEEE

SEQ ID NO: 295 - protein, 938 aa, Unknown
  Description of Unknown: uncultivated organism sequence
  Category: MG37 effectors
  Description: MG37-35 effector
MALTVETTQRAYTMRLTGDSDNTHWRELLWKTHELTNRGAHAFGDFLLTMRGGLSHELATGNTSEETRTRRIILAMSWLSVESKEGSPQQFHVPQNWEGKKQLGQYKVLEALESILTKRGLDRKEIEAWINDCTASLQARIRDDAVWVNRSECFDAFCKEAGVSVNRASAKNNLFFFISEDQYFLLKDIGEESANVPDSNSLNLVQLARKWLSNYWGAGIGNDKRSIKDSLTTIAGLDYGHMFDRSGTDLLNYIAVKLRFGEVEGDWDLRRLKSCIGWRSGRSSSAAMALEKIAAEKNISKEAVERFVEKCADEAKTIKVPDKESQDTQTWNENIRGQLERAIGVPYRDEKDHIDEFSVMLDHGARHVSVAHSWMLLQEGKRIEFSKDAQKLNKVPEEARQYLDEYCELRTELTSAVGDYVIRKRAIEGWKEVVKAWSASDCRTPEDYVEAARQAQAEDVEGGKFGDINLFEALAEEDACCVWRNDKGKPDADILKNYVEARWAETQMKRFKVPMYRHPDALRHPVYCDFGSSRFSIDYAALRAKKDVPVNSLTLTVYDGASFKPLTLRWQSKRLMKDIIDLRPKDNKDGDAIVVSRADRLGRAAGGAGDVKKGLTIATVFDEKKWNGRLQVSRRQLDNLERKLMKAGVPDKDRCKTVQSHLPNLDWFITFSPKLSPQGPWIDYAMENKLKVNAKNIFNWRQRFEPKKRGTLTYAPLCRLPDLRVLSVDLGHRYAASCAVMQTMSTKQLCALCEDAGATPPAGDALYFVLSEQNGEKPKKKWFRRIGPDRLPDGAEHPAPWAMIERQFTIKLDGEDDTVRGARKEEIKNAVGFCENIGIDENDLPKNAVDELMGFCVRQYRLALRRHSDVARIAFAMTAQHRHGMGGRKETLDSSGILEEKTKALLLWDNLRNGRGKAKETAERIWGNYLAVHVDRLG

SEQ ID NO: 296 - protein, 1442 aa, Unknown
  Description of Unknown: uncultivated organism sequence
  Category: MG37 effectors
  Description: MG37-36 effector
MANQAAVTQRAYTLRLRGVDPQDQSWRDALWATHEAVNKGAKAFGDWLLTLRGGLDHALADAKVKGGKRKPDRDPTDEERKGRRILLALSWLSVESEKGAPDRHVVPHDLNKQSGSRSWKTVDALREILKGRGLDESEIESWVQDCSASLSAAIRDDAVWVNRSKAFDDAVKSIDCSLTRDEVWDMLDRFLGSRDAYLAPAKGAEDESAEAEQEDKAKDLVQKAGQWLSSRFGTGKGADFSRMAAVYEKIADWAGKARAGMTGDAAVAGLAAALSEFSPASNDLQGVFRLISGPGYKSATRKLLKQLPARPSVAQEDLENLRDSACDDAEKCKANTGSKRQRAYADAILKDVESVCGFTYLQEGGPARHSEFAVMLDHAARRVSLAHTWIKRAEAERRRFEEDARRMDKLPARVKQWLDAFCFERSERLKASGEKKTYRIRRRAVDGWKELVAAWSNADCKTAEDRIAAARALQDDPEIEKFGDIQLFEALADDEALCVWHKDGDLAKSPDPQPLIDYVLATDAEFKKRQFKVPAYRHPDALLHPVFCDFGNSRWDISFDVHKAVKTSERNRKNMMAQDPHALSMTLWTGSTVEPQRLRWQSKRLARDLALKGRQDANARPVTRADRLGRAAAGVFAHSAVRIAGIFAQEDWNGRLQAPRAQLDAIAARVARHGWDAKARQMRDHLRWLITFSAKLQLSGPWAGPEPSPWVEYTKTFPDDAPAKPFVSRKGDYAVRHQGNDARNGHAKLILSRLPGLRVLSVDLGHRYAAACAVWETLSAEQLKAACQAAGHEPPKDSDLYLYLKKKVKKQKKGKALEVEETTVYRRIGADVLPDGKPHPAPWARLDRQFLIKLQGEDTEARKASSAEVGAVQELERAVGREPPDQRSLRVDDLMSETVRTVRLALQRHGRRARIAFNLTASKRHLPDGREEVLTAEERVKLLADTLADWYALFTGKGWHDEWARQQWETHIAPLLQGSVLPQIPEDAEDVPKARRKYQDDLMERLSPLARSLAGNDSLCRKLHCLWATRWRENDVILRKRLRWLRDWILPRGRNAEGDPAIRHVGGLSLTRIATIKSLYQVQKAFHMRSEPEDPSRNNPSKGDDALLDFGRSILDVMEHMREQRVKQLASRIAEAALGIGRVKRLAGGKDPKRPRQRVDRPCHAVVIENLTHYRPEETRTRRENRQLMSWSSSKVSKYLAEACQLHGLHLREVQAGYTSRQDSRTGAPGVRCQDVPVSEFMQSPFWRKQVAQAEKKRAEGKGDARERFLCDLNEKWKGQPEADWKRAAAVRVPLKGGEIFVSADEKSPAAKGLQADLNAAANIGLRALTDPDWPGKWWYVPCDPTNFKPAKDKVAGSAAICLDKPLKNAPAAQDTDGPRKKRGKAEARSREVVNLWRDVSSQPISANDDWREFTPYWNEVQARVVNILRQSAGFARDQGER

SEQ ID NO: 297 - protein, 843 aa, Unknown
  Description of Unknown: uncultivated organism sequence
  Category: MG37 effectors
  Description: MG37-37 effector
MAQQPQVPVTQRAYTLRLSRAPGECAACHTDACDCWRDVLWATHEAVNRGTKAFGDWLLTLRGGLCHTLADMKVPAKGKKPARESTEEERRDRRVLLALSWLSVEDERGAPNGDGLRIATGRGTGDQRGKAVKAALHEILKKRGLNETEIESWLSDCGASLEARIREDAVWVNRSVCFDKAAKSVGDTLTREEVWDFLEPFFGTREAYFTGLSDSEEEEDESTREDEKAKDLVQKAGQWLSARFGTGAGADFNLMGGAYQKIAGWASRAASGNQGAKTMERLADCLELPSDSRDLNGVLGVISGPGYKSATRNHLKTMAGKPQVAQDDLDRLKELAEKDAAKCKENVGRKGRRPWSDRVLEDVEKACGFTYLQNDGPARHKEFSVMLDHAARRVSIAHSWIKRAEQRRREFEEDAKKRDALSTRAPEAVEWLDRFCADRSTATGASADSGYRIRKRAVEGWPHVVKAWSRPSCTTEDDRITAAREVQGDSEIEKFGDIQLFEALATAEAVCVWRNQDNEPDASILTDYAAATTAEHDQKRFKVPAYRHPDALRHPVFCDFGNSRWMIRFACHEATKARNGSKRSVKNDAESTQGRHGLRMGLWNGQSVDDVDLHWSSKRLTADLALDDHPDANAVKVTRGDRLGRAASGAVAHAAVMNVFEERDWNGRLQAPRAQLDRIARLEDDAKRAQAETLRRRLRWLVSFSPRLRPSGPFIEYAASHGIKPNRRGEYYPNAPANKGRERLGKLVLSRLPGLRVLSVDLGHRFAHPGTAPIPEGAMRADEPSLLAYLVSSGPYMLEGADQVDYAKPSGERPPPPGLGENGMALVRNPSWQASSDSLRPAY

SEQ ID NO: 298 - protein, 1469 aa, Unknown
  Description of Unknown: uncultivated organism sequence
  Category: MG37 effectors
  Description: MG37-38 effector
MARKSESVADPPTAEAPLTQRAYTLRLRAVDPQDDSWRDALWATHEAVNKGAKVFGEWLLTLRGGLGHELAEPPPLPKGKTRSDDETAALQKSRRILLALSWLSVEDARGAPDGAIRIASGEDADSVRRDKVLATLRSVLAGRGVGQRAIESWISDCADSLSARIRDDAVWVNRSAAFDTKTKELRGLTHKYATETILSFFGPADDYFSLPDADADDGATLAAGDDDSKFKQKARQWISTNFGTGEKSDTGQIIESLRKLAKAELDRFARRPKAELIEAMSRKVHGPTPDFDGLRAGIGWSTGRPSKGRLAVEKLPDRPTKTDIEALQQKFAEEADDKESKSGARDVPKWMPGFRAFVEAAIGMPFVGSRNHIGEFSVMLDHAARRVSIGHSWIKRAEAERRRFEADAQRLGTVPADAAAWLDAYVRDRSGSAGGEYRIRRRAVEGWDEILKRWKRPTCASAEDRIAAAREVQADPEIDKFGDIQLFEALASDDALSVWRNGNDIAPDRLKDYVFAHDARFKQRRFKVPAYRHPDALRHPVFGDFGNSRWKVEYSVLEAAKAARGDRRISAQDAEWIENPRGIRMGLWNGDAVKDFDLWWSCKRLSADLALRQPAHNGQVRSVSRADRLGRAASGIKPGESPSPAGLFSQAEWNARLQAPRSQLTDLAAYLDRSDGRWDDRARKMRDRIAWLVTFSAKLECRGPFIDYAARHGITPNRKGEYYPNADRNKADKREGHAKLMLSRLPGLRVLSVDLGHRFAAACAVWETLSRAELKKEIAGRSVIDGGAGATDLYLHTRHTDCAGKERKTIYRRIGSDQLPDGSDHPAPWARLDRQFLIKLQGEESRARKASADEIETIRQMEIQLGYVREAHKPLPAQIDELLSEGVRLVRLGLRRHGDAARIAYAFHPEAARLTPGGGVEAHTPDTRQQAILDALIRWHGMAMSDRWSDPCAMDAWQTRIQPALTTELPALTPDADRWERNRFRTALEAALTPVATALSREGAETLHTLWSERWEADDAAWRPRLRQLRRMLLPRGLRPVAGDTDAQAAARKARRGAARHTGGLSLTRIATIRELYQVQKAYAMRPEPDNPRKNIPESNDDRFAEFGRSILEAVERLREQRVKQLASRIAEAALGVGRAPRTGDHDRKRPLSPVDAACHAIVIESLRNYRPDELQTRRENRALMNWSAGKVRKYLEEACQLHGLHLREVMPNYTSRQCSRTGLPGLRCDDVPIDEFLTAPWWNKAVNAAAKRLQENGNDSLDRLLVALRENRSGATTDSDKCSQRTLRLPRAGGDLFVAAPPSGDATKGRHRGALQADLNAAANIGLRALLDPDFPGRWWYIPCIEDKAAGTAVPRADKVKGSVCFGPDSSKPEQVGSLLKPGAGDSSDGQSRPARRQRNRRSNAEGKETTNFWSDPRAAALRNAKDGGFWLPTPAYWRWVRKRVVDALWEANGLGAPPADLVRDGRA

SEQ ID NO: 299 - protein, 1510 aa, Unknown
  Description of Unknown: uncultivated organism sequence
  Category: MG37 effectors
  Description: MG37-39 effector
MARKTESAAEPPAPEAPLTQRAYTLCLRGTDTQDDSWRDALWATHEAVNKGAKVFGEWLLTLRGGLSHELAEPPPPPKGKKRRDDDAIAVRKHRRILLALSWLSVEDERGAPNGVFRVASGRESDSARHGKVLEAFKKILESRGIIGDEADSWVNDCTASLSSAIREDAVWVNRSAMFDAAVLKIGPSLTRDEVWDILEPFFGSREAYFAGVELTDEKSSAEEKAKDLVQKAGQWLSSRFGTGTGADFESMSKVYAAMAEWADAAPAFPSGADAIKNLAHSLADFRPATDDAGGILGLISGPGYKSATRNIVKNWESRTTVVTRDDLRKFAETATNDEHKSMANVGAKGRRPWSDRVLEQVEHACGFTYLQTGGPARHKQFSVMLDHAARRVSIAHSWIKRAEAERRRFEADAQRLGTVPADAAAWLDAFVQERSGSAGGEYRIRRRAIEGWDEVLKRWARSDCKTAEDRIAAAREVQADPEIDKFGDIQLFEALASDDALCVWKNGDNFTPDQLKDYVFAHDARFKQRRFKVPAYRHPDALRHPVFGDFGNSRWKVEYSALEAAKAARGGRRIGTEDADWLGNPRSVRLGLWNGDAVNDFDLRWSCKRLSADLALWQPAHNGQVRSVSRADRLGRAASGIKPDDSPSPAGLFSQAEWNARLQAPRSQLNDLAAYLDRNGGRWDDKAKRMRDRLAWLVTFSAKLECRGPFIDYAARHGINANRKGEYYPNADRNKADKREGHAKLILSRLPGLRVLSVDLGHRFAAACAVWEALPRHEFEQEIRGREIIAGGTGPEQLFCHTRYTDKAGKARTTVYRRIGSDTLPDGSEHPAPWTRLDRQFLIKLQGEDAPARKASPDEIKLVERLENELGRRRDDGLPLPRRVDDLMAEAVRTLRLGLRRHGRVAKIAYAFNPDCPGIPGMGGALKAIARGNDDHIKFLVNALADWHAMATDAAWDGSDARQLWNQHIKPVPNGFEVAESTRTEPNAERTTRQQRRKTEEELREKLRPIAEHFARASKESTRGIYEAWRDLWESKDGPKRTKSNFAHTLIHDQAGKVIGSRTAPKQGAPSPEGWHLRLRQTTDWITGRRPPGNISLSPGWKQHVGGLSLTRISTMRALYQLHKAFAMRPRPDKVQGAPERGESNAGTAQSILDAMERMREQRVKQLASHIAEAALGVGRMKQTDGRDRKRPRSPVDAPCHAIVIESLRNYRPDELQTRRENRALMNWSAGKVRKYLEEACQLHALHLREVMPNYTSRQCSRTGLPGMRCEDVPIDEFLSAPWWKKMVNAADKRLQDNGTDSQDRLLVELQKKWSIASDQEKRAQRTLRLPRAGGDLFVTAPPNRAATVEDRSQGALQADLNAAANIGLRALLDPDFPGRWWYIPCIEDKAARTAVPRADKVKGSTCFGPDPSKPEQFGSFLKPDAGDSPEGHPRPARRSGTRPSKADGKQTTNFWSDPSATALRNAQDGGFWLPTPAYWRWVRKRVVAALWQANGLDAPPADLVRDDQA

SEQ ID NO: 300 - protein, 1475 aa, Unknown
  Description of Unknown: uncultivated organism sequence
  Category: MG37 effectors
  Description: MG37-40 effector
MARKTESVVETPAPEAPLTQRAYTLRLRGTDTQDDSWRDALWATHEAVNKGAKVFGEWLLTLRGGLSHELADQRVIEGKGASKKERDPTDDERRDRRILLALSWLSVESAPRDKDDPRKPFLIGAANGPTSREQALREALADILQKRGLSTPEIGDPNVEPENQPDTWLGQCGPSLAARIREDAVWVNRSAMFDAVTSGWQKQDARSDAHTLLSFILSDDFLTLPTAKKQQGKKNDKDPEASENESEQEERQKAVKASSRGAGQRTRHPFSHLLGEGKPFGKPQRTLSLRDQWHGYIKPKLEEVGIPVLDAKASNKGKRKDAAPAHTELQREMFSKAASRVAQIVTKQRQQEADRLARREADADLRMMENDAAYADALKALQEYCDEYRVMSGATGEFLIRPRAVTGWDRVVKRWAGITEANPDAAREARIEAVKEAQDADEEKKFGDANLFMRLADERYRPVWQINGNADRTILERFVKGMKARSDSKRLKVAAYRHPDPYFNPIFCQFGVSRPAIRFGRLKAFSDSPAANDLRAVGMLLWHPNKKCAQITVMHGVSRRLDREIGSACDQVQQDAGKLPSVSRRGRLGAAAAGLASADAPARVAGVFDLKKVKSRAKDDAKEEHEDEGSGNGKLKEPTWNGTLSTNRRDLAAIARLIANGDAQKAERRRQQLRWTLTVSMDMECRGPFIEYAARHGINANSKGEYYPNADRNKADRRKGHAKLILSRLPGLRVLSVDLGHRFAAACAVWDALPKADFEQEIKGREIIAGGTGPEHLFCHTQHKDAAGKQRTTIYRRIGCDNLPDDAKHPAPWARLDRQFFIKLQGEETPARKASPEETKLVERLERELGRRRDDGQRLPRRVDDLMAEAVRTLRLGLRRHGRVARIAYAFNPDCPGIPGMGGSLKAIERGSNDHIQFLVNALADWYALATDSVWNSSAARRLWNEHIKPVPNGFEIAQPTQPEPNAEPTTRQQQRKSEEALREKLRPIAEHFAGADKESTRGIHEAWKNLWEEQDGTGRSKGDFDHTLLRDQNGKVVGSRTRPKAGQETAGGWHEHLRRVTDWITGRRYPGEESPSNGWKQNVGGLSLTRIATMRSLYQLHKAFAMRPRPDKVQGAPERGESNAGTAQSILDAMERMREQRVKQLASRIVEAALGVGRMKQTDCRDRKRPRSPVDAPCHAIVIESLRNYRPDELQTRRENRALMNWSAGKVRKYLEEACQLHGLHLREVMPNYTSRQCSRTGLPGMRCDDVPIDEFLTAPWWNKAVNAAAKRLQENGTDSLDQMLVALREKWSKASDSDKRGQRTLRLPRAGGDLFVAAPPNGAATGQKPRRALQADLNAAANIGLRALLDPDFPGRWWYIPCIEDKAAGTAVPRADRVKGSACFGPDPSKPEQSGSLKPGAGHSSDEHSRPVRQQATSRSNADGQETTNFWSDPRATALRNAEDGSWLPTPAYWRWVRKRVVAALWKMNGLDA

SEQ ID NO: 301 - protein, 1481 aa, Unknown
  Description of Unknown: uncultivated organism sequence
  Category: MG37 effectors
  Description: MG37-41 effector
MARRSASTSKPPGPVAPTTQRAYTLRLRRAPGKCPHCEQDACDCWREALWATHAAFNRGAKAFGDWLLTLRGGLSHELAEQPSPPKNKEPTCEESDAIRKNRRILLALSWLSVEDDCSAPTGTFRVASGKDSEAERKNKVLTAFRSILTARRMRSQDVESWIADCAASLSAKIREDAVWINRSACFDQRALDLKVLSREYAKAAVMSFFGPLDEYFKLPDEADDTKPAVGGDGPDFRTLARQWVSTNFGTGKKSDSEAIAQNLRKLADANLAPFSGKPKAALIAHLSVELDGSTADIDGLCRAIGWNTGRPSKGRVAIERLPDPPTETSIQTMQQKFREEAEAKASSKGLRQVPEWMPAFQKSIERDCGMPFKLGEGRDHIGEFSVMLDHAARRVSIGHSWIKRAEAERRRFEADAQRLNHIPAAAKDWLDQFVQFRSGSSGAAAAGGEYRIRRRAIEGWDEIIKRWKRAACKSPEDRVAAAREVQADPEIEKFGDIQLFEALAADDAECVWRGDGNGTPDPLKDYVAATDALDKMRRFKVPAYRHPDPLAHPVFGDFGNSRGDIRFAVHEAAKATRGTKRIAKDQKEWIRERHGLRMGLWDGQSVRTADLRWSSKRLVDDLALRNHVTTRRTGPVSRADRLGRAAAGLGADEAACVAGLFELPDWNGRLQAPRAQLDAIAACVAANGGKWDDKARKLRDRIEWLVSFSAKLECCGPFMEYASQNGIQPNGKGEYYPHAERNKGRTGHAKLILSRLPGLRVLAVDLGHRFAAACAVWEALSKIAFDAETKGREVVSGGRAADDLYCHTRHLDCAGKARTTIYRRIGPDKLPDGSDHPAPWARLDRQFLIKLQGEERPARAAGPAETAAVQQIETDLGRARGQEDLPPRPVDSLMREAVRTIRIALRRHGDAARIAYAFKPGAKRLKPGGGAQDHTPETHADAILEALLRWHELATGARWRDPWAETQWKDWVQPHISATLPELANDADRWERKRHRAALEQVLRPVAQMLIQRPTDALHQVWSKHWADEDLKWPSRLRWLRNWLLPRGPRARSGAARNVGGLSLLRIATLRELYQTQKAYAMRPEPDDPRKRIAGRNDDRYDELGRSVLQVIERLREQRVKQLASRIVEAALGVGRAKPTRGRQRPQSRVDVPCHAVIIESLRNYRPDELQTRRENRAIMNWSAGKVRKYLEEACQLHGLHLREVMPNYTSREDSRTGLPGVRCVDVPVDPKLGKPKAYWWNSVLSTARKKSIGDAASHDKQGDATSRFIVELAGCLDRLKADGKPLPKTVRVPRIGGDLFVAAPPTSCTAPAHQPHPACDGARALQADLNAAANIGLRALLDPDFPAKWWYVPCIDDQRGLALPRADKVLGSACFPGDPATFGSLLKTRTAAGPAVDGQAAPDRKPRTGTHRPGSAKSRSLGDGKATTNYWSDRSARDLRPADEGGHWQPTNVYWNWVRKRALLGLYSFNGLSPPSDDRP

SEQ ID NO: 302 - protein, 871 aa, Unknown
  Description of Unknown: uncultivated organism sequence
  Category: MG37 effectors
  Description: MG37-42 effector
MATAIQYPTTQRAYTLRLRGIDPQDQSWRDALWATHEAVNRGAKVFGEWLLTLRGGLDHQLADAPVKVRGGTTRLPSDEERRDRRVLLALSWLSVEDAHGAPRDASLIVAKGTDSADCRARKLADALIAILQARSVAASEIGDPSKPPEDQPGTWLGDCMGSLSAAIRDDAVWVNRSKAFDAATQSCPSLTRDEIWDFLEPFFAGAEAYLRPERAESDESESASEAAQEEKAKDLVQKAGGWLSKRMGAGGGANFQDLARAYQAIAQWASYAQPGQSGQQAVEVLAGYLSQHGFSPTANDATGVLSVIRGPGYKSATRNYIITAIAKSPAITAQNLSQLQELATKDNERCSSKIGGKGSRPYSNMILQHVEAACGFTYLQSDGAARHREFSVMLDHAARRANVAHSWIKKAEAERRQFESDARRIENVPQDALNWLRRYCEERGGASGSLEGYRIRRRAVDGWDKVVIRWSRSDCQSADDRIAAARQLQDDPEIDKFGDIQLFEALAAEEALCVWKPNGNPTAQPLKDFVAATEADAKKKRFKVPAYRHPDPLRHPIFADFGNSRWGIEYSAHRAPAQCDELRQKVDKLAAAVADAQRKLEGTKAAQRASRESKLAEAQSKLVAAQKEFAAISDPYRVELKLWNGRAVAAIPMRWSSKRLIADLSLRRATEPSSDQRIGVTRADRLGRAAGNADDGRPVTITGLFQQDHWNGRLQAPRAQLDAIAKHVDKHGWDAEARRQIARIRWVVSLSAELSQQGPWFEFCNRFGEDAPARPFVSRQGEYAVKHRDNDQRKGHAKLILSRLPGLRVLAVDLGHRYAAACAVWEAVTCEQMQHACQAAGTTSPDAQAMFVHLKCSNARGKTVTTIYRRI

SEQ ID NO: 303 - protein, 1505 aa, Unknown
  Description of Unknown: uncultivated organism sequence
  Category: MG37 effectors
  Description: MG37-43 effector
MATENGKEQPNVTTQRAYTLRLSGLDKHDNTWRDRLWNTHEAVNKGAKAFGDWLLTMRGGLCHTLAEVDVPGIGKKPVCLPTRQEIKNRRIVLALSWLSVESFHGAPESLLVSHDLDMAAGERKNWKTIDALHEILRRRGLCEEQIDQWAIDCRDSLSAKIREDAVWVNRSKSFDLAKAKIRESLSREDIWDFLQPFFGNKYSYLKMKTAVTTTSEDFEADAEESKDESSEEKAKDLSQKAGQWLSSRFGTGTGADFSRFCEVYDAIANYCHNIQAGVSGTEVCGSLADALHEFSPRSMNINGILELISGPGYKSATRNVLQKINNLQSVSQLDLDRVHDASVKDAQQSREKVGGKGSRPYANAVLQDVEAACGITYHNTDNGPSHHWQYAVILDHAARRVSMAHSWIKRAEEERGKFEIEKDKLLRVPADARVWLDAFCTRRSSESGAIDSYRIRRSAIDGWKQVVAAWAALPTEAEDKDSVLPSAAESARIQKARELQDTIEKFGDIQLFEALSLPDAKCVWLTNGKPDAQPLMDYVAGTDAVSKKQRFKVPAYRHPDAFLHPVFCDFGNSRWSIDYAVHRAPEKLARAQQLLEKKKEELTRAEQALSKASDPSKRSSIEKKLKTLNVAFKQQEAEVLWLESHHAMTMGLWNGSRIEDTPLLWQSKRFGSDIGQAGAEHPLVASRADRFGRAVVMAKDNAPVVPSGLFDLADWNGRLQAPRRQLDAIAAIHDRTDLSVEEKRQLVAKRTRTIRWLVTFSAKLQSRGPFIAYAAQHGFDWRYGAHGIENKSREGLAKLVLCRLPGLRILSVDLGHRYAAACAVWETLSAAQMQNACLEAGMEVPSQRTLYSHLKHFVNGKEKKTIYRRIGADTLPDGSPHPASWARLDRQFLIKLQGEDSDARPATCDEVVAVEQLETELGYVRPIKRKGREHLVDELMSDALRTLRLGLQRHGTRARIAFNLTATKRTRPGGIQELLDQESRIGLLTETLLEWNELYAGERWADELAMDMWNKHIQPLLGGTILQETNNQDVTPSAAKRRMQREETRKKLRPVAKQIAENDSLCRQLNVLWNTRWQIEDAAWRMRLRWMRRWLLPRGINRDPQFRKSIRDVGGLSLIRIASFKSLYQVQKAYWMRPHPDDLRRNIPERGDSSLTSFGQRVLDAMERMRENRVKQLASRIAEAALGIGDETSVNAKNGRRKRPTERSNDPRFAPCHAVVIEDLTHYRPDETQTRRENRQLMSWSSSKVKKYLGEACQLNGLYLREVPPAYTSRQDSRTGAPGLRCNDVTVAEFYTSRFWRKQVEAAEKNQKDGKKGDARERYLLSIDERIRSEANDRDVFRIPVKGGEIFVSACGQDGGSNANRKAPPGLQADLNAAANIGLRAIFDPDWEGRWWYIPCDATTICPVAKKFNGCKAVDSSKPLRIVAEKVAVSSSSIDEKRSGRKGIALTDGSRIVNLWRDPSGAPIRRDVPSNSEWQDYAEYWNKVQSRVIANLRKSYGLREI

SEQ ID NO: 304 - protein, 1520 aa, Unknown
  Description of Unknown: uncultivated organism sequence
  Category: MG37 effectors
  Description: MG37-44 effector
MAYQNGKEQPTVTNQRAYTLRLSGTNDQDSIWRNRLWHTHEAVNKGAKTFGDWLLTMRGGLCHTLAEADVPGKGNKPARHPTPQEIRSRRVVLALSWLSVESQHGAPERHLVSHDLDIATGERKNWKTVEALREILHGRCLCKELIDEWANDCRDSLSATIREDAVWVNRSKAFDLAAKKIGASLTREELWDFLQPFFANKHGYLQMDTVAGVTNGDSETDAEEAKEDSSEEKAKDLSQKAGQWLSSRFGTGTGADFSRFSKVYEVLAARCGSVAVGVSGVEAIRILAGTLADFSPGSNDIEGMLGLMSGPGYKSATRNILQKINTLQTVSQQDLDRLREASEKDALQSKQKVGGKGSRPYANAILQDVEAACGICYAGTGESPARHWQYAVILDHAARRVSMAHSWIKRAEEQRSKFEIEKDKLDHVPKDALAWLDAFCARRSSESGASDAYRIRRSAVDGWKQVVAAWAALPPKPENQGSELLSDAESARIQAARELQDTVEKFGDIQLFEALSLTGAKCVWQPDGRPDAQPLLDYVAGTDAISKKQRFKVPAYRHPDALLHPVFCDFGNSRWNINYAIHRAPEKLTPAQQLLEKKKAEIDKAELTLAKAGDAAKQANISEKINGLRAAFIQQQEKVAWLNSRHAMTMSLWDGTHIEDTPLIWQSKRFGSDIGQPVEAQPLPVSRADRFGRAVALAQDNVPVIPSGLFDLSDWNGRLQAPRRQLEAIAAIRDSAKLSVNEKQQLVAKRIQSIRWLLTFSAKLQSHGPFIAYAAQHGFDWRYGAHGPENKSRQGLAKLILCRLPGLRILSVDLGHRYAAACAVWETLNAGQIQKACLDAGKEAPGPCTLYLHLKQIANGKEKKTIFRRIAADTLPDGSPHPAPWARLDRQFLIKLQGEDRDARLATSEEIAAVEQMENELGVVRQLKRKGRELLVDELMSDALRTLRLGLRRHGVRARIAFNLTANKRIRPGGKEEVLDQEGRVLLLTETLLAWYELYTAERWTDEPARELWNRHIQPLLGATILQNTVNQEDTPSAAKRRKLREETSGKLKHVAEEIAKNDSLCRQLHVLWSAQWQTEDVIWRTRLRMMRRWLLPRGVKRNAQLRISIRDVGGLSLTRIASFKSLYQVQKAYQMRPHPEDPRLNIPERGDSRLENFGQRVLDAMERMRENRVKQLASRIAEAALGIGGETGISSKDGSQKKRPTERSSDPRFAPCHAVVIEDLTHYRPDETQTRRENRQLMSWSSSKVKKYLGEACELNGLYLREVSPAYTSRQDSRTGAPGLRCNDVTVVEFNNSPFWRKQVGAAEKNQKEGNKGDARERYLLSIEEGIRGAANDRDIFRIPVKGGEIFVSACITDGGNNAKKNAPPGLQADLNAAANIGLRAIFDPDWEGRWWYIPCDAATLCPDAKKFIGCKAVDPTKPLRVVAEEGAISASGIGSKKSGRKKNAATDGTRIVNLWRDPSGAPIHRDVLRSPEWQDYAGYWNEVQHRVIRNLKTCYEQTSQQEDPFVSQDADKPF

SEQ ID NO: 305 - protein, 1434 aa, Unknown
  Description of Unknown: uncultivated organism sequence
  Category: MG37 effectors
  Description: MG37-45 effector
MDKQVAVTQRAYTLRLQGADPQDQSWREALWQTHEAVNKGARAFGDWLLTLRGGLDHTLADAKVKGGKGKPDRDPTNEERRDRRILLALSWLSVESAPKDGDTRKPFVTATGQDSQAIREEKVLCALRGILEKRGVRGADLEGWIKDCTPSLSAAIRDDAVWVNRSEAFDKAVDSIGSSLTRDEVWDMLERFFGSRQAYLAPAEGAEDESAEAEQEDKAKDLVQKAGQWLSSRFGTGKGADFSRMAAVYEKIADWAGKARAGMTGDAAVAGLAAALSEFSPASNDLQGVLRLISGPGYKSATRNLLNQFAARPSVAQEDLENLRDSACDDAEKCKANTGSKGQRAYADAILKDVESVCGFTYLQDGGPARHSEFAVMLDHAARRVSLAHTWIKRAEAERRRFEEDARRMDKVPASVKAWLDGFCLERSEASGALEPYRIRRRAVDGWKELVAAWSNADCRTAEDRIAAARALQDDPEIEKFGDIQLFEALADDEALRVWHKDGDSAKAPDPQLLIDYVLATDAEFKKRQFKVPAYRHPDALLHPVFCDFGNSRWDISFDVHEAVKTGGRNRKNMMVPQDPHALSMTLWTGSTVEPQRLRWQSKRLARDLALKGRQGSNAPEVTRADRLGRAAADVPARATVRIAGVFEQEDWNGRLQAPRAQLDAIAARVARHGWDDKARQMRDHLRWLITFSAKLQPSGPWLDYAAAFPDDAPAKPFVSRKGGYAVRHQDNDAREGHAKLSLSRLPGLRVLCVDLGHRYAAACAVWETLSATQVGDACRAAGREPPRDSDLYLHLKKKVKKQKKGTEVEVEETTIYRRIGADILPDGKPHPAPWARLDRQFLIKLQGEDREARKAGPAELEAVQRVEKEVGREPPDQRALRVDELMSETVRTVRLALQRHGRRARIAFNLTAHKKLLPGGREEVLTAEERIGLLADTLADWYALFTGKGWNDHWARQQWEAHITPLLQGAALPQMPHDAEDMPKARREYEADLMKRLSPVAKSLAGNESLRRQLHCLWATRWRDDDVTLQKCLRRLRDWILPRGRKAKADGAIRHVGGLSLTRIATIKSLYQVQKAFYMRPQPQDLRKNIPSKGDDALVGFGRRILDAMEHMREQRVKQLASRIAEAALGIGRVKRLAGGKDPKRPRQRVDRPCHAVVIENLTHYRPEETRTRRENRQLMSWSSSKVRKYLAEACQLHGLHLREVQAGYTSRQDSRTGAPGVRCQDVPVKQFMQSPFWRKQVAQAEKKRAEGKGDARERFLCDLNAKWNDKLEADWEKAGAVRIPLKGGEIFVSADRDSPAAKGLQADLNAAANIGLKALLDPDWPGRWWYVPCDPATFKPAEDKVAGSAAICLDKPLKNASVAQSTDRRVKKGGKTEARSREVVNLWRDVSSQPISADDNWREFAPYWNDVQARVVRILRQSAGLATDQEER

SEQ ID NO: 306 - protein, 1469 aa, Unknown
  Description of Unknown: uncultivated organism sequence
  Category: MG37 effectors
  Description: MG37-46 effector
MEIPTTQRAYTLRVSGRDKNDHGWRNWLWRTHEAVNKGAKVFGDWLLTLRGGIDHSLADVKDESERTNRRIVLALSWLSVESQNGAPPKRFHVSADGTTDALAEILRLRKVSKPEIESWQRDCRASLTAATRLDAVWVNRSALFDEAAREIGKSLTRDEVWDLFDRFFGSRDAYFEGLATADEDDEEGGGAEEERAKDLAQKARGWLSNRFGSGSGADFSAIADEYDGFAKWCRWFHEHPKESIETSAKQLRKALRIDELPERLASTPGPPNRVQTTYQAIVAAISDGKRLPKEEYAELAEIADSQAEAKRKLVGRKDSKPWANKILDDVIEACRIPYRDTAAEADLINEYSVILDHAARRICMAHSWIKLAEANRQEFTKDARKLDELREYAPAAVSQLDNLCDERTKVTGAIEDYRIRRGAITDWERVVKSWSRKKCVTSADRIAAAREVQAEPENEKPGDIQLYELLAAENYLSVWKQGDKATHKTLQDYVAATDAQAKQRRFKVPAYRHPDPLLHPVFCDFGESRWSVDYSAHRAPAGRNNAHALLAKRTADLAKAREAMFKAKNAELRQKAQEKVSKLESAAAQALDDTQFMELRHGLRIKLFDGSCVDERDLVWHSKRLDSDLALRSDSSPGDELPIAVSRADRLGRAAAGANADAAVAVADLFKLKEWNGRLQAPRAQLNAIAAVRDRKRNKDLSMGDRKARVERMISRLQWLVTFSAKLQPQGPWLTFCQRLPEGFNYDPKKRRLYHKANKNRKGRAQIILARIPGLRVLSVDLGHRFAAGCAVWETLSSGDMKRACNEAGVPVPSTDDLHKVIKRDKRRTIYRRIAADRLPDGTPHPGPWVRLDRQFLIKLQGEESAARLGSPAEIAAVDRLEAELGYSRARPRTKAESSVDLLMAEAVRLVRLGIGRLKRRMRIAHQLTARQVAGMAQKKVKLDDAGRREVLTKTLRDWHDLATSRDWRDEFAVRTWQTHILPLVAGAELPEVPQLETGAARKKRLTAAEERLAPVAERLVARDVTTMREEWAHFVRAEKQLWQKRLRWLRDWLLPRKGRRNAASIRRVGGLSVLRIATLKELYQVQKAYRMLGDPDDPTKGIPQRGDDSLDRFGQRVLTAMERLRENRVKQLASRVIEAALGFGREPGSTGNKQNARSQSQTHEPCHAVVIENLKNYRPDESMTRRETRQLMAWASATVAKYLDEGCQLYGLYIRQVPAAYTSRQDSRTAAPGTRCQDVSVERFLRPHWAVVRSVNDLLPDAESAGMDFQERVTAAEKLVRSGKGNAEQRFLVELYQHSRKLPEQKRRGRSVRIPQRGGELFVSADRRSPIARGIQADLNAAANIGLKALLDPDWAGAWWYVPVDDRTYKPVEKSVAGSAALSISQALSEPPQRGDDEKERNKKKPSTRRGSSGDPQEIINLWRFVSAKELPKDKWFDYQQFQNIVRKSVIDILRAQAGIPEDRVGTQ

SEQ ID NO: 307 - protein, 1379 aa, Unknown
  Description of Unknown: uncultivated organism sequence
  Category: MG37 effectors
  Description: MG37-47 effector
MKKWGKRIISGVIAASLLTAAAISGSEQGTGTVASVVQAGTETSFMGKLLEGGYIDAFTSWTQEEQNKFYDGLSPQQQSVFLEVTNCQITRELIKSERSKEELEQFFDRLQPYFLILKKGNQEKPDDEIVIECINQIEGTDYHSSEQYIKQLVSEKKDHYLEFYNALKLVKDGKLEIESAVDDFYKELGFLKKDRVPANSAEVSRQPVQVQKKAAVKAVSDGYSNFKAVSSLKALKDAVASVKKGEKIAVRVDKGFNVTSVIRTNGRHVKIYADGESGHNLNRTAGYKDVMLEVNGGSLTLGAYDGDGRAKNNLYINGKNIAASAPLIEVASGHLYLNKYSRIIDGYFLADFAGGAGIALNSGTSCYMFGGRIDNCRAKSSKDVSSSSPKSSHGGGVLVGNGSSFYMFAGSIEHCQSIHGGGIMNYGTLRLYGGAISDCAASNQKKDALGGAVKVQGAIETDGKVSSTKGDLGVWKYTRSAAWIVNGKDGYQQGTTTGVVLKNNQADAGGAICLNNGSNGAIQDCNINGNHSTGNGAGICLSNGSYKKGAALELKTGAVIHGNESKGYGGGIYCADSVKGSLSGGTMYDNSAKYGAGIYHEAEFRMSGGTVRSNHSGNSGGGIYAKGKLSMTGGEISANTAATYGGGAILKTAGGSVSGGSIKGNSASANGGGLQIDGTVSLSNASVSSNSASGKGGGISVSSSGTCNLSSGNVSGNTAKAGGGGIYIDGTCKANGSSFTGNQSSGDGGAVYIASGTFTTFQANQAVNIQGNSASGNGSGIYNRNITVLNNNAHILNNQCKNGTQRGIFHEGSLFSIEGNTEIQQEIYLAKDRFVTASNRYFSNSNSLKAKISLDTANIRNGYAVVKGNVSNSADGNYKTGEALLNNQSAGGRFVYAGSGYVMRPGNLKKSSSGCAPFSIVLSQAYQIRYDKNSKEEVMNMPTAAVKYWEEDIKLSALTPTGGSGSFVAWNTKADGTGDGYQPGNVYTANADATLFALWPHYRVEYLPGIRSAAGTTDSQEQNKSEEILLRKNGFRSSEGKFVGWKQDIYHAKKRAERESVGYAELREEKDRGKNDYLLEFSKQMRGMLTEKQLQNSNLLLDKDDIFILKALWDLKPNIILKDKQTFIENEKVDRKRILELIESCSDVEDGNLIENVKIINIKYGKTKNGWCPSEQNFPEGMNSTDVMDTYFMKLEKDESVDVEITFQVADSAGNITSAKGLVCVIYNNPPKLYSHNLAFYQEDISTKPQDILKEIQNNYNVEDIEDEKKGLKIPVSIINPSPLLIEQFNSVGKYKIVYQAVDSLGKKTNLESEVYIAENNPFKDSYKFSIRFINKKYLYTLKKESKWIKDQILNAQLTSQLEKTREDAVLRYKFKVSK

SEQ ID NO: 308 - protein, 1481 aa, Unknown
  Description of Unknown: uncultivated organism sequence
  Category: MG37 effectors
  Description: MG37-49 effector
MPKQNKPPVTQRAYTLRLRGTDLNDQSWRDALWKTHEAINKGAKAFGDWLLTLRGGLDHSLVDTKVKGGKGNPDRDPTDEERKTRRILLALSWLSVESKLGAPENFIVASGEESAQDRNNKVIAALEEILKSRGVAENEIDQWKKDCSASLSAAIREDAVWVNRSKAFDEAVKSVAFSLTRDEVWDMLERFFKSPTAYLDPAKGSEHEYSETEKEEKAKDIVQNAGQWLSSRFGTGKGADFSRMAEVYEKIAVWAGNAQAGTTWNEAIRNLAAALSKFSPKTNDLQGVDGLISGTGHKSRTKNLLKVLAAKSEVTIQDLEILKNNAAEDARKCFQKKGSKGHLPYSDAILRDVESVCGFTYLQNGGPARHFEFAVMLGHAARRVSLAHTWIKRAEAERRRFEEDAKKMDNVPVKTKEWLDEFIRERSGFSGALEPYQIRRRAVDGWKEVVAAWSKAVCKTAEDRIAAARALQDDPEIDKFGDIQLFEALAADDALCVWHNEGNATNAPDPQPLIDYVLAAEAEFKKRHFKVPAYRHPDPLLHPVFCDFGKSSWDIKFAVHSFSKKRGRSNNRMTESNDLHAFSMTLWTGVRMQPVSLYWQSKRLARDLALGKYVRNEGAIAVTRADRLGRAASNTSNNDLVTIAGLFEQEYWNGRLEAPRRQLEAIARYVEKHGWDDQAEKMRDQIKWFVTFSAKLQPQGPWCAFAQKLRLSINPQYWPFADANKKRKAHAKLILSRLPGLRVLSVDLGHRYAAACAVWEALSSEEVLQACRAVGHEDPKESDLYLHLKKKVTKQKKGNPVEVEETTIYRRIGADKLPDGTPHPAPWARLDRQFLIKLQGEEEGVRQASNEEIWQVHQLEAALGRSKPLINRLISSGWGITKNQQSRIEALKKLGWCPPEQPESGDVSDADEEEITYKPPLSVDELMSSAVRTMRLALKRHGDRARIAHYLITDEKTKPGGVKEKLDANGRTEMLQDALVLWHDLFSSRSWRDDAAKQLWDEHIIKLTGDKLPEEIGEDASESERGKKKKENREKLHDAAKALAEDESLRKTLHDLWKTRWEEDDRQWKKHLRWFSDWVLPRGKAADDPAIRKVGGLSLTRLATLTEFRRKVQVGFFTRLHPDGTRAETKEQFGLSTLDALERMREQRVKQLASRIAEAALGIGSQDKRHWEGGNRPRRRINDPRFAPCHAVVIEDLTHYRPEETRTRRENRQLMTWSSSKVKKYLAEACQLYGLHFREIFAGYTSVQDSRTGAPGIRCQDVPVKEFMRSPFWRKQVKQAETKLSENKGDARERFLCSLNAMWKDKAVTDWERAGVVRLPLKGGEVFVSADPLSPAARGLQADLNAAANIGLRALTDSDWPGKWWYVPCESSSLRPVKEKVEGSPAVNPTQALPQSAQKQSDGAGAKKKRKGSGTGKPKEVVNLWRDVSSSPLDDPNAGEWKEYTAYQNEVQWRVVRILEEELKGRFQRLYEGAKEDGIPF

SEQ ID NO: 309 - protein, 1188 aa, Unknown
  Description of Unknown: uncultivated organism sequence
  Category: MG37 effectors
  Description: MG37-50 effector
MPKQNKPPVTQRAYTLRLRGTDLNDQSWRDALWKTHEAINKGAKAFGDWLLTLRGGLDHSLVDTKVKGGKGNPDRDPTDEERKTRRILLALSWLSVESKLGAPENFIVASGEESAQDRNNKVIAALEEILKSRGVAENEIDQWKKDCSASLSAAIREDAVWVNRSKAFDEAVKSVAFSLTRDEVWDMLERFFKSPTAYLDPAKGSEHEYSETEKEEKAKDIVQNAGQWLSSRFGTGKGADFSRMAEVYEKIAVWAGNAQAGTTWNEAIRNLAAALSKFSPKTNDLQGVDGLISGTGHKSRTKNLLKVLAAKSEVTIQDLEILKNNAAEDARKCFQKKGSKGHLPYSDAILRDVESVCGFTYLQNGGPARHFEFAVMLGHAARRVSLAHTWIKRAEAERRRFEEDAKKMDNVPVKTKEWLDEFIRERSGFSGALEPYQIRRRAVDGWKEVVAAWSKAVCKTAEDRIAAARALQDDPEIDKFGDIQLFEALAADDALCVWHNEGNATNAPDPQPLIDYVLAAEAEFKKRHFKVPAYRHPDPLLHPVFCDFGNSRWDIKFAVHSFSKKRGLSKNSMTESNDLHAFSMTLWTGVRMQPVSLYWQSKRLARDLAFGKYVRNEGAIAVTRADRLGRAASNTSNNDLVTIAGLFEQEYWNGRLEAPRRQLEAIARYVEKHGWDDQAEKMRDQIKWFVTFSAKLQPQGPWCAFAQKLRLSINPQYWPFADANKKRKAHAKLILSRLPGLRVLSVDLGHRYAAACAVWEALSSEEVLQACRAVGHEDPKESDLYLHLKKKVTKQKKGNPVEVEETTIYRRIGADKLPDGTPHPAPWARLDRQFLIKLQGEEEGVRQASNEEIWQVHQLEAALGRSKPLINRLISSGWGITKNQQSRIEALKKLGWCPPEQPESGDVSDADEEEITYKPPLSVDELMSSAVRTMRLALKRHGDRARIAHYLITDEKTKPGGVKEKLDANGRTEMLQDALVLWHDLFSSRSWRDDAAKQLWDEHIIKLTGDKLPEEIGEDASESERGKKKKENREKLHDAAKALAEDESLRKTLHDLWKTRWEEDDRQWKKHLRWFSDWVLPRGKAADDPAIRKVGGLSLTRLATLTEFRRKVQVGFFTRLHPDGTRAETKEQFGLSTLDALERMREQRVKQLASRIAEAALGIGSQDKRHWEGGNRPRRRINDPRFAT

SEQ ID NO: 310 - protein, 1298 aa, Unknown
  Description of Unknown: uncultivated organism sequence
  Category: MG37 effectors
  Description: MG37-51 effector
MPKQPKPPLTQRAYTLRLRGADSNDQSWRDALWQTHEAVNRGAKAFGDWLLTLRGGLDHSLADAKVKGKSGKPDRDPTDEERKARRILLALSWLSVESKLGAPAHCIIASGTEASEDRNRKVLAALEEILRSRGVGPDEIKAWKDDCSPSLCAAIRDDAVWVNRSKAFDEAVKSIGSSLTRDEVWDMLEHFFGGRDAYLAPAKGSEDESSETEQEDKAKDLVKKAGQWLSQRFGTGEGANFSRLAKAYEKIATWADQALSGMAGDKTMADLATALSEFNPPSNDLEGVLEQIKGRGHKSATRNLLSDIAAKATVTQQDLARLKDTATKDAQESKRKAGLKGQRPYSAAILKDVEYVCGFTYLQEGGRARHDEFAVILDHAARRVSLAHTWIKRAEAERRKFEEDAKKIGQVPKAAKDWLDQFCLERSGVSGALEPYRIRRRALDGWKEVVAAWSKSDCKTVEDRIAAARALQDDPEIDKFGDIQLFEALAADDAVCVWHKDGDAAKTPDPQPLIDYALAAEAEFKKRHFKVPAYRHPDALLHPIFCDFGNSRWDICFAVHTNVQTPSPRALSLTLWTGSEMKQVPLCWQSKRLARDLAFGQDARKDGASDVTRADRLGRAASNVGKSHVVNIAGLFKQKHWNGRLQAPRRQLEAIDRYVKKHGWDQKAENMRDAIQWSVTFSARLQPRGPWYAYAKEHGLREHPRYWPHAQENKKRKGHARLILSRLPGLRVLSVDLGHRSAAACAVWEAVTAEQVKEACQAAGQRKPEESDLYLHLKKKVTKQKKGKDVEVEETTIYRRIGADTLPDGTPHPAPWARLDRQFLIKLQGEEEGVREASNEEIWAVHQMEAALGRSVPLIDRLVASGWGATEKQKARLNTLRNLGWKPLEKAEAQEVPDGGEEMSFSPSLSVDELMSSAVRTMRLALKRHGDRARIAHYLITDEKTKPGGLKEKLDEHGRIDLLVDALVMWHGLFSSRGWRDDAARQLWDEHIAKLSGYKAPEEIGEPSSGPERRNQQKENREKLYEVAKALAQDKTLRGALHDAWKKRWEEDDGRWKRQLRWFKDWILPRGKHASNPTIRKVGGLSLSRLATLTEFRRKVQVGFFTRLHPDGTRAETQEQFGQSTLDALEHLREQRVKQLASRIVEAALGVGSEDKRHWDGKKRPRQRIADPRFAPCHAIVIEDLTHYRPEETRTRRENRQLMTWSSSKVKKYLAEACQLHGLHLREVSASYTSRQDSRTGAPGIRCQDVPVKEFMRSPFWRKQVAQAEAKQAENKGDARERFLCDLNAMWKDKTVAD

SEQ ID NO: 311 - protein, 1504 aa, Unknown
  Description of Unknown: uncultivated organism sequence
  Category: MG37 effectors
  Description: MG37-52 effector
MPPGDHSPPVTQRAYTFRLRGPDPSDQSWRDALWKTHEAVNKGAKVFGDWLLTLRGGLAHTLVEARVKKKGNSKENGEDDREPTAEERKSRRILLALSWLSVESKLGAPEKFIVATGEEAAQERSRKVIGALKEILEKRGLTTSEIEQWENDCSASLSAAIRDDAVWVNRSKAFDEVVHRVGPSLTREELWDMLGLFFASPNAYLAPVTLSEEEPLGTEQEDKAKDLVKKAGQWLSSRFGTGKGADFSHIAGVYGKLAVWAHEAQAGMTGQQAIYNLIGALNEFNPSSNDLEGLLRLISGPGYKSATRNLLGQFNNKTAITQDDLKRLAETALADKVKCETNSRPKGERAYANSILHDVESACGFTYRVDKGEQPVPVSDYSHYANDYRWGPANHSEFAVMLDHAARRVSLAHTWIKRAEAERRQFEENAKKIDKVPKVAREWLDSLCAERSIVLGALEPYRIRRRAVDGWKHVVAAWSKSDCKTAQDRITAARLLQEDPEIDKFGDIQLFEALAEDHAVCVWQRDGEAGKTSDPQLLIDYALAAEAEFKKRHFKVPAYRHPEAFWHPVFCDFGQSRWKICFDVHKNRQSRRQRACANRISRKICFDVHKKRQTLRLSLEVWTGSKMLDMPLCWQCKRLARDLALGQDHKKDRSCQVTRADRLGRAVSNVARNQEVQILGLFEQEYWNGRLQAPRPQLEALGRYIEKHGWDAKAQKSCRAIRWMISFSPRLQPAGPWGKFAEKLQLNPNPKYWPHAEDNKDRGSRSKLILCRLPGLRVLSVDLGHRYAAACAVWEAVDAEQVKEACQAAGHREPNENDLYLHLKKRTTKQKKGSQGVVEETTIYRRIGADTLPDCTPHPAPWARLDRQFLIRLQGEEDEARAASNEEVWAVHKLEAELGRTIPLIDRLLGAGWGQTEKQKARLKALRELGWTPANKCQAFNSTDETELRRPSLAVDELMLDAVGTLRLALKRHGDRARIARYLITDERTKPGGVKEKLDENGRIELLQDALIIWHGLFSSPRWRDDAAKQLWNEHIAKLVGEQNLVEVSEDASGSERRTKQKQNREKLREAAKALVDDVALRQALHDMWKRRWEEEDREWRRRLRWFKDWVLPRREQARKAYSRPAETGSSSHPKRRARYAAIRRVGGLSLTRLATLTEFRRKVQVGFFTRLKPDGTKAEAKEGFGQSTLDALEHLRAQRVKQLASRIVEAALGVGRIRRFPGVKNPKRPDTPVDKPCHAIVIENLTHYRPEETRTRRENRQLMTWSSSKIKKYLAEACQLYGLHLREVTAAYTSRQDSRTGAPGLRCQDVPVKEFMRSLFWRKEVAQAEKKLTAGKGSSYERLLCELNQRWKDNSPGDGKRAELLRLPHKGGEIFVSAAPDSPAARGLQADLNAAANIGLRALTDPDWPGKWWHVPCNAVTFRPVEDKVKGSAAVKLDQSLRQVAHPQSKDPGAKKSKEIVNLWCDISSLPLEHREWKLDWEPYPAYWNNVQCRVIRVLQGKV

SEQ ID NO: 312 - protein, 1477 aa, Unknown
  Description of Unknown: uncultivated organism sequence
  Category: MG37 effectors
  Description: MG37-53 effector
MPQQAKPPVTQRAYTLRLRGADPSDTSWRKALWQTHEGVNKGAKAFGDWLLTLRGGLDHTLADAKVKSGKGKPDRDPTDEERKGRRILLALSWLSVESERGAPEGYIIASGKEAAEDRNGKVVAALEDILKSRGLADTEIAEWKKDCSASLSAAIRDDAVWVNRSKAFDEAAKSVGCSLTREEVWDMLERFFGSREAYLAPAKGSEDDSSETEQEDKAKDLVQKAGQWLSSRFGTGTGADFRRMADVYGKIAAWADKAPAGMTGAKAIEDLATALRQFNPASNDLTGVLGLISGPGYKSATRNLLNQLAAQTTVTQQDLAYLKDKATDDAQKCKQNTGSKGRRPYSDAILKDVESVCGFTYLQKDGPARHSEFAVILDHAARRVSLAHTWIQRAEAERRRFEEDAQKMANVPGPVKDWLDSFCAERSQASGALEPYRIRRRAVDGWKDVVAAWSKSSCRTSADRIAAARALQDDPEIDKFGDIQLFEALAEDDAACVWHKEGDAAKSPDPQPLMDYVLASEAEFKKRHFKVPAYRHPDALLHPVFCDFGKSRWDICFDVHKNVQTPFPRAVCLTLWTGSEMKPVPLCWQSKRLARDLALGQGGQKDGTSEVTRADRLGRAASNVTKSAEVKISGLFEQADWNGRLQAPRQQLEAIAAVRDNLSLSDQERERRMSGMMDRIRWLVTFSAKLQPQGPWCEYAERHGLRTDPRYWPHADTNKDRKGHARLILSRLPDLRVLSVDLGHRYAAACAVWEAVNAEQVTEACRAAGHEAPKASDLYLHLKKKVTKQKKGKPVDVEETTIYRRIGADTLPDGAPHPAPWARLDRQFLIKLQGEEEEVREASNEEIWAVHQLEKELGRVTPLVDRLVTSGWGGTDKQKARLEKLKQLGWSPAKEDKPESDESSDDMESDGYKSSLSVDELMSSAVRTLRLGLKRHGDRARIAHCLVTDEKTKPGGIKEKLDENGRVDLLQDALVLWHDLFSSRGWRDDAARQLWDEHVAKLSGYKAPEEIVEESSGPERKKKQKENREKLYDVAKAMAQDMTLREALHDAWKKRWEEDDERWKKRLRWFKDWVLPRGKHASDPTIRKVGGLSLPRLATLTEFRRKVQVGFFTRLQPDGTRAETKEQFGQSALDALEHLREQRVKQLASRIAEAALGIGSEARKHCDQGKRPRQRIDDPRFAPCHAVVIEDLTHYRPEETRTRRENRQLMTWSSSKVKKYLAEACQLHGLHLREVSAGYTSRQDSRTGAPGIRCQDVPVKEFMRSPFWRKQIAQAEKKQAEGKGDARERFLRELNAMWKDKTVADWEKAGVIRVPVRWGEIFVSASRDSQGAKSLQADLNAAANIGLRALTDPDWPGKWWYVPCEPASFRPVKDKVDGSAVVNPDQALRRSAQAQSGDAAKDKKKRGNKGGGKSKEVVNLWRDISSSPLECIEFGEWKEYAAYQNEVQCQVIRVLKEQIEGRDKQPHEGSKEDDISF

SEQ ID NO: 313 - protein, 1011 aa, Unknown
  Description of Unknown: uncultivated organism sequence
  Category: MG37 effectors
  Description: MG37-54 effector
MPQQPTTQRAYTLRLRGADPNETSWREALWQTHEAVNKGAKVFGDWLLTLRGGLDHALADTKVKGKKGKPDRDPSAEERKARRILLALSWLSVESKLGAPADFIIASGEETAEARNAKVIAALEEILRSRDVAEEAIGDVTKKPEDQPGTWIGDCAPSLTAAIREDAVWVNRSKAFDEAVKSIGSSLTREEAWDMLERFFGSRDAYLAPAKGSEDESSETEQEDKTKDLVQKAGQWLSSRFGTGKGADFCRMADVYKKIAEWADNAQADTTGNDAINNLAAFLSEFNPASNDLKGVLGLISGPGYKSATRNLLTQIAAKATVTQQDLARLKDTATEDARKCYQNTGSKGQRRYADSILKDVESVCGFTYLQEGGPARHSEFAVILDHAARRVSLAHTWIKRAEAERRKFEEDAKKIGQVPKAAKDWLDQFCLERSGVSGAQEPYRIRRRAVDGWKEVVTAWSKADCKTAEDRIAAARALQDDPEIDKFGDIQLFEALAEDDAVCVWHKDGDAAKTPDPQPLIDYALAAEAEFKKRHFKVPAYRHPDALLHPIFCDFGKSRWDICFDVHKNTKTPFPRTLCLTLWTGSEMVSVPLCWQSKRLARDLALDHGRQDLGSPKVTRADRLGRAASNVTENDEVKIAGLFEQADWNGRLQAPRQQLEAIARYVAKNGWDEKAKKMRDAIQWLVTFSAKLQPNGPWCAYAEEHNLNKDPQYWPHADTNKDRKSHARIILSRLPGLRVLSVDLGHRYAAACAVWEALSDKAFKEDLEGKKIIRGGTSDNSLYCHTEHEVNGKKHITIYRRIGADTLPDGTPHPAPWARLDRQFLIKLQGEEEGVREASNEEIWQVHQMECTLGRKTPLIDRLVAAGWGSTEKQKARLDALKNLGWKPVEKAETSEDADTEEEELSFRPSLSVDELMSSAVRTMRLGLKRHGDRARVAYYLITDEKTKPGGIKEKLDENGRIDLLQDALVIWHDLFSSRGWRDDAAKRLWDENIARLCGYKAPEEIGENA

SEQ ID NO: 314 - protein, 1461 aa, Unknown
  Description of Unknown: uncultivated organism sequence
  Category: MG37 effectors
  Description: MG37-55 effector
MPQQPTTQRAYTLRLRGADPNETSWREALWQTHEAVNKGAKVFGDWLLTLRGGLDHALADTKVKGKKGKPDRDPSAEERKARRILLALSWLSVESKLGAPADFIIASGEETAEARNAKVIAALEEILRSRDVAEEAIGDVTKKPEDQPGTWIGDCAPSLTAAIREDAVWVNRSKAFDEAVKSIGSSLTREEAWDMLERFFGSRDAYLAPAKGSEDESSETEQEDKTKDLVQKAGQWLSSRFGTGKGADFCRMADVYKKIAEWADNAQADTTGNDAINNLAAFLSEFNPASNDLKGVLGLISGPGYKSATRNLLTQIAAKATVTQQDLARLKDTATEDARKCYQNTGSKGQRRYADSILKDVESVCGFTYLQEGGPARHSEFAVILDHAARRVSLAHTWIKRAEAERRKFEEDAKKIGQVPKAAKDWLDQFCLERSGVSGAQEPYRIRRRAVDGWKEVVTAWSKADCKTAEDRIAAARALQDDPEIDKFGDIQLFEALAEDDAVCVWHKDGDAAKTPDPQPLIDYALAAEAEFKKRHFKVPAYRHPDALLHPIFCDFGKSRWDICFDVHKNTKTPFPRTLCLTLWTGSEMVSVPLCWQSKRLARDLALDHGRQDLGSPKVTRADRLGRAASNVTENDEVKIAGLFEQADWNGRLQAPRQQLEAIARYVAKNGWDEKAKKMRDAIQWLVTFSAKLQPNGPWCAYAEEHNLNKDPQYWPHADTNKDRKSHARLILSRLPGLRVLSVDLGHRYAAACAVWEALSDKAFKEDLEGKKIIRGGTSDNSLYCHTEHEVNGKKHITIYRRIGADTLPDGTPHPAPWARLDRQFLIKLQGEEEGVREASNEEIWQVHQMECTLGRKTPLIDRLVAAGWGSTEKQKARLDALKNLGWKPVEKAETSEDADTEEEELSFRPSLSVDELMSSAVRTMRLGLKRHGDRARVAYYLITDEKTKPGGIKEKLDENGRIDLLQDALVIWHDLFSSRGWRDDAAKRLWDENIARLCGYKAPEEIGENASGVERKTKQKENREKLHGVAKALAQDVTLRKALHDAWKKRWEEDDGRWKKQLRWFKDWVLPRGKHASDPTIRKVGGLSLTRLATLTEFRRKVQVGFFTRLHPDGTRAETGEKFGQSALDALEHLREQRVKQLASRIVEAALGIGRMKRPAKGKDPKRPEVRVDEPCHAIVIEDLTHYRPEEVRTRRENRQLMDWASSKVKKYLSEACQLHGLHLREVSAAYTSRQDSRTGAPGIRCEDVPVKDFLNLPFWKKEVKSAESKDDAQSKYFIALCEKASVMTEEEKKKTSFRIPRRGGEIFVSADETSPASKGLQADLNAAANIGLRALTDQDWPGKWWYVPCDPVSFLPVKDKVEGSKAVKLDQPLLAQEQSGDGAKDKKKRGKKGAGKSKEVVNLWRDVSSREISPEDVAWEYYSAYQNKVQSRVISILKEQMKDRDRQPHEGSKEDDIPF

SEQ ID NO: 315 - protein, 1284 aa, Unknown
  Description of Unknown: uncultivated organism sequence
  Category: MG37 effectors
  Description: MG37-56 effector
MPSRTSPRAYTMKLAPVSSAGADDWQLPLVRTHEKFNAAVRYWADFLLTLCGGFRPADVPAPEGDGQDRMQTRYRRIFLALSWLRVESQDPLNEDYRVRPDQLRDMLAEILTDRGLDAQVIGSWQEECSQIFSSPIRPEACWVNRARMFDERFRGLSDAERAQIFSDVIFRFVGADVYWAPPEEDAGGRARNDYIKPARAWLSERTGTGKGRDFARIAENKERIAGWAATAPAGLGIQQLRQDLAAAMGWETSLEAFRNGITHVQSNGPPPRSVRLLRDLADGMPIDLRELEKACREEADRDRKKVGRKGRTPWAERLWAEYCTRIQAPLQIDFNAPALSEAAIRVFSNWSWIKRSVSEREQASSGRELISQVPLEARTFLDEYCQRRAEETGAIAQFRIRRRAIAGWEDIVRAWSQEACRTLDDRQAAVAAAQADTPESFGDARLFLDLAADQARCVWQPYGTPDHHILVRYVQAREAEAVYMARKVPMFRHPDPWRHPAFVQFGNSRPRVRYVRPADSPDGRGLVELQLVDAGSGKLRYVRFRWRSKRVLKELLGADQGQVSTGAPPVPRIHRLALAAAGIASPEHASVKVFEGKAEWNARLQFPRGRHGRSTPGRSWLLTLSAQLSPLQKAAPAPATDPRGQGARLRFSRQPEGLRILGVDLGQKAAAACAVWETVSRESLERECRLRRVCAPSPEDLHFEIPDECGRQRHYRRIASDFLPDGQTPHPSPWARLERLFLIRLPGEDEAARPLLKHENEEIARFGGQIGFGPLRERRVDKQMRHCLREARLYLRRLGNLAKLSWDLQHSEWGRSAERWLDLARTDTPLGRWSAQMWREATGEPPPVGGAGGRAGSSPPADASRLLEARLAGKGAIWAETVAARFEEERQLARELVRWLRRWVAPQGTRGKANRSVGGVSMLRINNLTDLYRVEKMWATLPQPDLKDSRTVPQEFCAKLLLIRDQLRETRVRLIASRILEAAVGLGMEPERRKGEPLARRLAAPPPDPRHRRCDVIAIENLSGYGTSDSRPRRENRGLMNWSKERIRKRLLEGAELLGLRVEEVLPNYTSRQDFRTGAPGIRGRMVKAGRLAQLKTWERLLQRAADRNDPVAQYVRTLASNLERIPDSAMVFVPEDGGDIFVPDTDASPAGGIHADMNAAANIGLKAVLDPDWAGAWWYVPVRPDTGRPDTAERLRGCRAPGLDRMRVDLPGSGDPIRNAWRHPSSQPLHLSQWQPYAEYWENVKRAALRRQLERLFSSPSFAASPTGPRTWPAAPLTDPSQL

SEQ ID NO: 316 - protein, 1142 aa, Unknown
  Description of Unknown: uncultivated organism sequence
  Category: MG37 effectors
  Description: MG37-57 effector
MSQQTQLPPTQRAYTLRLRGTDFFDWSWRDALWHTHEAVNRGAYKFGDWLLTLRGGLDHSLANARGKGKSKDNQSVCELTNEERRTRRILLALSWLSVESMLGAPEQFIVATGQEAAKDRSAKVIKALEGILSKRGLEEKEIEEWKNDCAASLSADIRDDAVWVNRSEAFDEAVKRIGSSLHREEVWDMLERFFGSRNAYFAPAKNAESENESGKAQQEEKAKDLVQKAGQWLSSRFGTGKGANFSRMAKVYGKIVGWADMAPQNVNGSNAIASLAESLSEFTPAPNDLPDVLGLISGPGYKSATRELLKKIADKDNVTQADIEALRKKAASDVEKCNQNTGSKGQKAYSDAILNDVECACGFTYLQKGDSARHSEFAVMLDHAARRVSLAHTWIKRAEAERSKFEEDAKKINQIPKPAKDWLDQFCLERSGALGALEPYRIRRRAIDGWKEVVTAWSKKDCKTTEDRIAAARALQDDPEIDKFGDIQLFEALAADDAQCVWLKDDGTPNPQILIDYTLATEAQFKKRIFKVPAYRHPDPLLHPVFCDFGCSRWKIDFSMREAATKLSVVEAKLKKKQVAVQNAEQLLEKCRGQGERQNKAEERLREAQEELQKVQRELEYLRSPQLLKMTLFNSTELKEYVLGWQSKRLFKDLVVEKQASNDNSKKITRADRLGRAAGNASVDSPIEILHIFEEQEWNGRLQAPRQQLEALARYVKKHGWDSKAEKMRDNIKWLITFSARLQPQGPWCEYAREKNSFGLKDDPKFWPHTATNKTRKGLAQIILSRLPGLRVLSVDLGHRYAAACTVWESLSTEVFRKDIEGRKILCGGTDANALYCHTEHETNGKKHTTIYRRIGADTLPDGTPHPAPWARLDRQFLIKLQGELEGTREASNKEIWTVHQMEAAFGRAQPLIDRLVAAGWGNTEKQKSRLEALKNLGWVSVSQNEILGELDVEEQTNRYEPSLSVDELMLSAVRTLRLGLKRHSDRAKIAHYLITDEKTKPGSVKEKLDENTRIELLQNALVIWHNLFSSRAWNDGAAKKLWDEHIVKLSGHTTPDDISEDSPENKGTIKQKEKQKKLYDVAKALSQELAIRKFLYNAWRKRWEEDDEMWKKELRWFKDWVLPPAKILLVRKSSVVYSFSG

SEQ ID NO: 317 - protein, 1479 aa, Unknown
  Description of Unknown: uncultivated organism sequence
  Category: MG37 effectors
  Description: MG37-58 effector
MSQQVKPPVTQRAYTLRLRGIDPSDTSWRKALWQTHEGVNKGAKAFGDWLLTLRGGLDHTLADTKVKGGKGKPDRDPTDEERKARRILLALSWLSVESKLGAPVGFIIASGTEAAEDRNRKVVAALEEILKSRNVATNEIDQWKNDCSASLSAAIRDDAVWVNRSKAFDEAVKSIGSSLTREEAWDMLERFFGSRDAYLAPAKGSEDESSETEQEDKAKDLVQKAGQWLSSRFGTGKGADFCRMANVYGKIAAWADNAQADTTGNDAINNLAAALNEYSPEPNDLKGVLGLISGPGYKSATRNLLNQLAAKATVTQQDFVSLKDKASNDAQKCKQNTGSKGPRPYSDAILKNVESVCGFTYLQDGGPARHSEFAVILDHAARRVSLAHTWIKRAEAERRKFEEDAKKIDQVPKAAKDWLDSFCLERSGASGALEPYRIRRRAVDGWKEVVAAWSKADCKTAEDRIAAARALQDDPEIDKFGDIQLFEALAEDDAVCVWHKDGDAAKPPDPQPLIDYALAAEAEFKKRHFKVPAYRHPDALLHPVFCDFGNSRWDICFDVHKNVQTPFPRALSLTLWTGSGMVSVPLCWQSKRLARDLALGQNAQNDGSSEVTRADRLGRAASNVTKSDEVKISGLFEQEDWNGRLQAPRQQLEAIAAVRDNLSLSDQERERRMSGMIDRIRWLVTFSAKLQPQGPWCEFAEKIQIGINPQYWPHADTNKDRKGHARLILSRLPGLRVLSVDLGHRYAAACAVWEAVNAEQINVACRAAGHREPKASDLYLHLKRKTTKQKKGDQVEFKETTIYRRIGADTLPDGTPHPAPWARLDRQFLIKLQGEEEGVRAASNEEIWAVHRLEVELGRTAPLIDRLVKAGWGQSGKQKTRLDALRNLGWAPANEVQGSDEMDEGEVHKPSLSVDELMSSAVRTMRLALKRHGDRARIAFAMTAAYKPMPGDRKYYFTEAKDASANEDATARNGKHIEFIQDALLLWYGLTSSRGWRDDAARQLWDDHIAKLSVYKAPEEIGEDASGVERKTKQKENREKLHDVAKALAQDVNLRKVLHNAWKKRWEKDDERWKKQLRWFKDWVFPRGKHASDPAIRKVGGLSLPRLATLIEFRRKVQVGFFTRLQPDGTRAETKEQFGQSALDTLEHLREQRVKQLASRIVEAALGIGRVRRPLGGKDPKRPDVRVDEPCHAIVIEDLTHYRPEETRTRRENRQLMTWSSSKVKDYLSEACQLHGLHLREVSASYTSRQDSRTGSPGIRCQDVPVKEFMRSPFWRKQVAQAEKKGDAHERFLCELNAMWKDKTVADWEKAGAVRVPLKGGEVFVSADRISPSAKGLQADLNAAANIGLRALTDPDWPGKWWYVPCEPASFRPAKDKVDGSAVVNPGQPLRQSAQAQSGDAAKDKKKRGNKGAGQSKEVVNLWRDISSSPLECIECGEWKEYAAYQNEVQYRVIRILEEQIKGRDRQPHEGSREDDIPF

SEQ ID NO: 318 - protein, 1518 aa, Unknown
  Description of Unknown: uncultivated organism sequence
  Category: MG37 effectors
  Description: MG37-59 effector
MTELQTQRAYTLRLKGIDEKDQSWRDALWKTHEAVNKGAKVFGDWLLTLRGGLDHTLADAEIPGEKGKPDRAPTQEERKHRRILLALSWLSVESERGAPEEFIVATGKEPAATRNDKVIAALKDILRGRNLTEEKISEWTEVCTPSLSAAIREDAVWVNRSRAFDEAVKRIGSSLTREEVWDMLECFFGSRNAYLAPVKISEDESSDGEQEEKAKDLVQKAGQWLSSRFGTGEGADFAKMAAVYAKIAAWAGNAQAGTTGNEVINNLATALREFTPKSNDLKGVLDLISGPGYKSATRNLLKQIANTKTVTREDISKLQETAGEDSEECATKTGSKGKRAYADAILKDVESVCGFTYRIDKDGQPVSVADYSKYDEDYKWGSSRHKEFAVMLDHAARRVSLAHTWIKRAEAERRKFEEDSKKIMQVPQAAKDWLDAYCAQRSEASGALEPYRIRKRAIQGWKEIIASWNKPDCKTAEDRIAAARQLQDDPEIEKFGDIQLFEALAEDDAQCVWKKEDGTLDPEILINYTLASEAMFKKQHFKVPSYRHPDAFLYPVFCDFGNSRWELDFSIREAATKLKEIEAKIEKQRQEVHKVQQALEKCENDEKRPKMEERLKEAQKKLQESQNYGEYLHSNNKITMVLFDGTFVKKHIFAWQSKRLTKDLALYQEPSADPKNVVSRADRLGRAVASVGINDAVKVAGLFEQENWNGRLQAPRQQLEAIAQYVEKHGWDNKAEKMRASIKWFITFSAKLQSKGPWNEFARKHGLKEDPHYWPHAEKNENRTAHSRLILSRLPGLRVLSVDLGHRYAAACAVWEALGSEAFKKDIEGKRIIRGDTDENALYCHTEHEANGKKHITIYRRIGADTLPDGAHHPAPWARLDRQFLIKLQGEDEQAREASNEEIWKVHQLENTLGRRTPLIDRLIAGGWGYTEKQKARLEVLTNLGWCPTNKTDNQEEGDEEETAILSKPSLLVDDLMFSAVRTLRLALKRHGDRARIAHYLITDEKTKPGGVKEKLDKNGRVELLLDALGLWHDLFSSPGWHDEKAKQLWNAYIAGLLPEGELQQAKSVTTSAALGGQQKKEKKEKLRAVAEALYLNSDLCHSLNEVWRKRWEEDDKQWRIYIRWFKDWIMPRGANAKSPAIRHVGGLSLTRLATLTEFRRKVQVGFFTRLHPDGTKTETREDFGQKTLDTLEHLREQRVKQLASRIVEAALGIGSEDKRHWDGKKRPRQRIADPRFVPCHAVVIENLTHYRPEETRTRRENRQIMEWASSKVKKYLSEICQLHGLHLREVSAAYTSHQDSRTGAPGIRCQDVSLIEFMKSPFWRKQVAQAEKKQKEGKGDAVERYLCELNQKWKGASEEEWRKAGFVRIPLRGGEIFVSAAGHDSPAAKGIHADLNAAANIGLRALLDPDWSGKWWYVPCNSSTMCPARDKVTGSAAVNPGQPLQVSAQLESDDAAKDTKKRKKKGDGKSKEIINLWRDISSYPLEDTRGGTWSNKTVYWNRVQSNVVHILQNQMKG

SEQ ID NO: 319 - protein, 766 aa, Unknown
  Description of Unknown: uncultivated organism sequence
  Category: MG37 effectors
  Description: MG37-60 effector
MVTGARWPLSPKKSLSDLSAVRGQDHILSRIPGLRVLSVDLGHRYAAACAVWEAISTRQFQQNIEGKKILRGGTDAESLYCHTEHTTDGKKHTTIYRRIGADTLPDGTPHPAPWARLDRQFLIKLQGEEEDSREASNEEIWQVHQMEVELGRRTPIIDRLVASGWGTTERQKARLATLKNLGWKPVEVAGAQEDADAEEEETSFRPSLSVDELMSSAVRTMRLALKRHGDRARIAHYLITDEKTKPGGIKENLDENGRIELLQDALVIWHDLFSSRGWRDDAAKRLWDEHIARLCGYKAPEEIGENASGVERKTKQKENREKLHGVAEALAQDVTLRKALHDAWKKRWEGDDGRWKKQLRRFRDWVLPRGKHASDPTIRKVGGLSLPRLATLTEFRRKVQVGFFTRLHPDGTRAETKERFGQSALDALEHLREQRVKQLASRIAEAALGIGRMRRPVGGKDPKRPDVRVDEPCHAIVIEDLTHYRPEETRTRRENRQLMTWSSSKVKKYLAEACQLHGLHLREVAASYTSRQDSRTGAPGIRCQDVPVNEFMRSPFWRKQVKQAEAKQAENKGDARERFLCDLNTMWKDKTVADWEKAGVIRVPVRGGEIFVSASQDFQGAKSLQADLNAAANIGLRALTDPDWPGKWWYVPCEPASFRPVKDKVDGSAVVNPDQPLRQSAQAQSGDAAKDKKKRGDKGAGKSKEVDNLWRDISSSPLEWIEFGEWKEYAAYQNKVQSRVIRILEEQIKGRDKQPHEGSKEDDIPF

SEQ ID NO: 320 - protein, 758 aa, Unknown
  Description of Unknown: uncultivated organism sequence
  Category: MG37 effectors
  Description: MG37-61 effector
NRHSYLEMDTVASATNGDSETDTEESKAASSDEKAKDLSQKAGQWLSSRFGTGPGADFSRFSKVYEVLATACRSIAPEVSGVEAINRLAIAIKKCSPSSNDIEGILGLISGPGYKSATRNILQQINRLQSVSEQDLSRLCDACEKDASQSRQKVGGKGSRPYADAILQDVERTCGICYARTEDHPSRHWQYAVILDHAARRVSMAHSWIKRAEEQRSKFEIEKNKLLRVPRDALAWLAAFCAKRSSDSGANDAYRIRRSAVDGWKQVVAAWAALPAKSEIAGSELRSDAERARIQVARELQDTVEKFGDIQLFEALAIREAKCVWMPDGKPDAQPLLDYVFGTDAIAKKQRFKVPAYRHPDAFLHPVFCDFGNSRWSIDYAVHRAPGKLTKARQLLEKKSAEISKAELALGKMDDALRHAAISETLQNLRAAYKQQQAEVAWLKTLQAITMGLWDGNGIQDTQLLWRSKRFGANIGQPDAVHPSPVSRADRFGRAVALAEDNVPVIPSGLFDLPEWNGRLQAPRRQLEAIAAMRDSAKLSAGEKQQLVAKRIHSIRWLVTFSAKLQSHGPFITYAEQHGFDWRYGMHGFENKSRQGLAKLILCRLPGLRILSVDLGHRYAAACAVWETLSTGQIQKSCGVAGMEAPGPRTLYLHLKQIVDGKEKKTIYRRIGADTLPDGSPHPAPWARLDRQFLIKLQGEDRDARPATSEEIAAVEHMENELGVVRQLKRKGRELLVDELMSDTLRTLRLGLRRHGER

SEQ ID NO: 321 - protein, 952 aa, Unknown
  Description of Unknown: uncultivated organism sequence
  Category: MG37 effectors
  Description: MG37-62 effector
PAYRHPDPLLHPVFCDFGCSRWQICFDVRKNVRTTSPRRLCLTLFTGSGMELVPFSWQSKRLARDLALEQRHRNPEASEVTRADRLGRAAAGVSAGGAVSIKNIFNEENWNGRLQAPRSQLAAIAARVDKHGWDAKALRMLDRLRWLITFSPRLEPTGPWIEYALRIPDDAAAKPFLSRKNGFAVLHRSNDDRKGLAKLILSRLPGLRVLSVDLGHRYAAACAVWETLSADQVREACQAAGHDGPTECDLYLHLKKDGRTVIYRRIGADTLSDGTPHPAPWARLDRQFLIKLQGEEHKAREASNAEIWAVHQMEAALGRSVPLIDRLVASGWGQRTEGQRARLEALKQLGWRPVTKKSASDDESQWQAACHEGVTPEAEKSASDDEYKPSLSIDELMSSAVRTMRLALKRHGDRARIAHYLITDEKTKPGNVKEQLDENGRIELLQDALVLWHDLFSSKGWQDNKAKELWYVHIATLPEYKAFQSSGEGHAGPERRGKPEEDREKLGVVAQALAPNVTLREALHNAWKKRWEEDDARWKALLRWCKDWILPRGEAANSPAIRKVGGLSLIRLATLTEFRRKVQVGFFARLRPDGKKAETGEKFGRKTLDALEELREQRVKQLASRIAEAALGIGKEHVFPTAKEPQKKCWCGSVHRKKDPKRPRERVHSPCHAVVIENLTHYRPEETRTRRENRQLMSWSSGKVKKYLAEACQLNGLHLREVNAAYTSRQDSRTGAPGIRCQDVPVKEFMRSPFWREQVAQAKKKQAEGKGDARERFLCDLDEQWKNRSEDEWKKAGPVRVPLQGGEIFVSADGTSPAAKGLHADLNAAANIGLCALTDPDWPGRWWYVPCDPASFKPIKDKVEGSAAVKPDQALRQPAQAQRGDAARDRKKRGKVGGRSREVVNLWRDVSSRPISPNDSWQEFTPYWNDVQARVVNILRQSAGLTRGQGEP

SEQ ID NO: 322 - protein, 1018 aa, Unknown
  Description of Unknown: uncultivated organism sequence
  Category: MG37 effectors
  Description: MG37-63 effector
PESARIQKARELQDTIEKFGDIQLFEALSLPDAKCVWLTNGKPDAQPLMDYVAGTDAVSKKQRFKVPAYRHPDAFLHPVFCDFGNSRWSIDYAVHRAPEKLARAQQLLEKKKEELTRAEQALSKASDPSKRSSIEKKLKTLNVAFKQQEAEVLWLESHHAMTMGLWNGSRIEDTPLLWQSKRFGSDIGQAGAEHPLVASRADRFGRAVVMAKDNAPVVPSGLFDLADWNGRLQAPRRQLDAIAAIHDRTDLSVEEKRQLVAKRTRTIRWLVTFSAKLQSRGPFIAYAAQHGFDWRYGAHGIENKSREGLAKLVLCRLPGLRILSVDLGHRYAAACAVWETLSAAQMQNACLEAGMEVPSQRTLYSHLKHFVNGKEKKTIYRRIGADTLPDGSPHPASWARLDRQFLIKLQGEDSDARPATCDEVVAVEQLETELGYVRPIKRKGREHLVDELMSDALRTLRLGLQRHGTRARIAFNLTATKRTRPGGIQELLDQESRIGLLTETLLEWNELYAGERWADELAMDMWNKHIQPLLGGTILQETNNQDVTPSAAKRRMQREETRKKLRPVAKQIAENDSLCRQLNVLWNTRWQIEDAAWRMRLRWMRRWLLPRGINRDPQFRKSIRDVGGLSLIRIASFKSLYQVQKAYWMRPHPDDLRRNIPERGDSSLTSFGQRVLDAMERMRENRVKQLASRIAEAALGIGDETSVNAKNGRRKRPTERSNDPRFAPCHAVVIEDLTHYRPDETQTRRENRQLMSWSSSKVKKYLGEACQLNGLYLREVPPAYTSRQDSRTGAPGLRCNDVTVAEFYTSRFWRKQVEAAEKNQKDGKKGDARERYLLSIDERIRSEANDRDVFRIPVKGGEIFVSACGQDGGSNANRKAPPGLQADLNAAANIGLRAIFDPDWEGRWWYIPCDATTICPVAKKFNGCKAVDSSKPLRIVAEKVAVSSSSIDEKRSGRKGIALTDGSRIVNLWRDPSGAPIRRDVPSNSEWQDYAEYWNKVQSRVIANLRKSYGLREI

SEQ ID NO: 323 - protein, 798 aa, Unknown
  Description of Unknown: uncultivated organism sequence
  Category: MG37 effectors
  Description: MG37-64 effector
QAARKLQDTIEKFGDIQLFESLSLPDAKCVWLTNGKPDAQPLMDYVAGTDAVSKKQRFKVPAYRHPDAFLHPVFCDFGNSRWSIDYAVHRAPEKLARAQQLLEKKKEELTRAEQALSKASDPSKRSSIEKKLKTLNVAFKQQEAEVLWLESHHAMTMGLWNGSRIEDTPLLWQSKRFGSDIGQAGAEHPLVASRADRFGRAVAMAKDNAPVVPSGLFDLADWNGRLQAPRRQLDAIAAIHDRTDLSVEEKRQLVAKRIRTIRWLVTFSAKLQSRGPFIAYAAQHGFDWRYGAHGIENKSREGLAKLVLCRLPGLRILSVDLGHRYAAACAVWETLSAAQMQNACLEAGMEAPSQRTLYLHLKHFVNGKEKKTIYRRIGADTLPDGSPHPASWARLDRQFLIKLQGEDRDARPATCDEVVAVEQLETELGYVRPIKRKGREHLVDELMSDALRTLRLGLQRHGARARIAFNLTATKRTRPGGIQELLDQESRIGLLTETLLEWNELYAGERWADELARDMWNKHIQPLLGGTILQETNNQDVTPSAAKRRMQREETREKLRPVAKQIAENDSLCRQLNVLWSTRWQIEDAAWRMRLRWMRRWLLPRGINRDPQFRKSIRDVGGLSLIRIASFKSLYQVQKAYWMRPHPDDLRRNIPERGDSSLTSFGQRVLDAMERMRENRVKQLASRIAEAALGIGDETSVNAKNGRQKRPTERSNDPRFAPCHAVVIEDLTHYRPDETQTRRENRQLMSWSSSKVKKYLGEACQLNGLYLREVPPAYTSRQDSRTGAPGLRCNDVTV

SEQ ID NO: 324 - protein, 917 aa, Unknown
  Description of Unknown: uncultivated organism sequence
  Category: MG37 effectors
  Description: MG37-65 effector
QLFEALAADDAIVVWQSDGKADPLKDYVAAKAAEDRLHRYKVPAYRHPDPLLHPVFCEFGCSRWTIKFGIHQAWQALAQARAELTKAKGILASARSEDEKMKANVRVPKAQRRQEFEQARAAQRLTMDLWTGNDIKTTEMRWQSKRMPGDLAFATALSDSPVFLPRADRLGRAAGGAALSDAPAVSGLFEQNEWNGRLQAPRPELEAIARCQDPHRKTRLRSRLNWLITFSAELQPQGPMIAFAAAHDLQIRNSPLSTAKFLHVNEPRLSTNEGRKGYARFTLPPLSGLRVLSVDLGHRYAAACAVWETISETRLAELCKAAGHRPPQPKDMALHLPGQRNGKKVKTIFRRTGPAMWARLDRQFTIKLQGEDKPSRKASTHEFEAVVRFEKELGRTRSDENPLPHDVMRLMAEAVRSARLGLRRHGDRARIAFNLTTKTKLLPGGRTEKLTPETSVELLQDTLVLWHNLRNSPTWQDDFAESCWNESIAPLLENVVLPEPPVEGAAAQTVKAFRRTLRDKLKPAAQNLAGNPQLRQKLHTLWATRWRKDDEAWRGRLRWLRDWLLPRGKAKSDASIRHVGGITLTRLATIRGLWQTQKAFALRPDPDDLRRNVPKRGASSERFGQRVLDALDHLRENRIKQLASRIVEAALGIGKEQPKVNRRDPKRPRSQVHSPCHAVVIEDLKNYRFADSRPRRENRQLMQWSARNVRRYLAEACQLYGLHLCEVFAGYTSRQDSRTGAPGCRATDLPVPDFLKRYDRLVKNAEGEERKFLEALKARWDGCTDRSKLVRILDRAGKLFVSADESSPAVKGIQADLNAAANIGLRALLDPDWPGKWWWVPCGKDGKPAEKECKGTRAFDLNLQLLPATECRGKDIVNAWRDVSADPIVPGKGMSYAEYWNRVKARVVVNLRRQAGL

SEQ ID NO: 325 - protein, 1078 aa, Unknown
  Description of Unknown: uncultivated organism sequence
  Category: MG37 effectors
  Description: MG37-66 effector
RAEAERSRFEEDAKKVDQVPEAAKDWLNNFCLERSGLSGAQEPYRIRRRAVDGWKEVVTAWSKADCKTAEDRIAAARALQDDPEIDKFGDIRLFEALAEDDAVCVWHKDGDAAKAPDPQPLIDYALAAEAEFKKRHFKVPAYRHPDALLHPIFCDFGKSRWDICFDVHKKVQTPFPRALCLTLWTGSGMNTVPLCWQSKRLARDLALGQDAQNDGSSEVTRADRLGRAASSVAKSDEVKISGLFEQADWNGRLQAPRQQLEAIAVVRDNLSLSDQERERRMSGLMDRIQWLVTFSAKLQPQGPWCKYAQDQKLGLNIDPQYWPHAGENKNRKGQARLILSRLPGLRVLSVDLGHRYAAACAVWEAVSTETFRKEINGKNILRGGSGKDDLYCHTKHDAESKKHTTIYRRIGADTLPDGEPHPAPWARLDRQFLIKLQGEEEGAREASNEEIWAVHQMEIALGRSVPLIDRLVAAGWGCTERQKSRLEELKKLGWKPLPAAEPTGDESGEDEGADVYKPSLAVDELMSSAVRTMRLALKRHGDRARIAHYLIADKKTKPGGIKEKLDENGRIELLQDALVLWRDLFSSRGWRDDAAKQLWDDDITRLSGYKAPEKIGEDVSGVERKKKQKENREKLRDVAKALAQDVTIRGKLHDAWKKRWEEDDGRWKKQLRWFNDWIFSRGKAADNSTIRKVGGLSLTRLATLTEFRRKVQVGFFTRLHPDGARAETKEQFGQSALDAIENLREQRVKQLASRIAEAALGVGRMKRPRGGKDPKRPDIRVDEPCHAVVIEDLTHYRPEETRTRRENRQLMTWSSSKVKKYLAEACQLHGLHLREVSASYTSRQDSRTGAPGTRCQDVPVKEFMRAPFWRKQVAQAEKKQAESKGDSRERFLCGLNAMWKDKAVADWEKAGAVRVPLKGGEVFVSADRISPSAKGLQADLNAAANIGLRALTDPDWPGKWWYVPCEPASFRPVKDKVDGSAVVNPDQPLRQSAQAQSGDAAKDKKKRGNKGAGKSKEVVNLWRDISSSPLECIEFGEWKEYAAYQNEVQCQVIRILEEQIKDRDRQPHEGSKEDDIPF

SEQ ID NO: 326 - protein, 793 aa, Unknown
  Description of Unknown: uncultivated organism sequence
  Category: MG37 effectors
  Description: MG37-67 effector
RKEKVVAAFREILKTRLKPNVAQAEIESWVADCAESLAAQIRKDAVWVNRSAIFDRATAGWDEASARSDAHTLLSHVLSDEYLTLPTAKKSQKKNTDANDDEDQEEQEQRQSAVKASSKGAGDRTRHPFSHIFREGKPFGGAKSLVLVERWWSYLKPLVEAAGISLPPRGKAKLKGGDELQREMFSKAASRVAQIVTKQRQQEADRLERKKADAALRLMEEDESFNAALTALRTYCDDYRVMSGATGEFLLRPRQVGTGWDRVVRRWSAISEADPERAREARVEAVKEIQDSDEDKKFGDANLFFRLAEDRFTTVWCPDGNPHNADPTILDRFVKGMKARSDSERLKVAAFRHPDPYRNPIFCQFGVSRPKIHFGRLKTFTDDHAGNDPRAVGMLLWHPVSNSAKLTLLHGVSQRLDREIGAARDQVQQNTEELRAVSRRGRLGAAAGGLPNADSPARVAGVFDLKTITHRATDEEQEDADNERPETGKLKEPKWNGTLSADRRELEAIRKLIDKGDMQKANRCRQQLRWTLTVSMKMEGRGPWITFASKWEEAHGHKYQPFGAFATNDKLKGRNRLFRWQWDRDARDFVVNLTKPFENPTDAKGRDGHARLILSRLPGLRLLSVDLGHRFAAACAVWEASPLSVLKKEIKNREIIAGGTGTHDLYCHTRHIDEHRKERTTIYRRVGTDKLDDGSAHPASWARLDRQFFIKLQGEQWPARMASEAEYEYVQRLESELGRVRGNNNQLPWRVDDLMSEAVRSARLALGRHGDAARIAYAFKPDSVLLTPGGGSA

SEQ ID NO: 327 - protein, 1101 aa, Unknown
  Description of Unknown: uncultivated organism sequence
  Category: MG37 effectors
  Description: MG37-68 effector
RTSSSFASDEYLIRRRAIDGWERVVKAWAQLGDEATRQQRIDAAREIQSNLDDNEKFGDIQLFAGFGDDDADEPRPCLADEAAVVVWLTEAGKPDPDILENYSAATVAAHNRRRFKVPAYRHPDPLRHPVFVDYGNSRWGISYSALRESQARAKLKEKLNSAATDSARQKLQEQLQALPELRSVTLDLWTGQQVESVPFRWHGKRLWKDLDLDHFGEPAANTATRADRFGRAVAGQPQAAVSIAEVFGQKDWNGRLQAPRRELDHLADLVYGKRADADFDKLARLTSGSAPHRARKALENLHWFLTTSAKLKPQGPWLDYVARGLPDGVEYRSGRNGPYLNYVVNKDRKGRARLELARLPGLRVLSLDLGHRYAAACTVWETLSTAQMEAACKAAGRPLPQADEPFIHTKQPTEALQKSGRRKGQPVTKTTIYRRIGPNLLPDGTEHPAPWARLDRQFLLKLPGEDHPARFATRTEFADFNRLRLVAGLREDTAQVIENRPDCVNRRVDQLQVDAVRITQLGLRRLGNLARVAYILTAATKPLAGGQSSTPLSREERVDYVLDALVRWQELAQSTEYTNKWAKELWSDQWAKDLWSEWVQGHFGGPQLVDVSGDTPRSERQRRSEDSRNRLRSVAEQLAAPNGAANCELHRLWSTKWQSRSDKWRVQLRWLRRIILPRIGPRPSGTDAEAHVRRRQHARAIRQMGGLSLRRLKTIRDLYQVLKAFHMRPEPDNLRKNVPEPGDDSLLNFGRRILDQLERLREQRIKQLASRIVEAALGVGSENRREHWNGRRRPSQPIADARFAPCHAVVIENLENYRPEDTRLRRENRQLMTWAARNVRKYIVEGCQLNGLHFVEVSPTYTSRQDSRTGAPGVRCEDLPRTAFANAVEVFRGNPPSSPESSTHSHREVSYIVSLLRKAEDKRNRGEPVSAREQVALSLAERIDDVPPHCGVIRLPRNGGEVFVSANPTSPSSQGLQADLNAAANIGLRALGDPDWLGSWWYLLVDAATGIPVTERIQGSTVWTERVTTSVLAHVADGQSGRRRGTKKERTAVYAFSPWHLSWGQIDRDGVWTTTKNYWPEVERRVADLLISRQTEPETPW

SEQ ID NO: 328 - protein, 840 aa, Unknown
  Description of Unknown: uncultivated organism sequence
  Category: MG37 effectors
  Description: MG37-69 effector
SVDLALDDLAVSDAVPVTLGSRFGRAALPSVLPVSVLNVFDEGDWNGRLQVPRSQLERIASLLAKNKVAAAKEFRQKLRWSLTFSPRLQPTGPFHDFAAQHGITPNRKGEYFPNGEQNRITKREGKAKLVLSRLPGLRLLSVDLGHRFAAACAVWESLSGPDFAKEIFGLTIESGSAEGLYLHTRHMDESGKERSTIYRRIGSDALPDGSDHPAPWARLSRQFLIKLQGEERSARKAAPTEIYSVRELEAGFGRVSEKDDLPTQVDELMSHTIRVSRLALRRHGDRARIAFAMISSYKPMPGDRKYNFFPNDTSDGFDDTPEQRHRKHIEFIQDALLLWHDLISSKGWQDQAAEQLWKQHIATLLGYQHPEPINRDGSGPERKKKRNENFDRLRGAAEALINNAPLRLTLNAEWKGRWESDDQDWRSHLRRLQDWARPPASKGSQAIRHVGGLSLTRLATLTEVRRKVQVGFFTRLLPNGDKARIGERFGQKTLGVIEEMREQRVKQLASRITEAALGIGRVQPGTKHDPRRPRVRVDLPCHAIVIESLRNYRPDDLQTRRENRALMEWSSGKVRKYLEEACYLYGLHLREVPPNYTSRQCSRTGLPGIRCADVPIEQFRAAPFWRKIVDSARKRISQNKGTEEDRFFCDLDETYGNDVNPQAGRVATLRLPRKGGDLFVSAPVWAQLNRKDQYGNDRVSARPNDWSSKRALQADLNAAANIGLRALLDPDFPGTWWYVPCTARDGRATQDKVKGSSCFVAENWRILSVSERSATKREVVNAWHDPSTCSLSNRLDWRETTHYWNTVRARAVEALRQFNGLPRSNSAPVHNSLESALRER

SEQ ID NO: 329 - protein, 1130 aa, Unknown
  Description of Unknown: uncultivated organism sequence
  Category: MG37 effectors
  Description: MG37-70 effector
VMLDHAARRVSIAHSWIKRAEAERRRFEADAKRLDTVPDKAAAWLDAFVQERSGSVGGEYRIRRRAIEGWDDVLKRWGRADCKTADDRIAAAREVQADPEIEKFGDIQLFEALAADDAQCVWRLNGKVDPSPLRDYVLGHDASFRKRRFKVPAYRHPDPLRHPVFCEFGNSRWSIEYSAHKAHSKLGKVRDTVKKKKESLDKTCAQLKKARSAARPNPERIARLEARIATIRDDLQNAQKEADRLASHRGVRMRLWDGNDTVLHDLKWSSKRLVADLAIDVQHTSHPTGVTRADRLGSSASGATGDVAILNVFDEKHWNSRLQAPRAELDRIARLEDKGETRRAESLKRRLRWLITFSPRMLPYGPFIDYAARFADDAPARPVVSYNGEYIIKHADSDKRKGHAMLILSRLPGLRVLSVDLGHRFAAACAVWETLSITDFKKEVEGCDIAAGGSGEHDLYLHTLHTDVRGKQRKTIYRRIGPDVLSDGKQHPAPWARLDRQFLIKLQGEEMPARAALPAEMEFVRRLEADLGRSRDANNPLPRRVDELMSEAVRSLRLGLARHARRAKIAWALDPATRSVLGMGGAETAFRPGDENHVKLLVNALFDWHSLASDHKWSDDAARGLWNKHIVPLDDAWEINPPHLNADNRDNITRQQRRKDDETLRKRLKPIAQSLAASDRAQIHKAWCERWQRDDGMPADRSRGAPATGWHARLRQVHDWIVGRRCPGSDAPSHSWKKHVGGLSLTRLSTMRSLYRLHKSFAMRPRPDKPRGAPEKGETNAGVAKSLLDAMERMREQRVKQLASRIVEAALGVGRMKPAAGRDRKRPRSRVDEPCHAVVIESLRHYRPDELRTRRENRALMNWSASKVRKRLEEACQLYGLYLREVPASYTSRQCSRTGLPGVRCADVPVTEFLSAPWWSKAISAAKKKIDGRSTNAEARLLVDLHEKWSAANPHDRQGCTVRVPRNGGDLFVAAPPRRCASSRGSNDAATSALQADLNAAANIGLRALLDPDFWGRWWYVLCDAATGKPARDKYAGSACIDLDKQLLPPQAKADSAVRKRGRKGGGDRINAWRDVAAENGLDPAKGWQVHTAYWNDVKARVVSALRRVNGLPIPEDASSADLASQAGRG

SEQ ID NO: 330 - protein, 1282 aa, Unknown
  Description of Unknown: uncultivated organism sequence
  Category: MG37 effectors
  Description: MG37-72 effector
VWVNRSKAFDAFDEAVKSIDRSFVWDMLERFFGSREAYLAPEKGVEDEAAEVEQEDKAKDLVQKAGQWLSNRFGTGKGADFSRMATVYQKIAEWAGKDQPERAGKEAIADLAAALNAASNDLQGVLGLISGPGYKSATRNLLKQYNEKPLLTTQDFKNLQKKATDDECKCREKTDSKGRRPYADAILKDVESACRFTYQQDGGRARHSEFAVMLDHAARRVSLAHTWIKRAEAERRRFEEDAKRMANVPGPAKEWLDTFCQERSGVLGALEPYRIRRRAVDGWKEVVTAWSKCSCRNSEDRIAAARALQDDPHIEKFGDIQLFEALADDDAARVWHKDGDCAKPPDPQPLIDYVLANDAESKKRRFKVPAYRHPDALLHPVFCDFGKSRWDIKFAVHEARKNTACKNKKKNVMRNDDSHALSMTLWTGSTVEPRLLRWQSKRLMHDLALTQDKQDGTAREVTRADRLGRAATGMRADDAVSIAGIFEQNDWNGRLQAPRAQLDAIAARVAKHGWDAKARQMRDRLHWLITFSAKLQPSGPWFEYAAQFPDDAPAKPFVSHKGDYAITHQSTGKRNYHAKLILSRLPGLRVLSVDLGHRYAAACAVWHTLSKKDFENDLRDKRIVRGGIGENDLFCHAEYERNGKTYTVVYRRIGADSIESVDKETNEVRTASHPAPWARLERQFLIKLQGEDTEARKAGPAEVAAVQELDKAVGRKPPDRRSLRVDDLMSEAVRTMRLALQRHGRRARIAFSLTAKKKLLPGGREESLTHEGRVALLADTLADWYALFTGKGWDDEWAKQQWETHFTPLLHGTALPQSPGDAEATPKARKQYQADLTERLKPVAESLAKNGSLCWKLHCLWATRWRENDVALRKHLRWLRDWILPRGKAKNDKAIRHVGGLSLTRIATIKSLYQAQKAYHMRPDPEDLRKNIPSKGDDTLRHFGRRILDVMEHLREQRVKQLASRIAEAALGIGIEHSAARKTPRRPRQRLYWKDEQGNEHGDRRFAPCHAVVIENLTHYRPEETRTRRENRQLMSWSSSKVKKYLAEACQLNCLHLREVQAGYTSRQDSRTGAPGVRCQDVPVKEFMQSPFWRKQVAQATKKLAEGKGNARERFLCDLNAKWKDKSEADWEKAGVVRLSLKGGEIFVSADANSPAAKGVQADLNAAANIGLKALLDPDWPGRWWYVPCDAKTFKPAKDKVGGSAAIDPYEPLKNALTAQDTDGPKKKRGKARKQNREYANLWRDVSSQPISADDGWRESTPYWNDVQKRVVDILRQSAGLA

SEQ ID NO: 331 - protein, 489 aa, Unknown
  Description of Unknown: uncultivated organism sequence
  Category: MG37 effectors
  Description: MG37-73 effector
MKAQGRVNSPAALRRLEQVLNQLRELHDACLYQWRLAENNHEPKWFDANRQQKELTLMRAHSPEHDNVLRRLQDNVIRHTAARWNKYLKDENTGRPRYKTGRFRTIALDSPQGRVIRFTATGKPVLHINSLPAIRLLTSQQIPSDRQPRAVRITLKGRMIHVRLSYQFELPERLEPTLATSPVGVDLGIALSMATSTGQTFRSPKQAYLQTQERKARRKLSKVIAAAMATGTAGFRAALDADGRQRLTKKGRPMRQLVWSSGKPTKSYLKARRRLSAITERLALLRREFRHRVTTSLIEKAAAEGRDLLAMENLQVKNMTASARGTVEKPGRNVRAKSGLNRAILQEAWGETLTMLEYKAERAGIASVRVYAQATSITCSCCGHRDPKSRTSQSRFKCTACDYQANADFNASLNIADRGMLYFQKRKGLSIEDLRQARRDESHSGGTEGPETGPAGHPASQTSQESPINASASVLTRRDPAQAESFAIF

SEQ ID NO: 332 - protein, 438 aa, Unknown
  Description of Unknown: uncultivated organism sequence
  Category: MG37 effectors
  Description: MG37-74 effector
MSDAVDPHLTEPYGPRTSSCATELICRDCGYRTPLLDRAFKCPACGEGLDIDYDYDRAKQLIEGRPVEGRPWNLWRFEELLPITGRRAQSRVGAFAGKTPLIHAERLGAELGLSNLYLKDDSTNRPSLSYKDRVVGMAIARLLELGKDEVGCVSTGNVGTAVASLAAQAGATPYIFYPGNMEKGKAKACRAMGAQVIQLDANYDQANRACRELAITTGMEFANITLRPFYAEGAKTMAFEVVEELGWKAPDHFVIPAAGGTLSSRVHKGLLELEKVGLAETAGSKINIAQASGCSPIATAIGAGGGEIVPQTPETAAHSLAIGAPGDGALVVDAVVSRNGSGATASDEEIFEAIDLLGATEGILTEPAGGTTIASTAKLAQEGRIAPDETVVAVISGNGLKTLHEHPEKSWPEMVPCEVGAMEEMLNDFRQAAAAALH

SEQ ID NO: 333 - protein, 497 aa, Unknown
  Description of Unknown: uncultivated organism sequence
  Category: MG37 effectors
  Description: MG37-75 effector
MQNCQVRTIKAQGRVNSRAALSRLEQVLDQLRELHDACLYQHRLAEKNHEPKRFDVNRQQKELTLLQADSPEQNNLLRRLQGNVIRHTAARWNKYLKESATGRPRYKTSRFRTIALDSPQGKVMRFTASGKPVLHISSLPAIRLLTSQEILDDRQPRAVRITLKGGRIQVRLSYQFEVRERQDPTLATSPIGVDLGIALSVATSTGQTFQSPKQLYLQAQERKYRRKLNRIVASAMATGTAGFRAVLDADGSQMLTRKGRPMRELVWTSGKPAKAYLKARRRLSEITERLALLRREFRHRVTTSLIEKAAAEGRDLLAMEDLQVRNMTASARGTVEKPGRNVRAKSGLNRAILHEAWGETLTMLEYKAERAGIPSVRVNAQATSITCSCCGHKDPKSRNSQSSFKCTACHYQANADSNASLNIADRGMLYFQKRKGLSIESLRQARRDAGLSGGTEGPDTGPAGQPASQNNLESPTNASKSALTGPDRGKTESLAIF

SEQ ID NO: 334 - protein, 1489 aa, Unknown
  Description of Unknown: uncultivated organism sequence
  Category: MG37 effectors
  Description: MG37-76 effector
MPDEALVNGSTAGTDRVVVTQRAYTLRLQGVDPQDHSWRDALWKTHEAVNKGAWAFGDRLLTLRGGLDHALADAKVEGGKGKPDRDPTDEERKARRILLALSWLSVESEKGAPEKYLVPHDLDKQSGARSNWKTVDALKEILKGRGLGKSEIESWVQDCSSSLSAPIRDDAVWVNRSKAFDDAVKSVGCSLTRDEAWDMLERFFGSRDAYLAPAKGSEDESSETEQEDKAKDLVQKAGQWLSSRFGTGKGADFSRMATIYEEIANRAGKAQPGMTGDKAIADLATALSKFSPPSNDLQGVLGLISGPGYKSATRNLLLDRFRDKTPVTQEDFQNLQDKAREDAQKCKNKTGSKGHRPYADAVLRDVESVCGFTYLQDGGSARHSEFAVMLDHAARRVSLAHTWIKRAEAERSRFQEDAKKVDQVPEAAKKWLNNFCLERSRAAGALEPYRIRRRAVDGWKEVVAAWSKPDCKTTEDRIAAARALQDDPEIDKFGDIQLFEALAEDDAVCIWHKDGDPANPPDPQPLLDYVAATDAEFKKRHFKVPMYRHPDELLHPVFCDFGNSRWNICFDVHKNTKTPFPRTLCLTLWTGSEGMKPVPLRWQSKRLARDLAFGQDTRKDGASDVTRADRLGRAASNVGKNDAVNIAGLFEEKHWNGRLQAPRRQLEAIARYVEKHGWNEKAKNMRDAIQWSVTFSAKLQPKGPWCAYAKEHGLRKDPQYWPHTEVNKDRKGHARLILSRLPGLRVLSVDLGHRYAAACAVWEAISTRQFQQNIEGKKILRGGTDAESLYCHTEHTTDGKKHTTIYRRIGADTLPDGKLHPAPWARLDRQFLIKLQGEAEGAREASNEEIWAVHEMETVLGRSVPLIDRLVAAGWGSTEKQKARLDAIKKLGWVPIKRADASEDADTEEEEELAFRPSLSVDDLMSSAVRTMRLALKRHGDRARIAFAMTAAYKPMPGDHRYYFTEAKDLSANEDATARNSKHIEFIQDALLLWYGLISSRGWRDEAARQLWDDHVAKLHGYKAPEEIGEDVSGAEREKKQKENREKLYDVGKALAQNESLRKTLHHAWKTRWEEDDGRWKKQLRWFKDWILPRGKKYASDPSIRKVGGLSLTRLATLTEFRRKVQVGFFTRLKPDGTRAETKEQFGQSTLDALEHLREQRVKQLASRIVEAALGIGSENKQHWEGGKRPRARSKDPRFAPCHAVVIEDLTHYRPEETRTRRENRQLMSWSSSKVKKYLAEACQLHGLHLREVSAGYTSRQDSRTGAPGIRCHDVPVKEFMRSPFWRKQVAQAEKKQDEGKGDARERFLCDLNAKWKGQPEADWEKAGAVRVPLKGGEIFVSADQNSPAAKGLHADLNAAANIGLRVLTDPDWPGKWWYVPCDPDSFLPVKDKVEGSAVVKPDQPLPKSAQAQSGDGAKDKKKPGKRGASKSKESKKVVNLWCDISSSPLECREWKEYAAYQNEVQSRVIHILEKQIKRLRQATARGVQ

SEQ ID NO: 335 - protein, 1379 aa, Unknown
  Description of Unknown: uncultivated organism sequence
  Category: MG37 effectors
  Description: MG37-77 effector
MKKWGKRIISGVIAASLLTAAAISGSEQGTGTVASVVQAGTETSFMGKLLEGGYIDVFTSWTQEEQNKFYDGLSPQQQSVFLEVTNCQITRELIKSERSKEELEQFFDRLQPYFLILKKGNQEKPDDEIVIECINQIEGTDYHSSEQYIKQLVSEKKDHYLEFYDALKLVKDGKLEIESAVDDFYKELGFLKKDRVPANSAEVSRQPVQVQKKAAAKAVSDRYSNFKAVSSLKALKDAVASVKKGEKIAVRVDKGFNVTSVIRTNGRHVKIYADGESGHNLNRTAGYKDVMLEVNGGSLTLGAYDGDGRAKNNLYINGKNIAASAPLIEVTSGHLYLNKYSRIIDGYFLADFAGGAGIALNSGTSCYMFGGRIDNCRAKSSKDVSSSSPKSSHGGGVLVGNGSSFYMFAGSIEHCQAIHGGGIMNYGTLRLYGGAISDCAASNQKKDALGGAVKVQGAIETNGKVSSTKGDLGVWKYTRSAAWIVNGKDGYQQGTTTGVVLKNNQADAGGAICLNNGSNGAIQDCNINGNHSTGNGAGICLSNGSYKKGAALELKTGAVIHGNESKGYGGGIYCADSVKGSLSGGTMYDNSAKYGAGIYHEAEFRMSGGTVRSNHSGNSGGGIYAKGKLSMTGGEISANTAATYGGGAILKTVGGSVSRGSIKGNSASANGGGLQIDGTVSLSNASVSSNSASGKGGGISVSSSGTCNLSSGNVSGNTAKAGGGGIYIDGTCKANGSSFTGNQSSGDGGAVYIASGTFTTFQANQAVNIQGNSASGNGSGIYNRNITVLNNNAHILNNQCKNGTQRGIFHEGSLFSIEGNTEIQQEIYLAKDRFVTASNRYFSNSNSLKAKISLDTANIRNGYAVVKGNVSNSADGNYKTGEALLNNQSAGGRFVYAGSGYVMRPGNLKKSSSGCAPFSIVLSQAYQIRYDKNSKEEVMNMPTAAVKYWEEDIKLSALTPTGGSGAFVAWNTKADGTGDGYQPGNVYTANADATLFALWPHYRVEYLPGIRSAAGTTDSQEQNKSEDILLRKNGFRSSEGKFVGWKQDISSARKRMELEPVGYKELKEEREKGKLNHILDFAESYKKVNSSENLDNINSLLDVEDIFFMEGQWDSKPDIILNDKKTFLENEKIKKNDLLKVVKGCYDEEDGELTKKVQIIKLDYTKSMKGYRPETQNFSGGMNDTDVMDTYFMKLEKDETVEVKVTFQAEDSVGNVAEKEGTVCVTYNNPPKLHSQNLAFYQKDIDNNPQTILKEIFENYQVEDIEDDKKGLKVPVSVIDPIPLQIEKLNSVGEHKIVYQAIDSLGKKTKLDSIVYIAENNPFKDSYKYNVRFINKKYLYTLKESSKWKKNEELNAQLTSQLEKTKEDAELKYEFEIKK

SEQ ID NO: 336 - protein, 437 aa, Unknown
  Description of Unknown: uncultivated organism sequence
  Category: MG37 effectors
  Description: MG37-78 effector
MSDAVDPHLTEPYGLRTRSCATELVCRDCGYRTPLLDKAFKCPACGEGLDIDYDYELAKKRIAERPAAERPWNIWRFEELLPILNLRAQQRVAQFAGKTPLIHAERLGAELGLSNLYLKDDSTNRPSLSYKDRVVGMAIARLLELGKDEVGCVSTGNVGTAVASLAAQAGARPYIFYPGNMEKGKAKACRAMGAQVIQLDANYDQANRACRELALETGMEFANITLRPFYAEGAKTMAFEVVEELGWQAPDHFVIPAAGGTLSSRVHKGLVELEKVGLAETTGSKINIAQASGCSPIAAAIVGGGEIEHQTPETAAHSLAIGAPGDGNLVVDAVRSRSGSAATASDEEIWNAIDLLGTTEGILTEPAGGTTIASTARLAQEGKIGPDETVVAIISGNGLKTLHEHPEKDWPEGVPCEVGAMERLLNDFRQAAATALH

SEQ ID NO: 337 - protein, 431 aa, Unknown
  Description of Unknown: uncultivated organism sequence
  Category: MG37 effectors
  Description: MG37-79 effector
MTEGRGDRRTRSCATELVCRGCGYRAPLLETAFRCPGCDLGLDIEYDYERAKSLISEVGLGERPQNIWRFEELLPIVSGVARARVAQFAGQTPLIRAERLGAELGLHNLYVKDDSTNRPSLSYKDRVVGMAVARALEIGAGEIGCVSTGNVGTATASLAAAAGLKPYVFYPANLERAKARGCRALGAQVCQVDGNYDEANRACRELTEATGIPFANISLRPFYAEGAKTLAYELVESLGWRSPDHVVMPAAGGTLSSRVHKGLVELETLGLAATAATKLHVGQPTGCSPIATTIVEGAEEIVPQQPETLAHSLAIGAPGDGDLVVEAVRSRGGTAAAVPDGEILEAMELLAATEGVLTEPAGGTTVAATMKLAQRGVIDPDAVTVIVISGNGLKTLSEQPVKPWPEGVPCNATTMEEVVVEFREGGVTSRT

SEQ ID NO: 338 - protein, 1379 aa, Unknown
  Description of Unknown: uncultivated organism sequence
  Category: MG37 effectors
  Description: MG37-80 effector
MKKWGKRIISGVIAASLLTAAAISGSEQGTGTVASVVQAGTETSFMGKLLEGGYIDVFTSWTQEEQNKFYDGLSPQQQSVFLEVTNCQITRELIKSERSKEELEQFFDRLQPYFLILKKGNQEKPDDEIVIECINQIEGTDYHSSEQYIKQLVSEKKDHYLEFYDALKLVKDGKLEIESAVDDFYKELGFLKKDRVPANSAEVSRQPVQVQKKAAAKAVSDRYSNFKAVSSLKALKDAVASVKKGEKIAVRVDKGFNVTSVIRTNGRHVKIYADGESGHNLNRTAGYKDVMLEVNGGSLTLGAYDGDGRAKNNLYINGKNIAASAPLIEVTSGHLYLNKYSRIIDGYFLADFAGGAGIALNSGTSCYMFGGRIDNCRAKSSKDVSSSSPKSSHGGGVLVGNGSSFYMFAGSIEHCQAIHGGGIMNYGTLRLYGGAISDCAASNQKKDALGGAVKVQGAIETNGKVSSTKGDLGVWKYTRSAAWIVNGKDGYQQGTTTGVVLKNNQADAGGAICLNNGSNGAIQDCNINGNHSTGNGAGICLSNGSYKKGAALELKTGAVIHGNESKGYGGGIYCADSVKGSLSGGTMYDNSAKYGAGIYHEAEFRMSGGTVRSNHSGNSGGGIYAKGKLSMTGGEISANTAATYGGGAILKTVGGSVSGGSIKGNSASANGGGLQIDGTVSLSNASVSSNSASGKGGGISVSSSGTCNLSSGNVSGNTAKAGGGGIYIDGTCKANGSSFTGNQSSGDGGAVYIASGTFTTFQANQAVNIQGNSASGNGSGIYNRNITVLNNNAHILNNQCKNGTQRGIFHEGSLFSIEGNTEIQQEIYLAKDRFVTASNRYFSNSNSLKAKISLDTANIRNGYAVVKGNVSNSADGNYKTGEALLNNQSAGGRFVYAGSGYVMRPGNLKKSSSGCAPFSIVLSQAYQIRYDKNSKEEVMNMPTAAVKYWEEDIKLSALTPTGGSGAFVAWNTKADGTGDGYQPGNVYTANADATLFALWPHYRVEYLPGIRSAAGTTDSQEQNKSEDILLRKNGFRSSEGKFVGWKQDISSARKRMELEPVGYKELKEEREKGKLNHILDFAESYKKVNSSENLDNINSLLDVEDIFFMEGQWDSKPDIILNDKKTFLENEKIKKNDLLKVVKGCYDEEDGELTKKVQIIKLDYTKSMKGYRPETQNFSGGMNDTDVMDTYFMKLEKDETVEVKVTFQAEDSVGNVAEKEGTVCVTYNNPPKLHSQNLAFYQKDIDNNPQTILKEIFENYQVEDIEDDKKGLKVPVSVIDPIPLQIEKLNSVGEHKIVYQAIDSLGKKTKLDSIVYIAENNPFKDSYKYNVRFINKKYLYTLKESSKWKKNEELNAQLTSQLEKTKEDAELKYEFEIKK

SEQ ID NO: 339 - protein, 446 aa, Unknown
  Description of Unknown: uncultivated organism sequence
  Category: MG37 effectors
  Description: MG37-81 effector
MSTTTTQSLARGSRKRTRSCATGLRCHRCDLSYALEESVFACPQCGKGLDITYDYELAARRFEEVPRETRARNIWRFEELLPIVDASAQARVGSHGGYTPLIRADRLGAELGIANLYLKDDSTSRPSLSYKDRVVAMSVARLLELGRTEMGCVSTGNVGTAVASYAAKAGADAYVFYPNRLEDTKARACAAMGAKVCQVEGNYDEANRRCREVAESTGMEFANITLRPFYAEGAKTEAFEIVEQLEWKAPEHIITAAAGGTLSSRLHKGLGELQLLGLAETDSTRIHIAQPSGCNPISAAILAEEAEIRPITPETAAHSLAIGAPGDGYLVIDAVLKRGGTGGFASDPEIFAGVDLLAATEGLLTEPAGGTTVAVLHKMAAEGRFGADEVVVAIITGNGLKTLDDHPDKPWPAKIECELDAMLEALEELKSTAALRDRALEALAHR

SEQ ID NO: 340 - protein, 435 aa, Unknown
  Description of Unknown: uncultivated organism sequence
  Category: MG37 effectors
  Description: MG37-82 effector
MSDAHLGGPGGPRTSSCATELVCRDCGYRTPLLDTAFKCPACGEGLDIAYDYERAKSLIAERGLGERPQNIWRFEELLPITSRAAQQRVGQFSGHTPLIHAERLGAELGLKNLYLKDDSTNRPTLSYKDRVVSMAVARLLELGKDEIGCVSTGNVGTAVAALAAKAGATAYIFYPGNMEKGKAKACRALGAQVCQLDGNYDQANRACRELSLASGIEFANITLRPFYAEGAKTMAFEVVEELGWQAPDHFVIPAAGGTLSSRVHKGLNELETVGLAETAGTRINIAQAGGCGPIATAILGGGEIEPQTPDTAAHSIAIGAPGDGALVLDAVRTRGGSAAMATDAEIFGAIDLLGATEGLLTEPAGGTTIAATARLASEGKIGAEETVIAVISGNGLKTLQDHPEKEWPEMVACDVETMGAQLAEFRQAAAAGVAR

SEQ ID NO: 341 - protein, 1379 aa, Unknown
  Description of Unknown: uncultivated organism sequence
  Category: MG37 effectors
  Description: MG37-83 effector
MKKWGKRIISGVIAASLLTAAAISGSEQGTGTVASVVQAGTETSFMGKLLEGGYIDVFTSGTQEEQNKFYDGLSPQQQSVFLEVTNCQITRELIKSERSKEELEQFFDRLQPYFLILKKGNQEKPDDEIVIECINQIEGTDYHSSEQYIKQLVSGKKDHYLEFYNALKLVKDGKLEIESAVDDFYKELGFLKKDRVPANSAEVSRQSVQVQKKAAAKAVSDGYSNFKAVSSLKALKDAVASVKKGEKIAVRVDKGFNVTSVIRTNGRHVKIYADGESGHNLNRTAGYKDVMLEVNGGSLTLGAYDGDGRAKNNLYINGKNIAASAPLIEVTSGHLYLNKYSRIIDGYFLADFAGGAGIALNSGTSCYMFGGRIDNCRAKSSKDVSSGSPKSSHGGGVLVGNGSSFYMFAGSIEHCQAIHGGGIMNYGTLRLYGGAISDCAASNQKKDALGGAVKVQGAIETDGKVSSTKGDLGVWKYRRSAAWIVNGKDGYQQVTTTGVVLKNNQADAGGAICLNNGSNGAIQDCSINGNHSTGNGAGICLSNGSYKKGAALELKMGAVIHGNESKGYGGGFYCADSVKGSLSGGTMYDNSAKYGAGIYHEAEFRMSGGTVRNNHSGNSGGGIYAKGKLSMTGGEISANTAATYGGGAILKTAGGSVSGGSIKGNSASANGGGLQIDGTVSLSNASVSSNSASGKGGGISVSSSGTCNLSSGNVSGNTAKAGGGGIYIDGTCKANGSSFTGNQSSGDGGAVYIASGTFTTFQANQAVNIQGNSASGNGSGIYNRNITVLNNNAHILNNHCKNGTQRGIFHQGSLFSIEGNTEIQQEIYLAKDRFVTASNRYFSNSNSLKAKISLDTANIRNGYAVVKGNVSNSADGNYKTGEALLNNQSAGGRFVYAGSGYVMRPGNLKKSSSGCAPFSIVLSQAYQIRYDKNSKEEVMNMPTAAVKYWEEDIRLSALTPASGSGAFVAWNTKADGTGDGYQPGNVYTANADATLFALWPHYRVEYLPGIRSAAGTTDSQEQNKSEDILLRKNGFRSSEGKFVGWKQDISSARKRMELEPVGYKELKEEREKGKLNHILDFAESNKKVNSSENLDNINSLLDVEDIFFMEGQWDSKPDIILNDKKTFLENEKIKKNDLLKVVKGCYDEEDGELTKKVQIIKLDYAKSMKGYRPETQNFSGGMNDTDVMDTYFMKLEKDETVEVKVTFQAEDSVGNVAEKEGTVCVTYNNPPKLHSQNLAFYQKDLDNNPQTILKEIFENYQVEDIEDDKKGLKVPVSVIDPIPLQIEKLNSVGEHKIVYQAIDSLGKKTKLDSIVYIAENNPFKDSYKYNVRFINKKYLYTLKESSKWKKDEELNAQLTSQLEKTKEDAVLKYEFEIKK

SEQ ID NO: 342 - protein, 437 aa, Unknown
  Description of Unknown: uncultivated organism sequence
  Category: MG37 effectors
  Description: MG37-84 effector
MSDAVDPHLTGPDGPRTRSCATELICRDCGYRTPLLDTAFKCPACGEGLDIDYDYERAKRRIEERGLEGRPGNVWRFEELLPITNLRAQQRVAQFAGKTPLIHAERLGAELGLSNLYLKDDSTNRPSLSYKDRVVGMAIARLLELGKDEVGCVSTGNVGTAVASLAAQAGARPYIFYPGNMEKGKAKACRAMGAQVIQLDANYDQANRACRELALTIGMEFANITLRPFYAEGAKTMAFEVVEELGWQAPDHFVIPAAGGTLSSRVHKGLVELEKVGLAETAGSKIDIAQASGCSPIATAIVGGGEIEPQMPETAAHSLAIGAPGDGALVVDAVRSRSGSAATASDDEIWNAIDLLGTTEGILTEPAGGTTVAATARLAQEGKIGPDETVVAVISGNGLKTLHEHPEKDWPEGVPCEVGEMERLLNDFRQAAATALH

SEQ ID NO: 343 - protein, 437 aa, Unknown
  Description of Unknown: uncultivated organism sequence
  Category: MG37 effectors
  Description: MG37-85 effector
MSDAADPHLSEPYGLRTNSCATELACRDCGYRTPLLDRAFKCPACGEGLDVDYDYELARKRIEDRPPAERPSNIWRFEELLPILNRRAQQQVGAFAGKTPLIHAERLGAELGLSKLYLKDDSTNRPSLSYKDRVVGMAIARLLELGKSEVGCVSTGNVGTAVAALAAQAGATPYIFYPGNMEKGKAKACRALGAQVIQLDANYDQANRACRELAITTGMEFANITLRPFYAEGAKTMAFEVVEELGWQAPDHFVIPAAGGTLSSRVHKGLVELEKVGLAETAGSKIDIAQASGCSPIAAAIVGGGEISPQTPETAAHSLAIGAPGDGALVLDAVRSRQGSAATASDDEIFGAIDLLGATEGILTEPAGGTTIASTARLAQEGKIAPDETVVAIISGNGLKTLHEHPEKSWPENVPCEVGAMEEMLNDFRQAAAAALR

SEQ ID NO: 344 - protein, 1379 aa, Unknown
  Description of Unknown: uncultivated organism sequence
  Category: MG37 effectors
  Description: MG37-86 effector
MKKWGKRIISGVIVASLLTAAAISGSEQGTGTVASVVQAGTETSFMGKLLEGGYIDVFTSWTQEEQNKFYDGLSPQQQSVFLEVTNCQITRELIKSERSKEELEQFFDRLQPYFLILKKGNQEKPDDEIVIECINQIEGTDYHSSEQYIKQLVSEKKDHYLEFYNALKLVKDGKLEIESAVDDFYKELGFLKKDRVPANSAEVSRQPVQVQKKAAAKAVSDGYSNFKAVSSLKALKDAVASVKKGEKIAVRVDKGFNVTSVIRTNGRHVKIYADGESGHNLNRTAGYKDVMLEVNGGSLTLGAYDGDGRAKNNLYINGKNIAASAPLIEVTSGHLYLNKYSRIIDGYFLADFAGGAGIALNSGTSCYMFGGRIDNCRAKSSKDVSSSSPKSSHGGGVLVGNGSSFYMFAGSIEHCQAIHGGGIMNYGTLRLYGGAISDCAASNQKKDALGGAVKVQGAIETNGKVSSTKGDLGVWKYTRSAAWIVNGKDGYQQGTTTGVVLKNNQADAGGAICLNNGSNGAIQDCNINGNHSTGNGAGICLSNGSYKKGAALELKTGAVIHGNESKGYGGGIYCADSVKGSLSGGTMYDNSAKYGAGIYHEAEFRMSGGTVRSNHSGNSGGGIYAKGKLSMTGGEISANTAATYGGGAILKTVGGSVSGGSIKGNSASANGGGLQIDGTVSLSNASVSSNSASGKGGGISVSSSGTCNLSSGNVSGNTAKAGGGGIYIDGTCKANGSSFTGNQSSGDGGAVYIASGTFTTFQANQAVNIQGNSASGNGSGIYNRNITVLNNNVHILNNQCKNGTQRGIFHEGSLFSIEGNTEIQQEIYLAKDRFVTASNRYFSNSNSLKAKISLDTANIRNGYAVVKGNVSNSADGNYKTGEALLNNQSAGGRFVYAGSGYVMRPGNLKKSSSGCAPFSIVLSQAYQIRYDKNSKEEVMNMPTAAVKYWEEDIKLSALTPTGGSGAFVAWNTKADGTGDGYQPGNVYTANADATLFALWPHYRVEYLPGIRSAAGTTDSQEQNKSEDILLRKNGFRSSEGKFVGWKQDISSARKRMELEPVGYKELKEEREKGKLNHILDFAESYKKVNSSENLDNINSLLDVEDIFFMEGQWDSKPDIILNDKKTFLENEKIKKNDLLKVVKGCYDEEDGELTKKVQIIKLDYTKSMKGYRPETQNFSGGMNDTDVMDTYFMKLEKDETVEVKVTFQAEDSVGNVAEKEGTVCVTYNNPPKLHSQNLAFYQKDIDNNPQTILKEIFENYQVEDIEDDKKGLKVPVSVIDPIPLQIEKLNSVGEHKIVYQAIDSLGKKTKLDSIVYIAENNPFKDSYKYNVRFINKKYLYTLKESSKWKKNEELNAQLTSQLEKTKEDAVLKYEFEIKK

SEQ ID NO: 345 - protein, 1379 aa, Unknown
  Description of Unknown: uncultivated organism sequence
  Category: MG37 effectors
  Description: MG37-87 effector
MKKWGKRIISGVIAASLLTAAAISGSEQGTGTVASVVQAGTETSFMGKLLEGGYIDVFTSWTQEEQNKFYDGLSPQQQSVFLEVTNCQITRELIKSERSKEELEQFFDRLQPYFLILKKGNQEKPDDEIVIECINQIEGTDYHSSEQYIKQLVSEKKDHYLEFYNALKLVKDGKLEIESTVDDFYKELGFLKKDRVPANSAEVSRQPVQVQKKAAAKAVSDGYSNFKAVSSLKALKDAVASVKKGEKIAVRVDKGFNVTSVIRTNGRHVKIYADGESGHNLNRTAGYKDVMLEVNGGSLTLGAYDGDGRAKNNLYINGKNIAASAPLIEVTSGHLYLNKYSRIIDGYFLADFAGGAGIALNSGTSCYMFGGRIDNCRAKSSKDVSSSSPKSSHGGGVLVGNGSSFYMFAGSIEHCQAIHGGGIMNYGTLRLYGGAISDCAASNQKKDALGGAVKVQGAIETNGKVSSTKGDLGVWKYTRSAAWIVNGKDGYQQGTTTGVVLKNNQADAGGAICLNNGSNGAIQDCNINGNHSTGNGAGICLSNGSYKKGAALELKTGAVIHGNESKGYGGGIYCADSVKGSLSGGTMYDNSAKYGAGIYHEAEFRMSGGTVRSNHSGNSGGGIYAKGKLSMTGGEISANTAATYGGGAILKTVGGSVSGGSIKGNSASANGGGLQIDGTVSLSNASVSSNSASGKGGGISVSSSGTCNLSSGNVSGNTAKAGGGGIYIDGTCKANGSSFTGNQSSGDGGAVYIASGTFTTFQANQAVNIQGNSASGNGSGIYNRNITVLNNNAHILNNQCKNGTQRGIFHEGSLFSIEGNTEIQQEIYLAKDRFVTASNRYFSNSNSLKAKISLDTANIRNGYAVVKGNVSNSADGNYKTGEALLNNQSAGGRFVYAGSGYVMRPGNLKKSSSGCAPFSIVLSQAYQIRYDKNSKEEVMNMPTAAVKYWEEDIKLSALTPTGGSGAFVAWNTKADGTGDGYQPGNVYTANADATLFALWPHYRVEYLPGIRSAAGTTDSQEQNKSEDILLRKNGFRSSEGKFVGWKQDISSARKRMELEPVGYKELKEEREKGKLNHILDFAESYKKVNSSENLDNINSLLDVEDIFFMEGQWDSKPDIILNDKKTFLENEKIKKNDLLKVVKGCYDEEDGELTKKVQIIKLDYTKSMKGYRPETQNFSGGMNDTDVMDTYFMKLEKDETVEVKVTFQAEDSVGNVVEKEGTVCVTYNNPPKLHSQNLAFYQKDIDNNPQTILKEIFENYQVEDIEDDKKGLKVPVSVIDPIPLQIEKLNSVGEHKIVYQAIDSLGKKTKLDSIVYIAENNPFKDSYKYNVRFINKKYLYTLKESSKWKKNEELNAQLTSQLEKTKEDAVLKYEFEIKK

SEQ ID NO: 346 - protein, 430 aa, Unknown
  Description of Unknown: uncultivated organism sequence
  Category: MG37 effectors
  Description: MG37-88 effector
MSSFAETTRSCATELVCRDCGLRLPLEDTTSKCLGCGQGLDIEYDYELAKARLAELPTAQRAINIWRFEELLPIHDATAQRRVGINSGRTPLIHADRLGAELGLRKLYIKDDSTQRPSLSYKDRVVSMAVARLLELGKDEIGCVSTGNVGTAVASLAAKAGVTAYVFYPSNLEPGKARACRALGAAVIQLDGNYDQANRACRELALASGVQFANITLRPFYAEGAKTVAYEVVEKLDWISPDHFVIPAAGGTLSSRVHKGLVELERVGLAETSATKIHAAQPDGCGPIAEAILDGSGEIKHQTPHTAAHSLAIGAPGDGSLVVDAVMSRGGSAAAVTDEEIFEAIDLLGATEGILTEPAGGTTIASTAKLANEGKLGADETVVAVISGNGYKTLDEHPEKPWPSMVSCDVESMGEMLAEFRQHGVGATFS

SEQ ID NO: 347 - protein, 1379 aa, Unknown
  Description of Unknown: uncultivated organism sequence
  Category: MG37 effectors
  Description: MG37-89 effector
MKKWGKRIISGVIAASLLTAAAISGSEQGTGTVASVVQAGTETSFMGKLLEGGYIDVFTSWTQEEQNKFYDGLSPQQQSVFLEVTNCQITRELIKSERSKEELEQFFDRLQPYFLILKKGNQEKPDDEIVIECINQIEGTDYHSSEQYIKQLVSEKKDHYLEFYDALKLVKDGKLEIESAVDDFYKELGFLKKDRVPANSAEVSRQPVQVQKKAAAKAVSDRYSNFKAVSSLKALKDAVASVKKGEKIAVRVDKGFNVTSVIRTNGRHVKIYADGESGHNLNRTAGYKDVMLEVNGGSLTLGAYDGDGRAKNNLYINGKNIAASAPLIEVTSGHLYLNKYSRIIDGYFLADFAGGAGIALNSGTSCYMFGGRIDNCRAKSSKDVSSSSPKSSHGGGVLVGNGSSFYMFAGSIEHCQAIHGGGIMNYGTLRLYGGAISDCAASNQKKDALGGAVKVQGAIETNGKVSSTKGDLGVWKYTRSAAWIVNGKDGYQQGTTTGVVLKNNQADAGGAICLNNGSNGAIQDCNINGNHSTGNGAGICLSNGSYKKGAALELKTGAVIHGNESKGYGGGIYCADSVKGSLSGGTMYDNSAKYGAGIYHEAEFRMSGGTVRSNHSGNSGGGIYAKGKLSMTGGEISANTAATYGGGAILKTVGGSVSGGSIKGNSASANGGGLQIDGTVSLSNASVSSNSASGKGGGISVSSSGTCNLSSGNVSGNTAKAGGGGIYIDGTCKANGSSFTGNQSSGDGGAVYIASGTFTTFQANQAVNIQGNSASGNGSGIYNRNITVLNNNAHILNNQCKNGTQRGIFHEGSLFSIEGNTEIQQEIYLAKDRFVTASNRYFSNSNSLKAKISLDTANIRNGYAVVKGNVSNSADGNYKTGEALLNNQSAGGRFVYAGSGYVMRPGNLKKSSSGCAPFSIVLSQAYQIRYDKNSKEEVMNMPTAAVKYWEEDIKLSALTPTGGSGAFVAWNTKADGTGDGYQPGNVYTANADATLFALWPHYRVEYLPGIRSAAGTTDSQEQNKSEDILLRKNGFRSSEGKFVGWKQDISSARKRMELEPVGYKELKEEREKGKLNHILDFAESYKKVNLSENLDNINSLLDVEDIFFMEGQWDSKPDIILNDKKTFLENEKIKKNDLLKVVKGCYDEEDGELTKKVQIIKLDYTKSMKGYRPETQNFSGGMNDTDVMDTYFMKLEKDETVEVKVTFQAEDSVGNVAEKEGTVCVTYNNPPKLHSQNLAFYQKDIDNNPQTILKEIFENYQVEDIEDDKKGLKVPVSVIDPIPLQIEKLNSVGEHKIVYQAIDSLGKKTKLDSIVYIAENNPFKDSYKYNVRFINKKYLYTLKESSKWKKNEELNAQLTSQLEKTKEDAELKYEFEIKK

SEQ ID NO: 348 - protein, 1378 aa, Unknown
  Description of Unknown: uncultivated organism sequence
  Category: MG37 effectors
  Description: MG37-90 effector
MKKWGKRIISGVIVASLLTAAAISGSEQGTATVSSVVQAGTEMSFMGKLLEGGYIDVFTSWSQEEQNKFYDRLSPKEKSVFLEVTNCQIIRELIKSERTKEELERLFDRLEPYFLMLKKGSQEKPDEEIVIECINQIEGKDYESLEQYLKQLVSEKHGYYLDFYTALKRVKDGKSEIQSAVNDLYKNLGFLKEDKVPAKPDKVSPLPVQVQKKAAKAVSDGYSNFKAVSSLKALKDAVASVEKGEKIAVRVDKGFNVTSAIRTNGRHVKIYADGESARNLNRAVGYKDAMLEVNGGSLTLGAYDGDGRAKNNLYINGKNVAASAPMIEVISGQLYLNKYSRIIDGYFLADFAGGAGIAMNSGTSCYMFGGKIDSCRAKSSKDVSSSSPKSSHGGGVLVGNGASFYMFAGSIEHCQAIHGGGIMNYGTLRLYGGTVSDCAASNKKKDALGGAVKVQGAIETDGKVNSTKGDLGVWKYTRSGTWAVNGKDGYQQKSTTGVVLKNNQADAGGAVCLNNGSNGAIQDCNIYGNHSNGNGAGICLSNGSYKKGAALEIKAGAVIHGNESKGYGGGIYCADSVKGSLRGGSMYDNSAVYGAGVYHEAEFRMTGGTVRNNHSGNSGGGIYAKGKLSMTGGEISSNTAATYGGGAILKNAGGSLSGGSIKNNTASVNGGGLQIDGAVSFSNVSVSSNSASGKGGGISVSSAGTCSFSSGNVSGNTSKAGGGGIYIDGTCKANGSNFTGNQSYGDGGAVYIASGTFTTFQANQAVNIQGNSASGNGSGIYNRNTAILNNNAHILNNQCKNGTQRSIFHEGSLFSIEGHTEIQQEIYLAKDRFITVSNRYFSNSNSLTARISLDAANIRNGYAAVKGNISNSADSNYKTGDALLNNQSVNGRFMYAGSGYVMRPGNLKKSSSGCVPYSIVLSQAYQIRYDKNSKEEVMNMPTAAVKYWEEDIRLSALTPSGGSGVFVAWNTNADGTGDGYQPGNVYTANADATLFALWPHYRVEYLPGIQGAAGTTDSQEQNKSENILLRKNGFRSSEGKFIGWKQDISSARKRRELEPVGYKELKEERERGKSDHILAFAKSYKKVNASVNLDNKNSLLNAEDIFFMEGQWDSKPDIILHDKKTFLENEKIRKNDLLKAVKGCYDDEDGDLTEKVQIIKLDYGTSMEGYRPEPQNFSGGMNDTDVMDTYFMKLEKDETVEVKVIFQVEDSVGNVAEKEGTVYVTYNNPPKLHSQNLAFYQKDLDNNPQTVLKEILENYQVEDLEDDKSGLKVPVSVVDPIPMQIEKLNSVGEHKIVYQAIDSLGKKTKLDSTVYIAENNPFKDSYKYNVRFINKKYLYTLKESSKWKKDGKLNAQLTSQLEKTREDAVLKYEFKIKK

SEQ ID NO: 349 - protein, 430 aa, Unknown
  Description of Unknown: uncultivated organism sequence
  Category: MG37 effectors
  Description: MG37-94 effector
MLNAEDRTRSCATELVCRDCGRRLPLLDTTSKCLGCGQGLDVDYDYELAKARLAEHPTAERAINIWRFEELLPIVDARAQARVGRYSGRTPLIHADRLGAELGLKKLYLKDDSTQRPSLSYKDRVVSMAIARLLELGKEEIGCVSTGNVGTAVSSLAAKAGVTAYVFYPSNMERGKARACRALGAAVCQLDGNYDEANRACRELALASGIQFANITLRPFYAEGAKTVAYEVVEQLEWEAPDHFVIPAAGGTLSSRVHKGLNELEMVGLAETSGTKINVAQPSGCGPIAAAILDGSGEIEPQTPHTAAHSLAIGAPGDGPLVVDAVMSRGGSAATATDPEIFDAIDLLGATEGILTEPAGGTTVASTIKLANEGKLGPDDTVVAIISGNGYKTLDEHPDKPWAEGVACEVDSMTEMLNEFRQHGVGATLS

SEQ ID NO: 350 - protein, 440 aa, Unknown
  Description of Unknown: uncultivated organism sequence
  Category: MG37 effectors
  Description: MG37-95 effector
MSTAVGRAEENQTTRSCVTELVCQKCDVKLPITDMEAFCPTCGKCLDVAYDYELAASRLREMPMSERPASIWRLSELLPIRDSRAQAQVGQFSGLTPLIPANRLGAELGLKKLYVKDDSTSRPSLSYKDRVVSTAIARLIELGKSEIGCVSTGNVGTAVASLAAKAGVTPYVFYPNRLEQTKARACRALGARVCQVSGNYDEANRECRKVAAASGLEFANITLRPFYAEGAKTMAFEIVEQLGWNAPDHIVSATAGGTLSSRLHKGLIELETVGLAQTSSTKMHIAQPDGCSPIASAIIAHQPEIQPCKPTTAAHSLAIGSPGDGYLVIEAVRSRHGSAASASDEEIFLGIDLLAATEGILTEPAGGTTIAVLKKLAEAGEIDPDAVVVAIITGNGLKTLDDHPEKTWPSMVECESESMLSVLSDFQHEQAASAGQPLPA

SEQ ID NO: 351 - protein, 438 aa, Unknown
  Description of Unknown: uncultivated organism sequence
  Category: MG37 effectors
  Description: MG37-96 effector
MSDAADPHLSEPYGLRTRSCATELTCRDCGYRTPLLDRAFKCPACGEGLDVDYDYELAKQRIAERPAGERPWNIWRFEELLPILNRRAQLRVAQFAGKTPLIHAERLGAELGLSRLYLKDDSTNRPSLSYKDRVVGMAIARLLELGKEEVGCVSTGNVGTAVASLAAQAGARPYIFYPGNMEKGKAKACRAMGAQVIQLDANYDQANRACRELALETGMEFANITLRPFYAEGAKTMAFEVVEELGWQAPDHFVIPAAGGTLSSRVHKGLVELERVGLAETAGSKINIAQASGCSPIASAISEGGEIVTQTPETAAHSLAIGAPGDGHLVVDAVRSREGAAATASDEEIFGAIDLLGATEGILTEPAGGTTIASTARLAQEGRIGPDETVVAIISGNGLKTLHEHPEKDWPEGVPCEVGAMEEILNDFRQAAAAAALR

SEQ ID NO: 352 - protein, 430 aa, Unknown
  Description of Unknown: uncultivated organism sequence
  Category: MG37 effectors
  Description: MG37-97 effector
MLNDQARTRSCATEMVCRDCGRTYPLSDTAFRCHGCGNGLDIDYDYELAKKRLGEIPPAEREINIWRFEELLPITDASAQARVGRYSGRTPLIHADRLGAELGLKKLYLKDDSTQRPSLSYKDRVVSMAVARLLELGKDEIGCVSTGNVGTSVSSLAAKAGVAAYVFYPSNMERGKARACRALGAAVIQLDGNYDQANRACRELALASGMQFTNITLRPFYAEGAKTEAYEIVEQLEWCSPDHIVIPAAGGTLSSRVHKGLNELEMVGLAETSQTKINVAQAEGCNPIATAILEEADEIEPQTPNTVAHSIAIGAPGDGALVVDAVKSRGGSAAAVTDQEIFEGIDLLGATEGVLTEPAGGTTIACTAKLANEGKLGPDDTVVAIVSGNGYKTLDEHPEKSWPEMVAPDVEAMSEVLNELRQHGVGATLS

SEQ ID NO: 353 - protein, 430 aa, Unknown
  Description of Unknown: uncultivated organism sequence
  Category: MG37 effectors
  Description: MG37-98 effector
MSPFAEETRSCATELVCRDCGQRLPLMDTTFKCLGCGQGLDIDYDYELAKARLGELPMSEREINIWRFEELLPILDARAQRRVGFYSGRTPLIHADRLGAELGLRKLYLKDDSTQRPSLSYKDRVVSMAVARLLELGKEEIGCVSTGNVGTAVASLAAKAGVTAYVFYPSNLEPGKARACRALGAAVIQLDGNYDQANRACRELALASGVQFANITLRPFYAEGAKTVAYEVVEKLDWISPDHFVIPAAGGTLSSRVHKGLQELEKVGLSETAATKIHAAQPDGCGPIAGAILDGSGEIQPQTPHTAAHSLAIGAPGDGPLVVDAVMSRGGSAATVTDEEIFEAIDLLGATEGILTEPAGGTTVASTAKLAAEGKFGPDETVVAVISGNGYKTLDEHPEKPWPSMVSCDVESMGEMLAEFRQHGVGATLS

SEQ ID NO: 354 - protein, 439 aa, Unknown
  Description of Unknown: uncultivated organism sequence
  Category: MG37 effectors
  Description: MG37-99 effector
MRRPSTPPSSPSGSRKRTRSCATGLVCHRCERNFPLEQAIFACPDCGKGLDVAYDYELAARHFAEVPRAERPLNIWRFEELLPIVGTSAQALVGSYAGYTPLIAADRLGAELGLSNLYLKDDSTSRPSLSYKDRVVSMSVARLLELGKDEIGCVSTGNVGTAVASLAAKAGVDAYVFYPSHLEAMKARACRALGAEVCQVEGNYDEVNRRCRDLAAATGMEFANITLRPFYAEGAKTAAFEIVEQLDWQSPDHIVTPAAGGTLSSRLHKGLGELQLLGLAETSATRIHIAQPSGCNPIASAILAEEAEIHAVTPETAAHSLAIGAPGDGYLVIDAVRKRGGTGGFASDPEIFAGIDLLASTEGLLTEPAGGTTIAVLEKLAAAGRFAPDDTVVAVITGNGLKTLDEHPAKPWPDKVDCELDAMLAALEELGRKPSPVAA

SEQ ID NO: 355 - protein, 444 aa, Unknown
  Description of Unknown: uncultivated organism sequence
  Category: MG37 effectors
  Description: MG37-100 effector
MSTQTAQSPPGAGQRTRSCATGVACHRCEKHYPLEDTVFACPGCGKGLDVVYDYELAARHFKEVPSSERPQNIWHFEELLPIVDASAQARVGLHSGYTPLIRADRLGAELGLSNLYLKDDSTSRPSLSYKDRVVSMSVARLLERGKTEIGCVSTGNVGTAVASMAAAAGVDAYVFYPNRLEDMKARACMALGAKVCQVEGNYDEANRRCREVAETTGMDFANITLRPFYAEGAKTAAFEIVEQLDWRSPDHIITAAAGGTLSSRLHKGLLELQHLGLSETDPTRIHIAQPSGCNPIATAIIAEEAEVRPVTPETAAHSLAIGAPGDGYLVIDAVLKRGGTGGFASDPEIFAGIDLLAATEGLLTEPAGGTTVAVLEKLAAAGRFAPDDTVVAIITGNGLKTLDDHPPKPWPAKVDCELDAMLAALSELKSGGSLVDSAREQLHA

SEQ ID NO: 356 - protein, 444 aa, Unknown
  Description of Unknown: uncultivated organism sequence
  Category: MG37 effectors
  Description: MG37-101 effector
MSTQTAQSPPGAGQRTRSCATGVACHRCEKHYPLEDTVFACPGCGKGLDVVYDYELAARHFKEVPSSERPQNIWHFEELLPIVDASAQARVGLHSGYTPLIRADRLGAELGLSNLYLKDDSTSRPSLSYKDRVVSMSVARLLERGKTEIGCVSTGNVGTAVASMAAAAGVDAYVFYPNRLEDMKARACMALGAKVCQVEGNFDEANRRCREVAETTGMDFANITLRPFYAEGAKTAAFEIVEQLDWRSPDHIITAAAGGTLSSRLHKGLLELQHLGLSETDPTRIHIAQPSGCNPIATAIIAEEAEVRPVTPETAAHSLAIGAPGDGYLVIDAVLKRGGTGGFASDPEIFAGIDLLAATEGLLTEPAGGTTVAVLEKLAAAGRFAPDDTVVAIITGNGLKTLDDHPPKPWPAKVDCELDAMLAALSELKSGGSLVDSAREQLHA

SEQ ID NO: 357 - protein, 430 aa, Unknown
  Description of Unknown: uncultivated organism sequence
  Category: MG37 effectors
  Description: MG37-103 effector
MLSPEDRTRSCATEMVCRDCGRTYPLLDTAFRCHGCGNGLDIDYDYELATKRLAEIPPAEREINIWRFEELLPIVDARAQARVGRYSGRTPLIHADRLGAELGLKKLYIKDDSTSRPSLSYKDRVVSMAIARLLELGNDEIGCVSTGNVGTAVSSLAAKAGVAAYVFYPSNMERGKARACRALGAAVIQLDGNYDQANRACRELALASGMQFTNITLRPFYAEGAKTEAYEVVEQLEWHSPDHFVIPAAGGTLSSRVHKGLNELEMVGLAETSGTKINVAQAEGCDPIATAILDGSGEIEPQSPQTAAHSIAIGAPGDGALVVDAVKSRGGSAASVTDAEIFEGIDLLGATEGILTEPAGGTTIASTAKLAAEGKIGPEDTVVAIVSGNGYKTLDEHPDKPWAEGVACEVEAMGEVLNELRQHGVGATLG

SEQ ID NO: 358 - protein, 437 aa, Unknown
  Description of Unknown: uncultivated organism sequence
  Category: MG37 effectors
  Description: MG37-104 effector
MSDAVDPHLTGPEGPRTRSCATELVCRDCGYRTPLLDTAFKCPACGEGLDVDYDYERAKEAIAERGLEGRPANVWRFEELLPITSLGAQRRVAQFAGKTPLIHAERLGAELGLSNLYLKDDSTNRPSLSYKDRVVGMAIARLLELGKDEVGCVSTGNVGTAVASLAAQAGARPYIFYPGNMEKGKAKACRAMGAQVIQLDANYDQANRACRELAITTGMEFANITLRPFYAEGAKTMAFEVVEELGWQAPDHFVIPAAGGTLSSRVHKGLVELETVGLAETAGSKINIAQASGCSPIATAIVGGGEIEPQMPETAAHSLAIGAPGDGTLVLDAVRSRGGSAATASDDEIWNAIDLLGATEGILTEPAGGTTIASTARLAQEGKIGPDETVVAVISGNGLKTLHEHPEKDWPEGVPCEVGAMEQLLNDFRQAAAAALH

SEQ ID NO: 359 - protein, 437 aa, Unknown
  Description of Unknown: uncultivated organism sequence
  Category: MG37 effectors
  Description: MG37-105 effector
MSEAVEPHLEGTYGSRTRSCATELACRDCGYRTPLLDTAFKCPACGEGLDIDYDYELAKARIAEHDLSARPHNIWRFEELLPILSRKAQAKVGQFSGQTPLIHADRLGAELGLKKLYLKDDSTNRPTLSYKDRVVGMAIARMLELGKDEIGCVSTGNVGTAVAALAAKAGAAAYIFYPGNMEKGKAKACRALGAHVCQLDGNYDQANRACRELALTSGMQFANITLRPFYAEGAKTMAFEVVEELGWVAPDHFVIPAAGGTLSSRVHKGLNELELVGLAETSGTKINIAQPSGCGPIAGAILDGGEIQHQAPNTAAHSLAIGAPGDGSLVVDAVRTRGGTAATASDDEIFAAIDLLAATEGVLTEPAGGTTIASTAKLAAEGKLGPDDTVVAVISGNGLKTLQDHPEKTWPEMVACEVETMESVLNDFRREVAAVHH

SEQ ID NO: 360 - protein, 445 aa, Unknown
  Description of Unknown: uncultivated organism sequence
  Category: MG37 effectors
  Description: MG37-106 effector
MSIQTAESPPQGSRQRTRSCAIELACRRCDNHYPLEQAVFACPDCGKGLDVVYDYELAARHFREVASSERPQNIWHFEELLPIVDASAQARVGRHAGYTPLIQADRLGAELGIANLYLKDDSSNRPSLSYKDRVVSMSVARLLELGKSEIGCVSTGNVGTAVASLAAKAGVDAYVFYPNRLEDTKARACMALGAKVCQVEGNYDEANRRCRELAEATGMEFANITLRPFYAEGAKTAAFEIVEQLDWRAPDHIVTAAAGGTLSSRLHKGLVELQLLGLSETDSTRIHIAQPSGCNPIASAILAEEAEIHAVTPETAAHSLAIGNPGDGYLVIDAVLKRGGTGGFASDPEIFAGIDLLAATEGLLTEPAGGTTIAVLEKLAAAGRFAADETVVATITGNGLKTLDDHPRKPWPAKIDCELDAMRAALEDLKSSGSLVQSAREQLHF

SEQ ID NO: 361 - protein, 438 aa, Unknown
  Description of Unknown: uncultivated organism sequence
  Category: MG37 effectors
  Description: MG37-107 effector
MSDAVDPHRTEPYGLRTRSCATELTCRECGYRTPLLDKAFKCPACGEGLDVDYDYELAKKRIAERSTDERPWNIWRFEELLPILNRRAQERVAQFAGKTPLIHAERLGAELGLSRLYLKDDSTNRPSLSYKDRVVGMAIARLLELGKDEVGCVSTGNVGTAVASLAAQAGARPYIFYPGNMEKGKAKACRAMGAQVIQLDANYDQANRACRELALETGMEFANITLRPFYAEGAKTMGFEVVEELGWQAPDHFVIPAAGGTLSSRVHKGLVELEKVGLAETAGSKINIAQASGCSPIATAITGGGEIVTQTPETAAHSLAIGAPGDGNLVVDAVRSREGSAATASDEEIWSAIDLLGATEGILTEPAGGTTIASTARLAQEGKIGPDETVVAVISGNGLKTLHEHPEKDWPEGVPCEVGAMEQILNDFRQAAAAAALR

SEQ ID NO: 362 - protein, 437 aa, Unknown
  Description of Unknown: uncultivated organism sequence
  Category: MG37 effectors
  Description: MG37-108 effector
MSDAVDPHLEAPAGPQTRSCATELICRDCGYRTPLLDTAFKCPACGEGLDVDYDYERAQATIAAHPLDERPHDLWRFEELLPITSQRAQSRVGQISGQTPLIHAERLGAELGLNRLYIKDDSTNRPTLSYKDRVVGMAIARLLELGKDEVGCVSTGNVGTAVSALAAAAGAKAYVFYPGNMEKGKAKACRALGAQVCQLDGNYDQANRACRELSLASGIEFANISLRPFYAEGAKTMAFEVVEQLGWEAPDHLVIPAAGGTLSSRVHKGLNELQTVGLATTEGAKLNIAQASGCSPIAAAIRGGGELEPQTPETAAHSIAIGAPGDGNLVIDAVRTRGGWAATASDPEIFEAIDLLGRTEGLLTEPAGGTTIACTARLAQEGKIGRDEVVVAAITGNGLKTIADHPEKPWPEGVACNVEAMSEMLAEFRATAETALH

SEQ ID NO: 363 - protein, 1379 aa, Unknown
  Description of Unknown: uncultivated organism sequence
  Category: MG37 effectors
  Description: MG37-109 effector
MKKWGKRIVSGVIAVSLLAAASISRQKPGGNTVESIVQAGTEASFMGSLLQGEYIDVFTSWPVKEQNVFYDSLKPQERSVFFEVTNYQIIRQLTKTGRKKKDLDDLLQKLGAYFQLLRIGSVEKAKEQTVIECINEIEKTEYQSADEYVKQLIPEKQTCYMEFYLALNQAWKDKKDIQDAVDELYKKLGFKEEKKQDSPTTAVIKSSRTVQQKAAAKAVSDGFSNFKAVSSLKEMKDAIDSVKKGEKLAVRVDKGFNVTSAIKTNGRHVKLYADSVSGHNLNRTSAYKGAMIEVNGGSLTLGAYDGDGRAKNTLYINGKNVTATASLIEVTSGQLYLNKYSRIMDGYYLADFAGGGGVTLESGTSCYMFGGKIDGCQAANSKDVSSSSPKSSHGGGIVVNDKASFYMFSGSVERCKAVHGGGIMVYGTARLYGGTITDCAAVNKKNDALGGAVKVQGAFSTDGKTTSVTGDFAAWKYTRSNTWSVNGKDGYEQASTSGAVLKNNQANAGGSVCINNGSKGTIQDCNIYGNQSTGNGAGICLSNGSYKKGASLEIKNGAGIHGNTSSGYGGGVYCADSVKGSISGGSVYNNTASYGAGIYHEAEFLMSGGTVRNNQSANSGGGFYAKGKLVTTGGEVAGNTAKTYGGGAIIKSAGASISGVRIKSNSAAVNGGGVQLDGQAVVSNAAVSENTASAKGGGISVSTAGGLQMNKGTVSGNTAKSNGGGINADGTCKVNGSNLTGNQVNGDGGAVYVGSGTFTTFQANQAVNIEGNSAAKNGAGIYNKNVTVLNNNAHILINQCKNGSEHNVFHAGSQLLVEGNAEIKQEVYLTKDRFITASSKYFSSANSLTMKISMDSSNVRNGYAVVKGDIPDTRDSSYKAGDTLLHNQAAEGRFAYTGTCYGLRPGNLKKSSSGCVPYSIVLSQAYKICYDKNSTQEVRNMPTAAVKHWEEDMRLSELVPSSGSGVFVAWNTRSDGTGNGYQPGNLYTANEDVILFALWPHYKVEYVPGIQGTNGVTDSQEQNKSEDILLRKNGFRSSEGKFICWKQDAYKARKRNEMEAAGYTDLKTERDGQGQDYVFGFSKNLRRGNLNSNSENAGSLLDVDDIFIMKGQWDFKPDIILKDKMIFRENEKVNRKKLLELVESCHDIEDGDLMKRIQISKIQYGMTKKGKKPKDVIFSNGMENSDLMNTYFMLLDKNETVNVKITFQVEDSAGNLTTKEGFVYVNYNHPPKLHSYNLAYYQQELETKDQIVLKEIIENCKVEDIEDDEQGIKIPVSVVEPIPLQIEKLKAAGKHKIVYKAVDSLGKETKLETELYIAEGSPYLDSYIYRVRFINKDYLHTLDQNSKWRKNLDLNKKLVTQLEKTENDVLMKYKFQSNK

SEQ ID NO: 364 - protein, 1378 aa, Unknown
  Description of Unknown: uncultivated organism sequence
  Category: MG37 effectors
  Description: MG37-110 effector
MKKWGKRIISGVIVASLLTAAAISGSEQGTATVSSVVQAGTEMSFMGKLLEGGYIDVFTSWTQEEQIKFYDRLSPKEKSVFLEVTNCQIIRELIKSERTKEELERFFDRLEPYFLMLKKGSQEKPDEEIVIECINQIEGKDYESLEQYLKQLVSEKHGYYLDFYTALKRVKDGKSEIESAVNDLYKNLGFLKEDKVPAKPDKVSPLPVQVQKKAAKAISDGYSNFKAVSSLKALKDAVASVEKGEKIAVRVDKGFNVTSAIRTNGRHVKIYADGESAHNLNRAVGYKDAMLEVNGGSLTLGAYDGDGRAKNNLYINGKNVAASAPMIEVTSGQLYLNKYSRIIDGYFLADFAGGAGIAMNSGTSCYMFGGKIDSCRAKSSKDVSSSSPKSSHGGGVLVGNGASFYMFAGSIEHCQAIHGGGIMNYGTLRLYGGTVSDCAASNKKKDALGGAVKVQGAIETDGKVNSTKGDLGVWKYTRSGTWAVNGKDGYQQKSTTGVVLKNNQADAGGAVCLNNGSNGAIQDCNIYGNHSNGNGAGICLSNGSYKKGAALEIKTGAVIHGNESKGYGGGIYCADSVKGSLRGGSMYDNSAVYGAGVYHEAEFRMTGGTVRNNHSGNSGGGIYAKGKLSMTGGEISSNTAAAYGGGAILKNAGGSLSGGSIKNNTASVNGGGLQIDGAVSFSNVSVSSNSASGKGGGISVSSAGTCNFSSGNVSGNTSKAGGGGIYIDGTCKANGSNFTGNQSYGDGGAVYIASGTFTTFQANQAVNIQGNSASGNGSGIYNRNTAILNNNAHILNNQCKNGTQRGIFHEGSLFSIEGHTEIQQEIYLAKDRFITASNRYFSNSNSLTARISLDAANIRNGYAAVKGNISNSADSNYKTGDALLNNQSVNGRFMYAGSGYVMRPGNLKKSSSGCVPYSIVLSQAYQIRYDKNSKEEVMNMPTAAVKYWEEDIRLSALTPSGGSGVFVAWNTNADGTGDGYQPGNIYTANADATLFALWPHYRVEYLPGIQGAAGTTDSQEQNKSENILLRKNGFRSSEGKFIGWKQDISSARKRRELEPVGYKELKEERERGKSDHILAFAKSYKKVNASVNLDNKNSLLNAEDIFFMEGQWDSKPDIILHDKKTFLENEKIRKNDLLKAVKGCYDDEDGDLTEKVQIIKLDYGTSMEGYRPEPQNFSGGMNDTDVMDTYFMKLEKDETVEVKVIFQVEDSVGNVAEKEGTVYVTYNNPPKLHSQNLAFYQKDLDNNPQTVLKEILENYQVEDLEDDKSGLKVPVSVVDPIPMQIEKLNSVGEHKIVYQAIDSLGKKTKLDSTVYIAENNPFKDSYKYNVRFINKKYLYTLKESSKWKKDGKLNAQLTSQLEKTREDAVLKYEFKIKK

SEQ ID NO: 365 - protein, 432 aa, Unknown
  Description of Unknown: uncultivated organism sequence
  Category: MG37 effectors
  Description: MG37-111 effector
MSLSADQRTRSCATELVCHDCGLRLPLLDTTFKCLGCGQGLDIDYDYELARARLADQPVAQRELNIWRFEELLPIVDASARARVGRYSGRTPLIHADRLGAELGLRKLYLKDDSTQRPSLSYKDRVVSMAVARLLELGKEEIGCVSTGNVGTAVASLAAKAGVAAYVFYPSNLERGKARACRALGAAVIQLDGNYDEANRACRELAMASDIQFANITLRPFYAEGAKTMAFEVVEQLDWVSPDHFVIPAAGGTLSSRVHKGLEEMEKVGMAETAATKIHIAQAGGCDPIATAILDGGGEIEAQRPNTAAHSLAIGAPGDGPLVIDAVTSRGGSAASATDPEIFEALDLLGATEGILTEPAGGTTIAAAMKLANEGKLGPDDTVVAVISGNGYKTLDEHPDKPWPEGVAPEVEAMEQTLAQFRNTGTSAALSG

SEQ ID NO: 366 - protein, 1378 aa, Unknown
  Description of Unknown: uncultivated organism sequence
  Category: MG37 effectors
  Description: MG37-112 effector
MKKWGKRIISGVIVASLLTAAAISGSEQGTATVSSVVQAGTETSFMGKLLEGGYIDVFTSWTQEEQNKFYDRLSPKEKSVFLEVTNCQIIRELIKSERTKEELERFFDRLEPYFLMLKKGSQEKPDEEIVIECINQIEGKDYESLEQYLKQLVSEKHGYYLDFYTALKRVKDGKSEIESAVNDLYKNLGFLKEDKVPAKPDKVSPLPVQVQKKAAKAVSDGYSNFKAVSSLKALKDAVASVEKGEKIAVRVDKGFNVTSAIRTNGRHVKIYADGESAHNLNRAVGYKDAMLEVNGGSLTLGAYDGDGRAKNNLYINGKNVAASAPMIEVTSGQLYLNKYSRIIDGYFLADFAGGAGIAMNSGTSCYMFGGKIDSCRAKSSKDVSSSSPKSSHGGGVLVGNGASFYMFAGSIEHCQAIHGGGIMNYGTLRLYGGTVSDCAASNKKKDALGGAVKVQGAIETDGKVNSTKGDLGVWKYTRSGTWAVNGKDGYQQKSTTGVVLKNNQADAGGAVCLNNGSNGAIQDCNIYGNHSNGNGAGICLSNGSYKKGAALEIKTGAVIHGNESKGYGGGIYCADSVKGSLRGGSMYDNSAVYGAGVYHEAEFRMTGGTVRNNHSGNSGGGIYAKGKLSMTGGEISSNTAATYGGGAILKNAGGSLSGGSIKNNTASVNGGGLQIDGAVSFSNVSVSSNSASGKGGGISVSSAGTCSFSSGNVSGNTSKAGGGGIYIDGTCKANGSNFTGNQSYGDGGAVYIASGTFTTFQANQAVNIQGNSASGNGSGIYNRNTAILNNNAHILNNQCKNGTQRGIFHEGSLFSIEGHTEIQQEIYLAKDRFITVSNRYFSNSNSLTARISLDAANIRNGYAAVKGNISNSADSNYKTGDALLNNQSVNGRFMYAGSGYVMRPGNLKKSSSGCVPYSIVLSQAYQIRYDKNSKEEVMNMPTAAVKYWEEDIRLSALTPSGGSGVFVAWNTNADGTGDGYQPGNVYTANADATLFALWPHYRVEYLPGIQGAAGTTDSQEQNKSENILLRKNSFRSSEGKFIGWKQDISSARKRRELEPVGYKELKEERERGKSDHILAFAKSYKKVNASVNLDNKNSLLNAEDIFFMEGQWDSKPDIILHDKKTFLENEKIRKNDLLKAVKGCYDDEDGDLTEKVQIIKLDYGTSMEGYRPEPQNFSGGMNDTDVIDTYFMKLEKDETVEVKVIFQVEDSVGNVAEKEGTVYVTYNNPPKLHSQNLAFYQKDLDNNPQTVLKEILENYQVEDLEDDKSGLKVPVSVVDPIPMQIEKLNSVGEHKIVYQAIDSLGKKTKLDSTVYIAENNPFKDSYKYNVRFINKKYLYTLKESSKWKKDGKLNAQLTSQLEKTREDAVLKYEFKIKK

SEQ ID NO: 367 - protein, 438 aa, Unknown
  Description of Unknown: uncultivated organism sequence
  Category: MG37 effectors
  Description: MG37-113 effector
MSEAVDPRLGGPGGPRTSSCATELVCRECGYRAPLSDTAFRCPTCDAGLDVDYDYERAKASIAARGLAERPWNIWRFEELLPIAGRRAAGTVAQFAGQTPLIPARRLGAELGLRNLYVKDDSTNRPSLSYKDRVVGMAVARALELGAGEIGCVSTGNVGTATASLAAAAGLKPYVFYPANLERAKARGCRALGAQVCQVDGNYDEANRACRELTEATGIPFANISLRPFYAEGAKTLAYELVEGLGWRSPDHVVMPAAGGTLSSRVHKGLLEFEILDLAETAATKLHVGQPTGCSPIVTTIVDGAKEIVPQQPETLAHSLAIGAPGDGDLVVEAVRSRGGSAAAVPDGEIIEAMELLAATEGVLTEPAGGTTVAATMKLAQRGEIAPDDVVVIVISGNGLKTLSEQPVKPWPEGVPCNAATMEEVVVEFREGGVTSRA

SEQ ID NO: 368 - protein, 430 aa, Unknown
  Description of Unknown: uncultivated organism sequence
  Category: MG37 effectors
  Description: MG37-114 effector
MLSSEDRTRSCATELVCRDCGRRLPLLDTTSKCLGCGNGLDIDYDYELAKARLAEHPTSERAINIWRFEELLPILDARAQARVGRYSGRTPLIHADRLGAELGLKKLYLKDDSTQRPSLSYKDRVVSMAVARLLELGKDEIGCVSTGNVGTAVASLAAKAGVTAYVFYPSNMERGKARACRALGAAVCQLDGNYDEANRACRELALASGIQFANITLRPFYAEGAKTVAYEVVEQLDWVAPDHFVIPAAGGTLSSRVHKGLNELEMVGLAQTSGTKINVAQAEGCNPIAAAILDGSGEVKPQAPNTAAHSIAIGAPGDGALVVNAVMSRGGSAAAVADSEIFDAIDLLGATEGILTEPAGGTTVASTIKLANEGKLGPEDTVVAVISGNGYKTLDEHPDKPWAEGVACELDAMTEMLNEFRLHGVGATLS

SEQ ID NO: 369 - protein, 430 aa, Unknown
  Description of Unknown: uncultivated organism sequence
  Category: MG37 effectors
  Description: MG37-115 effector
MSLSADQRTRSCATELVCHDCGLRLPLLDMTFKCLGCGQGLDIDYDYELAAARVAEQPIAERELNIWRFEELLPIVDAKARDRVGRYSGRTPLIHADRLGAELGLRKLYLKDDSTQRPSLSYKDRVVSMAVARLLELGKGEMGCVSTGNVGTAVASLAAKAGVAAYVFYPSNLERGKARACRALGAAVIQLDGNYDEANRACRELALASGIQFANITLRPFYAEGAKTMAFEVVEQLDWVSPDHFVIPAAGGTLSSRVHKGLGEMETVGMAETAATKIHIAQPEGCGPIATAVLDGSGKIEAQRPQTAAHSLAIGAPGDGPLVVDAVTSRGGSAATATDPEIFEALDLLGATEGILTEPAGGTTIAATIKLANEGKLGPDDTVVAVISGNGYKTLDEHPDKPWPERVACEVEAMEETLAGFRGAEAALSR

SEQ ID NO: 370 - protein, 448 aa, Unknown
  Description of Unknown: uncultivated organism sequence
  Category: MG37 effectors
  Description: MG37-116 effector
MSPQTAQSLGSGPPAPRQRTRSCATGLACHRCGSHYPLEQAIFACPDCGKGLDVVYDYEHAASHFRDVPSSERPHNIWHFEELLPIVDAAAQARVGQHSGYTPLIRADRLGAELGLSNLYLKDDSSNRPSLSYKDRVVSMSVARLLERGGTEIGCVSTGNVGTAVASMAAKAGVDAYVFYPNRLEDTKARACMALGAKVCQVEGNYDEANRRCRELAESTGMDFANITLRPFYAEGAKTAAFEIVEQLEWQAPDHIITAAAGGTLSSRLHKGLVELQLLELAETDSTRIHIAQPSGCNPIATAIVAEEAEIRAVTPETAAHSLAIGNPGDGYLVIDAVLKRGGTGGFASDPEIFAGIDLLAATEGLLTEPAGGTTIAVLEKLAAAGRFAPDDTVVAIITGNGLKTLDDHPAKSWPDKIECELDAMLAALSELKSSGTLVDSARRQLHP

SEQ ID NO: 371 - protein, 438 aa, Unknown
  Description of Unknown: uncultivated organism sequence
  Category: MG37 effectors
  Description: MG37-117 effector
MSTATGRVEDDKTTRSCVTELVCHRCDVRRPITDTEAFCPECGKCFDVAYDYELAKARLGELAMGERPQNIWRLSELLPIRSARAQAEVGQVSGMTPLIAATRLGSRLGLRKLYLKDDSTQRPSLSYKDRVVSSAIARALELGKTEIGCVSTGNVGTAVAALAAKAGVTPYVFYPNRLEQTKAKACRALGARVCQVAGNYDEANRECKKVAAASGLEFANITLRPFYAEGAKTTVFEIVEQLGWRAPDHIVSATAGGTLSSRLHKGLVELETVGLAQTGSTKMHIAQPAGCSPIASAIEAGDKEIHPCTPETAAHSLAIGSPGDGYLVIDAVLSRKGSAGTANDEEIFAGIDLLAETEGILTEPAGGTTIAVLKKLVESGELDPDATVVAIITGNGLKTLEDHPEKPWPQTECEAESMLAVLSDLQGQAASARQPLPV

SEQ ID NO: 372 - protein, 439 aa, Unknown
  Description of Unknown: uncultivated organism sequence
  Category: MG37 effectors
  Description: MG37-118 effector
MSDAVDPHLTEPYGLRTRSCATELTCRDCGYRTPLLDKAFKCPACGEGLDVDYDYDLAKQRIAERPAAERPWNIWRFEELLPILNRRAQERVAQFAGKTPLIHAERLGAELGLSNLYIKDDSTNRPSLSYKDRVVGMAIARLLELGKTEVGCVSTGNVGTAVAALAAQAGATPYIFYPGNMEKGKAKACRALGAQVIQLDANYDGANRACRELALATGMEFANITLRPFYAEGAKTMAFEVVEEMGWQPPDHFVIPAAGGTLSSRVHKGLVELEKVGLAETAGSKINIAQASGCSPISTAITAGGAEISPQTPETAAHSIAIGAPGDGALVVDAVVGRGGSGATATDEEIFGAIDLLGETEGILTEPAGGTTIACTARLAQEGKIAPDETVVAVISGNGLKTLHEHPEKTWPEMVPCEAGAMEEILNDFRQAAATAALR

SEQ ID NO: 373 - protein, 445 aa, Unknown
  Description of Unknown: uncultivated organism sequence
  Category: MG37 effectors
  Description: MG37-119 effector
MSTQTAQNPPSRSRQRTRSCATGLVCHRCENHYPLEQAIFACPDCGKGLDVAYDYERAASHFKEVPGSERPENIWRFEELLPIVDAAAQARVGRYAGFTPLIHADRLGAELGLSNLYLKDDSTSRPSLSYKDRVVSMSVARLLELGKHEIGCVSTGNVGTAVASMAAKAGVDAYVFYPNRLEDMKARACMALAAKVCQVEGNYDEANRRCRELALATGMEFANITLRPFYAEGAKTAAFEIVEQLDWRAPDHIVTAAAGGTLSSRLHKGLGELQLLGLSETDPTRIHIAQPSGCNPIASAILAEEAEIKPVTPETAAHSLAIGAPGDGYLVIDAVRKRGGTGGFASDPEIFAGIDLLAATEGLLTEPAGGTTIAVLEKLAAAGRFAPDETVVAIVTGNGLKTLDDHPQKPWPAKVDCELDAMLAALTELKGGGSLIDSAREQLRA

SEQ ID NO: 374 - protein, 445 aa, Unknown
  Description of Unknown: uncultivated organism sequence
  Category: MG37 effectors
  Description: MG37-120 effector
MSTQTAHSPAQGSRQRTRSCATGLACHRCDHSYPLEDAIFACPDCGKGLDVVYDYELAARHFREVPAAERPQNVWHFEELLPIVDARAQARVGQHTGYTPLIRAERLGAELGIGNLYLKDDSTSRPSLSYKDRVVSMSVARLLERGGSEIGCVSTGNVGTAVASLAAKAGVDAYVFYPNRLEDMKARACRALGAKVCQVEGNYDEANRRCRELAEATGMDFANITLRPFYAEGAKTAAFEIVEQLEWDAPDHIVTAAAGGTLSSRLHKGLVELQLLGLAETDATRIHIAQPSGCNPIASAILAEEAEVVPVTPETAAHSLAIGAPGDGYLVVDAVRTRGGTAGYASDPEIFAGFDLLAATEGLLTEPAGGTTVAVLEKLAAAGRFEADETVVAIITGNGLKTLDDHPAKPWPAKVDCELDAMRAALEDLKSGASLIDSAREQLHV

SEQ ID NO: 375 - protein, 1372 aa, Unknown
  Description of Unknown: uncultivated organism sequence
  Category: MG37 effectors
  Description: MG37-121 effector
MKKWGKRIISGVIAASLLTAAAISGSEQGTGTVASVVQAGTETSFMGKLLEGGYIDVFTSGTQEEQNKFYDGLSPQQQSVFLEVTNCQITRELIKSERSKEELEQFFDRLQPYFLILKKGNQEKPDDEIVIECINQIEGTDYHSSEQYIKQLVSGKKDHYLEFYNALKLVKDGKLEIESAVDDFYKELGFLKKDRVPANSAEVSRQSVQVQKKAAAKAVSDGYSNFKAVSSLKALKDAVASVKKGEKIAVRVDKGFNVTSVIRTNGRHVKIYADGESGHNLNRTAGYKDVMLEVNGGSLTLGAYDGDGRAKNNLYINGKNIAASSGHLYLNKYSRIIDGYFLADFAGGAGIALNSGTSCYMFGGRIDNCRAKSSKDVSSGSPKSSHGGGVLVGNGSSFYMFAGSIEHCQAIHGGGIMNYGTLRLYGGAISDCAASNQKKDALGGAVKVQGAIETDGKVSSTKGDLGVWKYRRSAAWIVNGKDGYQQVTTTGVVLKNNQADAGGAICLNNGSNGAIQDCSINGNHSTGNGAGICLSNGSYKKGAALELKMGAVIHGNESKGYGGGFYCADSVKGSLSGGTMYDNSAKYGAGIYHEAEFRMSGGTVRNNHSGNSGGGIYAKGKLSMTGGEISANTAATYGGGAILKTAGGSVSGGSIKGNSASANGGGLQIDGTVSLSNASVSSNSASGKGGGISVSSSGTCNLSSGNVSGNTAKAGGGGIYIDGTCKANGSSFTGNQSSGDGGAVYIASGTFTTFQANQAVNIQGNSASGNGSGIYNRNITVLNNNAHILNNHCKNGTQRGIFHQGSLFSIEGNTEIQQEIYLAKDRFVTASNRYFSNSNSLKAKISLDTANIRNGYAVVKGNVSNSADGNYKTGEALLNNQSAGGRFVYAGSGYVMRPGNLKKSSSGCAPFSIVLSQAYQIRYDKNSKEEVMNMPTAAVKYWEEDIRLSALTPASGSGAFVAWNTKADGTGDGYQPGNVYTANADATLFALWPHYRVEYLPGIRSAAGTTDSQEQNKSEDILLRKNGFRSSEGKFVGWKQDISSARKRMELEPVGYKELKEEREKGKLNHILDFAESNKKVNSSENLDNINSLLDVEDIFFMEGQWDSKPDIILNDKKTFLENEKIKKNDLLKVVKGCYDEEDGELTKKVQIIKLDYAKSMKGYRPETQNFSGGMNDTDVMDTYFMKLEKDETVEVKVTFQAEDSVGNVAEKEGTVCVTYNNPPKLHSQNLAFYQKDLDNNPQTILKEIFENYQVEDIEDDKKGLKVPVSVIDPIPLQIEKLNSVGEHKIVYQAIDSLGKKTKLDSIVYIAENNPFKDSYKYNVRFINKKYLYTLKESSKWKKDEELNAQLTSQLEKTKEDAVLKYEFEIKK

SEQ ID NO: 376 - protein, 407 aa, Unknown
  Description of Unknown: uncultivated organism sequence
  Category: MG37 effectors
  Description: MG37-122 effector
MFACPGCGKGLDVVYDYELAARHFKEVPSSERPQNIWHFEELLPIVDASAQARVGLHSGYTPLIRADRLGAELGLSNLYLKDDSTSRPSLSYKDRVVSMSVARLLERGKTEIGCVSTGNVGTAVASMAAAAGVDAYVFYPNRLEDMKARACMALGAKVCQVEGNYDEANRRCREVAETTGMDFANITLRPFYAEGAKTAAFEIVEQLDWRSPDHIITAAAGGTLSSRLHKGLLELQHLGLSETDPTRIHIAQPSGCNPIATAIIAEEAEVRPVTPETAAHSLAIGAPGDGYLVIDAVLKRGGTGGFASDPEIFAGIDLLAATEGLLTEPAGGTTVAVLEKLAAAGRFAPDDTVVAIITGNGLKTLDDHPPKPWPAKVDCELDAMLAALSELKSGGSLVDSAREQLHA

SEQ ID NO: 377 - protein, 1378 aa, Unknown
  Description of Unknown: uncultivated organism sequence
  Category: MG37 effectors
  Description: MG37-123 effector
MKKWGKRIISGVIVASLLTAAAISGSEQGTATVSSVVQAGTETSFMGKLLEGGYIDVFTSWTQEEQNKFYDRLSPKEKSVFLEVTNCQIIRELIKSERTKEELERFFDRLEPYFLMLKKGSQEKPDEEIVIECINQIEGKDYESLEQYLKQLVSEKHGYYLDFYTALKRVKDGKSEIESAVNDLYKNLGFLKEDKVPAKPDKVSPLPVQVQKKAAKAVSDGYSNFKAVSSLKALKDAVASVEKGEKIAVRVDKGFNVTSAIRTNGRHVKIYADGESAHNLNRAVGYKDAMLEVNGGSLTLGAYDGDGRAKNNLYINGKNVAASAPMIEVTSGQLYLNKYSRIIDGYFLADFAGGAGIAMNSGTSCYMFGGKIDSCRAKSSKDVSSSSPKSSHGGGVLVGNGASFYMFAGSIEHCQAIHGGGIMNYGTLRLYGGTVSDCAASNKKKDALGGAVKVQGAIETDGKVNSTKGDLGVWKYTRSGTWAVNGKDGYQQKSTTGVVLKNNQADAGGAVCLNNGSNGAIQDCNIYGNHSNGNGAGICLSNGSYKKGAALEIKTGAVIHGNESKGYGGGIYCADSVKGSLRGGSMYDNSAVYGAGVYHEAEFRMTGGTVRNNHSGNSGGGIYAKGKLSMTGGEISSNTAATYGGGAILKNAGGSLSGGSIKNNTASVNGGGLQIDGAVSFSNVSVSSNSASGKGGGISVSSAGTCSFSSGNVSGNTSKAGGGGIYIDGTCKANGSNFTGNQSYGDGGAVYIASGTFTTFQANQAVNIQGNSASGNGSGIYNRNTAILNNNAHILNNQCKNGTQRGIFHEGSLFSIEGHTEIQQEIYLAKDRFITVSNRYFSNSNSLTARISLDAANIRNGYAAVKGNISNSADSNYKTGDALLNNQSVNGRFMYAGSGYVMRPGNLKKSSSGCVPYSIVLSQAYQIRYDKNSKEEVMNMPTAAVKYWEEDIRLSALTPSGGSGVFVAWNTNADGTGDGYQPGDVYTANADATLFALWPHYRVEYLPGIQGAAGTTDSQEQNKSENILLRKNGFRSSEGKFIGWKQDISSARKRRELEPVGYKELKEERERGKSDHILAFAKSYKKVNASVNLDNKNSLLNAEDIFFMEGQWDSKPDIILHEKKTFLENEKIRKNDLLKAVKGCYDDEDGDLTEKVQIIKLDYGTSMKGYRPEPQNFSGGMNDTDVMDTYFMKLEKDETVEVKVIFQVEDSVGNVAEKEGTVYVTYNNPPKLHSQNLAFYQKDLDNNPQTVLKEILENYQVEDLEDDKSGLKVPVSVVDPIPMQIEKLNSVGEHKIVYQAIDSLGKKTKLDSTVYIAENNPFKDSYKYNVRFINKKYLYTLKESSKWKKDGKLNAQLTSQLEKTREDAVLKYEFKIKK

SEQ ID NO: 378 - protein, 439 aa, Unknown
  Description of Unknown: uncultivated organism sequence
  Category: MG37 effectors
  Description: MG37-125 effector
MSDAVDPHLTEPYGLRTRSCATELTCRECGYRTPLLDKAFKCPACGEGLDVDYDYDLAKQRIAERPAAERPWNIWRFEELLPILNRRAQERVGQFAGKTPLIHAERLGAELGLSKLYIKDDSTNRPSLSYKDRVVGMAIARLLELGKNEVGCVSTGNVGTAVAALAAQAGATPYIFYPGNMEKGKAKACRAMGAQVIQLDANYDGANRACRELALATGMEFANITLRPFYAEGAKTMAFEVVEEMGWQAPDHFVIPAAGGTLSSRVHKGLVEMETVGLAETAGSKINIAQASGCSPISTAITAGGAAIEAQTPETAAHSIAIGAPGDGALVVDAVVSRGGSGATASDEEIFGAIDLLGETEGILTEPAGGTTIACTARLAQEGKIAPDETVVAVISGNGLKTLQEHPEKSWPEMVPCEAGAMEEILNDFRQAAATAALR

SEQ ID NO: 379 - protein, 437 aa, Unknown
  Description of Unknown: uncultivated organism sequence
  Category: MG37 effectors
  Description: MG37-126 effector
MSDAANPHLTEPYGLRTNSCATELTCRDCGYRTPLLDRAFKCPACGEGLDVDYDYDLAKRRIEERPMAERPWNIWRFEELLPILNRRAQQRVGAFAGKTPLIHAERLGAELGLSNLYLKDDSTNRPSLSYKDRVVGMAIARLLELGKDEVGCVSTGNVGTAVASLAAQAGAKPYIFYPGNMEKGKAKACRAMGAQVIQLDANYDGANRACRELALATGMEFANITLRPFYAEGAKTMAFEVVEELDWRAPDHFVIPAAGGTLSSRVHKGLVEMEKVGLAETAGSKINIAQASGCSPIATAIVGGGEIEHQTPETAAHSLAIGAPGDGNLVVDAVRSRGGSAATASDEEIWNAIDLLGSTEGILTEPAGGTTIASTARLAQEGKIAPDETVVAVISGNGLKTLHEHPEKDWPEGVPCEVGAMEDLLNDFRQAAAAALR

SEQ ID NO: 380 - protein, 439 aa, Unknown
  Description of Unknown: uncultivated organism sequence
  Category: MG37 effectors
  Description: MG37-127 effector
MSDAVDPHLTEPYGSRTSSCATELACRDCGYRTPLLDKAFKCPACGEGLDVDYDYELARKRIAARPLAARPWNIWRFEELLPILNRRAQEQVGAFAGKTPLIHAERLGAELGLSNLYLKDDSTNRPSLSYKDRVVGMAIARLLELGKDEVGCVSTGNVGTAVAALGAQAGARPYIFYPGNMEKGKAKACRALGAQVIQLDANYDQANRACRELALATGMEFANITLRPFYAEGAKTMAFEVVEELGWKAPDHFVIPAAGGTLSSRVHKGLRELEMVGLAETAAAKINIAQASGCSPISTAISAGGAEIEVQTPETAAHSLAIGAPGDGALVVDAVVSRGGAGATASDEEIFEAIDLLGATEGILTEPAGGTTIASTARLAQEGKIGPDETVVAVISGNGLKTLHEHPEKTWPEMVPCEVGAMEEMLNDFRRAAAAAALR

SEQ ID NO: 381 - protein, 437 aa, Unknown
  Description of Unknown: uncultivated organism sequence
  Category: MG37 effectors
  Description: MG37-128 effector
MSDAADPHLGEAIGPRTSSCDTELVCRDCGYRTPLLDTAFKCPACGEGLDIDYDYERAKSLIAKRGLAERPDNIWRFEELLPILSQRAQGMVGQFSGQTPLIKADRLGAELGLKNLYLKDDSTNRPTLSYKDRVVSMAIARMLALGKDEIGCVSTGNVGTAVAALAAKAGARAYIFYPGNMEKGKAKACRALGAQVCQLDGNYDQANRACRELSLASGIEFANITLRPFYAEGAKTMAFEVVEQLGWTAPDHFVIPAAGGTLSSRVHKGLSELETVGLAETGATRINIAQASGCGPIATAILEGGEIVPQTPDTAAHSIAIGAPGDGALVVDAVRSRGGSAATVSDEEIFGAIDLLGATEGILTEPAGGTTVAVTAKLAAEGKLGADETVVAVISGNGLKTLQDHPEKQWPEMVACDVETMGAMLADFRQAAATTLH

SEQ ID NO: 382 - protein, 448 aa, Unknown
  Description of Unknown: uncultivated organism sequence
  Category: MG37 effectors
  Description: MG37-129 effector
MSIQTAEVPDQGQPAPRQRTRSCATGLACHRCGHSYPLESTVFSCPDCGKGLDVVYDYELAARHFKEIPTSERPQNIWHFEELLPIVDASAQARVGLHAGYTPLIRADRLGAELGIANLYLKDDSSNRPSFSYKDRVVSMSVARLLERGGTEIGCVSTGNVGTAVASMAAKAGVDAYVFYPNRLENMKARVCMALGAKVCQVEGNYDEANKRCRELAESTGMDFANITLRPFYAEGAKTAAFEIVEQLDWRAPDHIVTAAAGGTLSSRLHKGLVELQQLGLSETDATRIHIAQPSGCNPIASAILAEEAEIHPVTPETAAHSLAIGAPGDGYLVVDAVRKRGGTGAFASDPEIFAGIDLLAATEGLLTEPAGGTTVAVLEKLAAVGRFGPDETVVAIITGNGLKTLDDHPPKPWPDKVDCELDAMQEALSELKSSGTLVESARAQLHV

SEQ ID NO: 383 - protein, 441 aa, Unknown
  Description of Unknown: uncultivated organism sequence
  Category: MG37 effectors
  Description: MG37-131 effector
MTTSTPQRSSQRTRSCATGLVCHRCDNSYPLEQSIFACPDCGKGLDVVYDYELAATHFRDFPTSERPQNIWHFEELLPIVDAGAQSRVGRYSGYTPLIRADRLGAELGLGNLYLKDDSTSRPSLSYKDRVVSMAVARLLERGGTEIGCVSTGNVGTAVAAMAAKAGVDAYVFYPNALEEMKARACRALAAKVCQVEGNYDQANRRCREVAETTGMDFANITLRPFYAEGAKTAAFEIVEQLDWNAPEHIVIPAAGGTLSSRVHKGLVEMAHLGLSETGQTKIHIAQPSGCNPIASAIIAEEAEVVPVTPETVAHSLAIGAPGDGYLVIDAVLSRGGTGGFASDPEIFAGIDLLASTEGLLTEPAGGTTIAVLEKMAAAGTFAQDETVVAIITGNGLKTLDEHPDKPWPAKVKCELDAMLEALTELKAEETLLNSAQRLLGS

SEQ ID NO: 384 - protein, 352 aa, Unknown
  Description of Unknown: uncultivated organism sequence
  Category: MG37 effectors
  Description: MG37-132 effector
MRAQQRVAQFAGKTPLIHAERLGAELGLSNLYLKDDSTNRPSLSYKDRVVGMAIARLLELGKDEVGCVSTGNVGTAVASLAAQAGARPYIFYPGNMEKGKAKACRAMGAQVIQLDANYDQANRACRELALTIGMEFANITLRPFYAEGAKTMAFEVVEELGWQAPDHFVIPAAGGTLSSRVHKGLVELEKVGLAETAGTKIDIAQASGCSPIATAIVGGGEIEPQMPETAAHSLAIGAPGDGALVVDAVRSRSGSAATASDDEIWYAIDLLGTTEGILTEPAGGTTVAATARLAQEGKIGPDETVVAVISGNGLKTLHEHPEKDWPEGVPCEVGEMERLLNDFRQAAATALH

SEQ ID NO: 385 - protein, 431 aa, Unknown
  Description of Unknown: uncultivated organism sequence
  Category: MG37 effectors
  Description: MG37-134 effector
MSLAADQRTRSCATELVCRDCGLRLSLADTTFKCLQCGQGLDIDYDYELAAARLADLSLSERPLNIWRFEELLPIVDRAAQARVGKNSGRTPLIHADRLGAELGLKRLYLKDDSTARPSLSYKDRVVSMAIARLLELGKEEIGCVSTGNVGTAVASLAAKAGVAPYVFYPANMERGKARACRALGAAVIQLDGNYDEANRACRELALASGIQFANITLRPFYAEGAKTLAFEVLEQLDWKPPEHFVIPAAGGTLSSRVHKGLGEMEAVGIVGTSQVKISVAQPDGCGPIAKAVLDGTGEISAQKPNTAAHSLAIGAPGDGALVVDAVMSRGGSAATASDAEIFEAIDLLGATEGILTEPAGGTTIAATAKLAQAGKLGPEDTVVAVISGNGYKTLDEHPEKEWPSMVAPEVEAMERTLAEFRGARTGAALS

SEQ ID NO: 386 - protein, 445 aa, Unknown
  Description of Unknown: uncultivated organism sequence
  Category: MG37 effectors
  Description: MG37-135 effector
MSTPTSQSRAADPARRTRSCAQALVCRRCDLEYPLQERVFACPQCGKGLDVSYDYELAACRFEEIPPAARPQNIWQFEELLPIVDASAQARVGLTAGYTPLIAADRLGAELGIANLYLKDDSTSRPSLSYKDRVVAMSVARLLELGERAMGCVSTGNVGTAVASYAAKAGVDAYVFYPNRLEDTKARACRALGAKVCQVEGNYDEANRCCREVAQATGMEFANITLRPFYAEGAKTSAFEIVEQLNWRAPDHIVTAAAGGTLSSRLHKGLCELAQLELADTEPTRIHIAQPSGCNPIASAILAEEAEIQAVTPETAAHSLAIGAPGDGYLVIDAVRKRGGTGGFASDPEIFAGIDLLASTEGILTEPAGGTTIAVLEKLAAGGRFGPDDTVVAIITGNGLKTLDDHPEKPWPAKIDCELDAMLAALEELRRGGSPSASARERLPA

SEQ ID NO: 387 - protein, 430 aa, Unknown
  Description of Unknown: uncultivated organism sequence
  Category: MG37 effectors
  Description: MG37-136 effector
MLNSEDRTRSCATELVCRDCGRRLPLLDTTSKCLGCGNGLDIDYDYELARARLSEVPPAEREINIWRFEELLPIVDARAQARVGRYSGRTPLIHADRLGAELGLKKLYLKDDSTSRPGLSCEERVVSMAIARLLELGKEEIGCVSTGNVGTAVASLAAKAGITAYVFYPSNMERGKARACRALGAAVCQLDGNYDEANRACRELALASGIQFANITLRPFYAEGAKTLAYEVVEQLEWVAPDHIVIPAAGGTLSSRVHKGLNELETVGLAETSQVKISVAQPEGCGPIATAIIDGSGEIEPQSPQTAAHSLAIGAPGDGALVVDAVMSRGGSAATASDPAIFEAIDLLGATEGVLTEPAGGTTIASTIKLANEGKLGPDDTVVAVISGNGYKTLDEHPDKPWAEGVACEVDSMTEMLDEFRRHGVGAMLG

SEQ ID NO: 388 - protein, 430 aa, Unknown
  Description of Unknown: uncultivated organism sequence
  Category: MG37 effectors
  Description: MG37-137 effector
MLNPEDRTRSCATEMVCRDCGRTYPLLDTAFRCHGCGNGLDIDYDYELAKKRLSEIPPAEREINIWRFEELLPITDARAQARVGRYSGRTPLIHADRLGAELGLKKLYLKDDSTQRPSLSYKDRVVSMAVARLLELGKDEIGCVSTGNVGTSVSSLAAKAGVAAYVFYPSNMERGKARACRALGAAVIQLDGNYDQANRACRELALASGMQFTNITLRPFYAEGAKTEAYEVVEQLEWVSPDHFVIPAAGGTLSSRVHKGLNELEMVGLAETSQTKINVAQAEGCNPIATAILDGSGEIAPQTPNTVAHSIAIGAPGDGPLVVDAVRSRGGSAAAVTDAEIFEGIDLLGATEGILTEPAGGTTIACTAKLANEGKLGPDETVVAIVSGNGYKTLDEHPEKSWPEMIAPEVEAMSEVLDELRSHGVGAPLS

SEQ ID NO: 389 - protein, 437 aa, Unknown
  Description of Unknown: uncultivated organism sequence
  Category: MG37 effectors
  Description: MG37-138 effector
MSDAVDPHLGGASGPRTSSCATELICRDCGYTTPLLDSAFKCPACGEGLDIDYDYDRAKALIAERGLDERPQNIWRFEELLPIASRAAQQKVGQFAGRTPLIRADRLGAEIGLNNLYLKDDSTNRPTLSYKDRVVSMAIARLLELGKNEVGCVSTGNVGTAVAALAAKAGATAYIFYPGNMEKGKAKACRALGAQVCQLDGNYDQANRACRELSLASGIEFANITLRPFYAEGAKTMAFEIVEELGWIAPDHLVIPAAGGTLSSRVHKGLNELEIVGLAETAGTKINIAQAGGCSPIATAIRDGGELEPQTPETAAHSLAIGAPGDGNLVLDAVRTRGGSAAAPSDPEIFAAIDLLGATEGVLTEPAGGTTIAATAKLAAEGKIAPDDVVVATISGNGLKTLSEHPDKPWPEMVACDVDTMGAMLSDFRQAAAAALH

SEQ ID NO: 390 - protein, 445 aa, Unknown
  Description of Unknown: uncultivated organism sequence
  Category: MG37 effectors
  Description: MG37-139 effector
MSSSSTTASSQGTRQRTRSCATELVCHRCDHRYPLTDTVFACPDCGKGLDIAYDYELAGTHFRDFPISERPQNIWHFEELLPILDANAQARVGQYSGYTPLIRADRLGAELGLNNLYLKDDSTSRPSLSYKDRVVSMSVARLLERGKTEIGCVSTGNVGTAVASMAATAGVDAFIFYPNRLEEMKARACMALGAKVVQVEGNYDEANRRCREVAAETGMDFANITLRPFYAEGAKTAAFEIVEQLQWASPDHIVSPAAGGTLSSRMHKGLGELQLLGLSETEGTQIHIAQPSGCNPIASAILAEEAEVVPVMPETAAHSLAIGAPGDGYLVIDAVHKRGGTAAFASDPEIFAGIDLLAATEGLLTEPAGGTTIAVLEKLAAAGRFAPEDTVVALITGNGLKTLDEHPSKAWPAKIDCELDPMLGALAELKRTPTLMQTAREQLRA

SEQ ID NO: 391 - protein, 445 aa, Unknown
  Description of Unknown: uncultivated organism sequence
  Category: MG37 effectors
  Description: MG37-141 effector
MSTSSSNGPGERPRQQTRSCATGLACHRCGLSYALDEDAYACPQCGKGLDIVYDYERAARLFTEVPREQRPQNIWRFEELLPIVDAGAQARVGAHAGCTPLIRADRLGAELGIANLYLKDDSTSRPSLSYKDRVVAMSIARLLELGKDEIGCVSTGNVGTAVASYAAKAGVTAYVVYPNRLEDTKARACAALGARVCQVEGNYDEANRRCKEVAAAAEMEFANITLRPFYAEGAKTAAFEIVEQLSWNAPAHIVTAAAGGTLSSRLHKGLAELEQLGLAHTSSTRIHIAQPSGCNPIASAILAEEAEVHPITPETAAHSLAIGAPGDGYLVIDAVLKRGGTAGFASDPEIFAGIDLLAATEGLLTEPAGGTTVAVLEKLAKEGRFATDDVVVAIITGNGLKTLDDHPEKPWPAKIDCELDAMLAALAELKREGALAERALEQLHA

SEQ ID NO: 392 - protein, 436 aa, Unknown
  Description of Unknown: uncultivated organism sequence
  Category: MG37 effectors
  Description: MG37-143 effector
MSDAVDPHLTEPYGLRTRSCATELTCRDCGYRTPLLDKAFKCPACGEGLDVDYDYELAKKRIAERSTAERPWNIWRFEELLPILNLRAQQRVAQFAGKTPLVHAERLGAELGLSNLYLKDDSTNRPSLSYKDRVVGIAIARLLELGKDEVGCVSTGNVGTAVAALAAQAGARPYIFYPGNMEKGKAKACRGLGAQVIQLDANYDQANRACRELAITTGMEFANITLRPFYAEGAKTMAFEVVEELGWRAPDHFVIPAAGGTLSSRVHKGLVELEKVGLAETAAAKIDIAQASGCSPIATAIQGGGEIEPQTPETAAHSLAIGAPGDGNLVVDAVRSRGGAAAAVSDEEIWGAIDLLGTTEGILTEPAGGTTIASTARLAQEGRIGPDDLVVAVISGNGLKTLQEHPDKPWPEMVPCEVGAMEEMLNDFRQAAAALH

SEQ ID NO: 393 - protein, 1379 aa, Unknown
  Description of Unknown: uncultivated organism sequence
  Category: MG37 effectors
  Description: MG37-144 effector
MKKWGKRIISGVIAASLLTAAAISGSEQGTGTVASVVQAGTEMSFMGKLLEGGYIDVFTSWTQEEQNKFYDGLSPQQQSVFLEVTNCQITRELIKSERSKEELEQFFDRLQPYFLILKKGNQEKPDDEIVIECINQIEGTDYHSSEQYIKQLVSEKKDHYLEFYDALKLVKDGKLEIESAVDDFYKELGFLKKDRVPANSAEVSRQPVQVQKKAAAKAVSDRYSNFKAVSSLKALKDAVASVKKGEKIAVRVDKGFNVTSVIRTNGRHVKIYADGESGHNLNRTAGYKDVMLEVNGGSLTLGAYDGDGRAKNNLYINGKNIAASAPLIEVTSGHLYLNKYSRIIDGYFLADFAGGAGIALNSGTSCYMFGGRIDNCRAKSSKDVSSSSPKSSHGGGVLVGNGSSFYMFAGSIEHCQAIHGGGIMNYGTLRLYGGAISDCAASNQKKDALGGAVKVQGAIETNGKVSSTKGDLGVWKYTRSAAWIVNGKDGYQQGTTTGVVLKNNQADAGGAICLNNGSNGAIQDCNINGNHSTGNGAGICLSNGSYKKGAALELKTGAVIHGNESKGYGGGIYCADSVKGSLSGGTMYDNSAKYGAGIYHEAEFRMSGGTVRSNHSGNSGGGIYAKGKLSMTGGEISANTAATYGGGAILKTVGGSVSGGSIKGNSASANGGGLQIDGTVSLSNASVSSNSASGKGGGISVSSSGTCNLSSGNVSGNTAKAGGGGIYIDGTCKANGSSFTGNQSSGDGGAVYIASGTFTTFQANQAVNIQGNSASGNGSGIYNRNITVLNNNAHILNNQCKNGTQRGIFHEGSLFSIEGNTEIQQEIYLAKDRFVTASNRYFSNSNSLKAKISLDTANIRNGYAVVKGNVSNSADGNYKTGEALLNNQSAGGRFVYAGSGYVMRPGNLKKSSSGCAPFSIVLSQAYQIRYDKNSKEEVMNMPTAAVKYWEEDIKLSALTPTGGSGAFVAWNTKADGTGDGYQPGNVYTANADATLFALWPHYRVEYLPGIRSAAGTTDSQEQNKSEDILLRKNGFRSSEGKFVGWKQDISSARKRMELEPVGYKELKEEREKGKLNHILDFAESYKKVNSSENLDNINSLLDVEDIFFMEGQWDSKPDIILNDKKTFLENEKIKKNDLLKVVKGCYDEEDGELTKKVQIIKLDYTKSMKGYRPETQNFSGGMNDTDVMDTYFMKLEKDETVEVKVTFQAEDSVGNVAEKEGTVCVTYNNPPKLHSQNLAFYQKDIDNNPQTILKEIFENYQVEDIEDDKKGLKVPVSVIDPIPLQIEKLNSVGEHKIVYQAIDSLGKKTKLDSIVYIAENNPFKDSYKYNVRFINKKYLYTLKESSKWKKNEELNAQLTSQLEKTKEDAELKYEFEIKK

SEQ ID NO: 394 - protein, 437 aa, Unknown
  Description of Unknown: uncultivated organism sequence
  Category: MG37 effectors
  Description: MG37-145 effector
MSEAVDPHLGGSAGPRTSSCATELVCRDCGYRTPLLDTAFKCPACGEGLDIDYDYERAKALIAERGLAERPQNVWRFEELLPIVARGAQERVGQFSGQTPLIRADRLGAELGLKNLYLKDDSTNRPTLSYKDRVVSMAIARLLELGKDEVGCVSTGNVGTAVAALAAKAGATAYIFYPGNMEKGKAKACRALGAQVCQLDGNYDQANRACRELSLASGIEFANITLRPFYAEGAKTMAFEVVEQLGWVAPDHFVIPAAGGTLSSRVHKGLNELETVGLAATAATRINIAQAGGCGPIATAILDGGEIEPQTPDTAAHSLAIGAPGDGALVVDAVRSRNGSAATASDQEIFDAIDLLGATEGLLTEPAGGTTIASTARLAAEGKIGAEDTVVAVISGNGLKTLQDHPEKQWPEMVACDVETMGSMLADFRQAAAAALH

SEQ ID NO: 395 - protein, 444 aa, Unknown
  Description of Unknown: uncultivated organism sequence
  Category: MG37 effectors
  Description: MG37-146 effector
MSTPIAESPTQARQRTRSCATALVCHRCENSYPLAQAIFACPDCNKGLDVVYDYEHAAQHFREVPSSERPQNIWHFEELLPIVDASAQARVGQHSGYTPLIRADRLGAELGLSNLYLKDDSSNRPSLSYKDRVVSMSVARLLELGRTEIGCVSTGNVGTAVASLAAKAGVDAYVFYPNRLEDTKARACMALGAKVCQVEGNYDEANKRCREVAETTGMDFANITLRPFYAEGAKTAAFEIVEQLDWQAPDHIVTAAAGGTLSSRLHKGLVELQLLELSETDSTRIHIAQPSGCNPIATAIVAEEAEIHAVTPETAAHSLAIGNPGNGYLVIDAVLKRGGTGGFASDPEIFAGIDLLAATEGLLTEPAGGTTIAVLEKLAATGRFAPDDTVVAIITGNGLKTRDDHPPKPWPAKVDCELDAMVAALDELKQSGTLVDSARELLHP

SEQ ID NO: 396 - protein, 437 aa, Unknown
  Description of Unknown: uncultivated organism sequence
  Category: MG37 effectors
  Description: MG37-148 effector
MSDAVEPHRTEPYGLRTDSCATELVCRDCGYRTPLLDTAFKCPACGEGLDVDYDYELAKRRIAERGLEGRPWNVWRFEELLPILNRRARQRVAQFAGKTPLIHAERLGAELGLSNLYLKDDSTNRPSLSYKDRVVGMAIARLLELGKDEVGCVSTGNVGTAVAALAAQAGARPYIFYPGNMEKGKAKACRGLGAQVIQLDANYDQANRACRELALTTGMEFANITLRPFYAEGAKTMGFEVVEELGWKAPDHFVIPAAGGTLSSRVHKGLLELEKVGLAETAGARINIAQASGCSPIASAITSGGEIEPQTPETAAHSLAIGAPGDGNLVVDAVRSRGGSAAAVSDEEIWEAIDLLGATEGILTEPAGGTTIASTARLAQAGKIGPDEVVVAVISGNGLKTLHEHPDKPWPEMVPCEVGAMEEMLNDFRRAATAALH

SEQ ID NO: 397 - protein, 437 aa, Unknown
  Description of Unknown: uncultivated organism sequence
  Category: MG37 effectors
  Description: MG37-149 effector
MSDAVDPHPGGPKGPRTDSCATELVCRDCGYRTPLLDTAFKCPACGEGLDIDYDYERAQTLIAERGLADRPQNIWRLEELLPIVSRRAQAKVGLFAGQTPLIRADRLGAELGLKNLYLKDDSTNRPTLSYKDRVVGMAIARLLELGKDEVGCVSTGNVGTAVAALAAKAGATAYIFYPGNMEKGKAKACRALGAQVCQLDGNYDQANRACRELSLASGIQFANITLRPFYAEGAKTMAFEVVEQLGWEAPDHFVIPAAGGTLSSRVHKGLNELETVGLAETAATKINIAQAGGCGPIAGAILGGGEIVPQTPDTAAHSLAIGDPGDGSLVVDAVRARGGSAAMPSDEEIFGAIDLLGATEGILTEPAGGTTIAATARLAAEGKLGAEETVVAVISGNGLKTLHEHPDKPWPEMVACDVETMGAMLAEFRQAAAAALH

SEQ ID NO: 398 - protein, 434 aa, Unknown
  Description of Unknown: uncultivated organism sequence
  Category: MG37 effectors
  Description: MG37-150 effector
MSDAHLGGPGGPRTSSCATELVCRDCGYRTPLLDTAFKCPACGEGLDIDYDYERAKSLIAERDLGDRPDNVWRFEELLPIVFKRAQDRVGQFSGQTPLIRADRLGAELGLKNLYLKDDSTNRPTLSYKDRVVSMAVARMLALGKDEIGCVSTGNVGTAVAALAAKAGATAYIFYPGNMEKGKAKACRALGAQVCQLDGNYDQANRACRELSLASGIEFANITLRPFYAEGAKTMAFEVVEQLGWEAPDHFVIPAAGGTLSSRVHKGLNELEIVGLAETGATKINIAQASGCGPIARAILDGGEIEPQTPDTAAHSIAFGAPGDGALVVDAVRTRGGSAATVSDAEIFGAIDLLGATEGILTEPAGGTTVAVTAKLAAEGKLGAEETVVAVISGNGLKTLQDHPEKQWPEMVACDLETMGATLADFRQTAAAAPR

SEQ ID NO: 399 - protein, 437 aa, Unknown
  Description of Unknown: uncultivated organism sequence
  Category: MG37 effectors
  Description: MG37-151 effector
MSDAVEPHLSEPYGLRTRSCATELTCRDCGYRTPLLDKAFKCPACGEGLDVDYDYDLAKERIAERGLAERPWNIWRFEELLPILNRRAQQRTAQFAGKTPLIHAERLGAELGLSNLYLKDDSTNRPSLSYKDRVVGMAIARLLELGKDEVGCVSTGNVGTAVAALAAQAGAEPYIFYPGNMEKGKAKACRAMGAQVIQLDANYDGANRACRELALATGMEFANITLRPFYAEGAKTMGFEVVEELDWNSPDHFVIPAAGGTLSSRVHKGLLELEKVGLAETAGTKINIAQAAGCSPIATAITGGGEIVTQTPETAAHSLAIGAPGDGNLVLDAVRSRGGSAAAVSDEEIWGAIDLLGQTEGILTEPAGGTTIASTARLAQEGKLGPDEVVVAVISGNGLKTLQEHPDKSWPEMVPCEVPAMEEILARLRQDAPTSVR

SEQ ID NO: 400 - protein, 430 aa, Unknown
  Description of Unknown: uncultivated organism sequence
  Category: MG37 effectors
  Description: MG37-152 effector
MTLRVAYARELVAGGHRPAVVARILRISRQAVYRVPRPRKPPDAARRPPVDDVERAIVEVAEANPTDGYRLVTAWVQRKLGRAVNRKRVLRVMRERKLIQRRTHEPKRRRPGFFMVTRPGELWHLDMTSIWLAEHGCVSTGNVGTAVASMAAAAGVDAYVFYPNRLEDMKARACMALGAKVCQVEGNYDEANRRCREVAETTGMDFANITLRPFYAEGAKTAAFEIVEQLDWRSPDHIITAAAGGTLSSRLHKGLLELQHLGLSETDPTRIHIAQPSGCNPIATAIIAEEAEVRPVTPETAAHSLAIGAPGDGYLVIDAVLKRGGTGGFASDPEIFAGIDLLAATEGLLTEPAGGTTVAVLEKLAAAGRFAPDDTVVAIITGNGLKTLDDHPPKPWPAKVDCELDAMLAALSELKSGGSLVDSAREQLHA

SEQ ID NO: 401 - protein, 1379 aa, Unknown
  Description of Unknown: uncultivated organism sequence
  Category: MG37 effectors
  Description: MG37-153 effector
MKKWGKRIISGVIAASLLTAAAISGSEQGTGTVASVVQAGTETSFMGKLLEGGYIDVFTSWTQEEQNKFYDGLSPQQQSVFLEVTNCQITRELIKSERSKEELEQFFDRLQPYFLILKKGNQEKPDDEIVIECINQIEGTDYHSSEQYIKQLVSEKKDHYLEFYDALKLVKDGKLEIESAVDDFYKELGFLKKDRVPANSAEVSRQPVQVQKKAAAKAVSDRYSNFKAVSSLKALKDAVASVKKGEKIAVRVDKGFNVTSVIRTNGRHVKIYADGESGHNLNRTAGYKDVMLEVNGGSLTLGAYDGDGRAKNNLYINGKNIAASAPLIEVTSGHLYLNKYSRIIDGYFLADFAGGAGIALNSGTSCYMFGGRIDNCRAKSSKDVSSSSPKSSHGGGVLVGNGSSFYMFAGSIEHCQAIHGGGIMNYGTLRLYGGAISDCAASNQKKDALGGAVKVQGAIETNGKVSSTKGDLGVWKYTRSAAWIVNGKDGYQQGTTTGVVLKNNQADAGGAICLNNGSNGAIQDCNINGNHSTGNGAGICLSNGSYKKGAALELKTGAVIHGNESKGYGGGIYCADSVKGSLSGGTMYDNSAKYGAGIYHEAEFRMSGGTVRSNHSGNSGGGIYAKGKLSMTGGEISANTAATYGGGAILKTVGGSVSGGSIKGNSASANGGGLQIDGTVSLSNASVSSNSASGKGGGISVSSSGTCNLSSGNVSGNTAKAGGGGIYIDGTCKANGSSFTGNQSSGDGGAVYIASGTFTTFQANQAVNIQGNSASGNGSGIYNRNITVLNNNAHILNNQCKNGTQRGIFHEGSLFSIEGNTEIQQEIYLAKDRFVTASNRYFSNSNSLKAKISLDTANIRNGYAVVKGNVSNSADGNYKTGEALLNNQSAGGRFVYAGSGYVMRPGNLKKSSSGCAPFSIVLSQAYQIRYDKNSKEEVMNMPTAAVKYWEEDIKLSALTPTGGSGAFVAWNTKADGTGDGYQPGNVYTANADATLFALWPHYRVEYLPGIRSAAGTTDSQEQNKSEDILLRKNGFRSSEGKFVGWKQDISSARKRMELEPVGYKELKEEREKGKLNHILDFAESYKKVNSSENLDNINSLLDVEDIFFMEGQWDSKPDIILNDKKTFLENEKIKKNDLLKVVKGCYDEEDGELTKKVQIIKLDYTKSMKGYRPETQNFSGGMNDTDVMDTYFMKLEKDETVEVKVTFQAEDSVGNVAEKEGTVCVTYNNPPKLHSQNLAFYQKDIDNNPQTILKEIFENYQVEDIEDDKKGLKVPVSVIDPIPLQIEKLNSVGEHKIVYQAIDSLGKKTKLDSTVYIAENNPFKDSYKYNVRFINKKYLYTLKESSKWKKNEELNAQLTSQLEKTKEDAELKYEFEIKK

SEQ ID NO: 402 - protein, 437 aa, Unknown
  Description of Unknown: uncultivated organism sequence
  Category: MG37 effectors
  Description: MG37-154 effector
MSPSSTPSSSQGTRRRTRSCATDLVCHRCEHRYPLTDTVFACPDCGKGLDILYDYELAARHFAEVPSSERPQNIWHFEELLPIVSASAQARVGRYAGFTPLIHADRLGAELGLSNLYLKDDSTSRPSLSYKDRVVAMSVARLLELGKGEIGCVSTGNVGTAVASLAAKAGVDAYVFYPNRLEDMKARACAALGAKVCQVEGNYDEANRRCREVAEATGMEFANITLRPFYAEGAKTAAFEIVEQLGWASPDHIVSPAAGGTLSSRLHKGLGELQLLGLSETEHTRIHIAQPSGCNPIATAIIAEEAEIHAITPETAAHSLAIGNPGDGYLVIDAVLKRGGTGGFASDPEIFAGIDLLASTEGILTEPAGGTTIAVLEKLAREGKFAPDETVVALVTGNGLKTLDEHPPKPWPEVDCELDAMLAALEGLGREPSPVAA

SEQ ID NO: 403 - protein, 438 aa, Unknown
  Description of Unknown: uncultivated organism sequence
  Category: MG37 effectors
  Description: MG37-155 effector
MSSSSTASTSQGSWTRTRSCATGLACHRCDRQYSLTDTVFACPDCGKGLDIVYDYELAARHFKEVPSAERPQNIWHFEELLPIVDASAQARVGRYAGYTPLIHADRLGAELGLSNLYLKDDSTSRPSLSYKDRVVSMSIARLLELGREEIGCVSTGNVGTAVASLAAKAGVDAYVFYPNRLEDTKARACAALGAKGCQGGGNYDEANRRCREVAAATGLEFANITLRPFYAEGAKTAAFEIVEQLDWQSPDHIVTAAAGGTLSSRLHKGLGELQLLGLAETDPTRIHIAQPSGCNPIATAILAEEAEVHPVTPETAAHSLAIGAPGDGYLVIDAVRKRGGTGGFASDPEIFAGIDLLAATEGLLTEPAGGTTIAVLEKLAGEGKFAPDDTVVAMITGNGLKTLDDHPEKPWPAKIACELDAMLAALEGLGRKPSPIAA

SEQ ID NO: 404 - protein, 437 aa, Unknown
  Description of Unknown: uncultivated organism sequence
  Category: MG37 effectors
  Description: MG37-156 effector
MSDAVDPHLTGPEGPRTRSCATELVCRDCGYRTPLLDTAFKCPACGEGLDVDYDYERAKEAINARGLEGRPGNVWRFEELLPITNLRAQQQVAQFAGKTPLIHAERLGAELGLSNLYLKDDSTNRPSLSYKDRVVGMAIARLLELGKDEVGCVSTGNVGTAVASLAAQAGARPYIFYPGNMEKGKAKACRAMGAQVIQLDANYDQANRACRELAITNGMEFANITLRPFYAEGAKTMAFEVVEELGWQAPDHFVIPAAGGTLSSRVHKGLVELETVGLAETAGSKINIAQASGCSPIATAIVGGGEIEPQMPETAAHSLAIGAPGDGTLVVDAVRSRGGSAATASDDEIWNAIDLLGATEGILTEPAGGTTIASTARLAQEGKIGPDETVVAVISGNGLKTLHEHPEKDWPEGVPCEVGAMEQILNDFRQAAATALH

SEQ ID NO: 405 - protein, 444 aa, Unknown
  Description of Unknown: uncultivated organism sequence
  Category: MG37 effectors
  Description: MG37-157 effector
MSLQTAPRAAQDSRQRTRSCATALVCHRCDNSYSLEESIFACPDCNKGLDVVYDYEHAAQHFRDVPSSERPQNIWHFEELLPIVDARAQARVGQHTGYTPLIRADRLGAEIGIANLYIKDDSSNRPSLSYKDRVVSMSVARLLERGGTEIGCVSTGNVGTAVASLAAKAGVDAYVFYPNRLEDTKARACMALGAKVCQVEGNYDEANKRCRELAEATGMDFANITLRPFYAEGAKTASFEIVEQLDWQAPDHIITAAAGGTLSSRLHKGLVELQLLELAETDSTRIHIAQPSGCNPIATAIVAEEAEIRAVTPETAAHSLAIGNPGDGYLVIDAVLKRGGTGGFASDPEIFAGIDLLAATEGLLTEPAGGTTIAVLEKLAASGRFGPDETVVAIITGNGLKTLDDHPPKPGPAKVDCELDAMEAALAELKQSGTLVDSARQLLH

SEQ ID NO: 406 - protein, 450 aa, Unknown
  Description of Unknown: uncultivated organism sequence
  Category: MG37 effectors
  Description: MG37-158 effector
MNAHRSRSAELGSAAAAPQQRTRSCATALTCARCAVEFPLEQRVFACPDCGKGLDIAYDYELARQRLQELPRAQRPANIWRFEELLPIRDARAQARVGRTAGCTPLIPADRLGAELGIANLYLKDDSTSRPSLSYKDRVVAMSIARLLELGEDEIGCVSTGNVGTAVASYASKAGVAAYVFYPNRLEDMKARACRALAAKVCQVEGNYDEANRRCRELAQTTGMEFANITLRPFYAEGAKTDAFEIVEQLDWRPPDHIITAAAGGTLSSRLHKGLRELQILELADTDATRIHIAQPSGCNPIASAILAEEAEIHPVTPETAAHSLAIGAPGDGYLVIDAVRKRGGTGGFASDPEIFAGIDLLAATEGILTEPAGGTTVAVLEKLAAAGRFGPDDTVVAIVTGNGLKTLDDHPAKPSPAKIECELDAMLAALEELRRGGEPTQSARERLPA

SEQ ID NO: 407 - protein, 447 aa, Unknown
  Description of Unknown: uncultivated organism sequence
  Category: MG37 effectors
  Description: MG37-159 effector
MNAHGSRSGELGSAVAAPQQRTRSCATALVCNRCAVEFPLEQRVFACPDCGKGLDIAYDYELARQRLQELPRAQRPANIWRFEELLPIVDATAQARVGRTAGYTPLIRADRLGSELGLSNLYLKDDSTSRPSLSYKDRVVAMSVARLLELGGEEIGCVSTGNVGTAVASYAAKAGVDAYVFYPNRLEDMKARACRALGANVCQVQGNYDEANRCCREVAAATGMDFANITLRPFYAEGAKTDAYEIVEQLDWQAPDHIVTAAAGGTLSSRLHKGLHELALLELAPTEGTRIHIAQPSGCNPIASAILAEEAEIQPVMPETAAHSLAIGAPGDGYLVIDAVRKRGGTGGLASDPEIFAGIDLLAATEGLLTEPAGGTTIAVLEKLAAAGRFAADDVIVAIVTGNGLKTLDDHPEKPWPAKIDCELDAMLAALAELRGAGRITAERMPA

SEQ ID NO: 408 - protein, 442 aa, Unknown
  Description of Unknown: uncultivated organism sequence
  Category: MG37 effectors
  Description: MG37-160 effector
MSPQTAQSPIRQRTRSCATGLACHRCGNHYPLESSVFACPDCGKGLDILYDYELAARHFLDVPAAERPHNIWHFEELLPIVDASAQAAVGTHSGYTPLIRADRLGAELGLGNLYLKDDSTSRPSLSYKDRVVSMSIARLLERGGSEIGCVSTGNVGTAVASLAAKAGVDAYVFYPNRLEDMKARACMALGAKVCQVEGNYDEANRRCRELAEATGMDFTNITLRPFYAEGAKTAAFEIVEQLGWQAPEHIITAAAGGTLSSRIHKGLIELQLLGLSETDSTRLHIAQPSGCNPIASAIVAEEAEVHPVVPETAAHSLAIGAPGDGYLVIDAVLKRGGSGGYATDPEIFAGIDLLAATEGLLTEPAGGTTIAVLEKMAAAGTFDTDETVVAIITGNGLKTLDDHPAKPWPAKVACERDAMMAALEQLKEGPSLTESARGRLNI

SEQ ID NO: 409 - protein, 437 aa, Unknown
  Description of Unknown: uncultivated organism sequence
  Category: MG37 effectors
  Description: MG37-162 effector
MSDAVDPHRTEPYGLRTDSCATELTCRDCGYRTPLLDKAFKCPACGEGLDVDYDYDLAKKRISERGLDERPWNIWRFEELLPILNRRAQQRVAQFAGKTPLIHAERLGAELGLSNLYIKDDSTNRPSLSYKDRVVGMAIARLLELGKDEVGCVSTGNVGTAVAALAAQAGARPYIFYPGNMEKGKAKACRAMGAQVIQLDANYDGANRACRELALATGMEFANITLRPFYAEGAKTMAFEVVEELGWQPPDHFVIPAAGGTLSSRVHKGLLELEKVGLAETAGAKIDIAQASGCSPISTAILEGGELVPQTPETAAHSIAIGAPGDGALVVDAVRSRNGSAAMVSDEEIFGAIDLLGATEGILTEPAGGTTIASTARLAQEGKIGPDETVVAVISGNGLKTLHEHPEKTWPEGVPCEVGAMEEVLNDFRRAVAAAPH

SEQ ID NO: 410 - protein, 444 aa, Unknown
  Description of Unknown: uncultivated organism sequence
  Category: MG37 effectors
  Description: MG37-163 effector
MSPSSTASPQGTRQRTRSCATDLVCHRCDHRYPLTDTVFACPDCGKGLDIVYDYELAASHFRDFPSSERPQNIWHFEELLPILDASAQARVGQHSGYTPLIRADRLGAELGVNNLYLKDDSSNRPSLSYKDRVVSMSVARLLERGKTEIGCVSTGNVGTAVASMAATAGVDAFIFYPNRLEETKARVCMALGAKVVQVEGNYDEANRRCREVAAETGMDFANITLRPFYAEGAKTAAFEIVEQLQWASPDHIVSPAAGGTLSSRMHKGLGELQLLGLAETEATQIHIAQPSGCNPIASAILAEEAEVHPVMPETAAHSLAIGAPGDGYLVIDAVHKRGGTAAFASDPEIFAGIDLLAATEGLLTEPAGGTTIAVLEKLAAAGRFAPEDTVVALITGNGLKTLDEHPPKAWPAKIDCELESMLEALDELKRTPTLMQTAHEQLRA

SEQ ID NO: 411 - protein, 437 aa, Unknown
  Description of Unknown: uncultivated organism sequence
  Category: MG37 effectors
  Description: MG37-164 effector
MSDAVDPHRTEPYGLRTRSCATELNCRECGYRTPLLDKAFKCPACGEGLDVDYDYELARERIAERSHDERPWNIWRFEELLPILNRRAQERVAQFAGKTPLIHAERLGAELGLSNLYLKDDSTNRPSLSYKDRVVGMAIARLLELGKKEVGCVSTGNVGTAVAALAAQAGARPYIFDPGNMEKGKAKACRAMGAQVIQLDANYDQANRACRELALATGMEFANITLRPFYAEGAKTMAFEVVEELGWKAPDHFVIPAAGGTLSSRVHKGLVELETVGLAETAAAKINIAQASGCSPIATAITGGGEIVTQTPETAAHSLAIGAPGDGNLVVDAVRSRDGSAATASDEEIWSAIDLLGTTEGILTEPAGGTTIASTARLAQEGKIGPDDVVVAIISGNGLKTLQEHPDKPWPEMVTCEVGPMEEILNDFRQAAAAALH

SEQ ID NO: 412 - protein, 430 aa, Unknown
  Description of Unknown: uncultivated organism sequence
  Category: MG37 effectors
  Description: MG37-165 effector
MSPFAEETRSCATELVCRDCGQRLPLMDTTFKCLGCGQGLDIDYDYELAKARLGELPMSEREINIWRFEELLPILDARAQRRVGFYSGRTPLIHADRLGAELGLRKLYLKDDSTQRPSLSYKDRVVSMAVARLLELGKEEIGCVSTGNVGTAVASLAAKAGVTAYVFYPSNLEPGKARTCRALGAAVIQLDGNYDQANRACRELALASGVQFANITLRPFYAEGAKTVAYEVVEKLDWISPDHFVIPAAGGTLSSRVHKGLQELEKVGLSETAATKIHAAQPDGCGPIAGAILDGSGEIQPQTPHTAAHSLAIGAPGDGPLVVDAVMSRGGSAATVTDEEIFEAIDLLGATEGILTEPAGGTTVASTAKLAAEGKFGPDETVVAVISGNGYKTLDEHPEKPWPSMVSCDVESMGEMLAEFRQHGVGATLS

SEQ ID NO: 413 - protein, 430 aa, Unknown
  Description of Unknown: uncultivated organism sequence
  Category: MG37 effectors
  Description: MG37-166 effector
MLNGEDRTRSCATELVCRDCGRRLPLLDTTFKCLGCGQGLDVDYDYEMATARLAELPPAERPLNIWRFEELLPILDGRAQARVGRNSGRTPLIHADRLGAELGLRNLYLKDDSTARPSLSYKDRVVSMAVARLLELGKEEIGCVSTGNVGTAVASLAAKAGVTAYVFYPSNLEKGKARACRALGAAVCQLDGNYDEANRACRELALTSGIQFANITLRPFYAEGAKTVAYEVVEQLDWRSPDHFVIPAAGGTLSSRVHKGLTELEKVGLAETGATKISVAQADGCGPIAGAILDGSGEIEPQTPHTAAHSLAIGAPGDGPLVVDAVLSRGGSAATATDAEIFDAIDLLGATEGILTEPAGGTTVAATMKLAGEGKLRPDDTVVAVISGNGYKTLDEHPDKPWPEMVACDVESMGEMLAEFRQHGVGAALT

SEQ ID NO: 414 - protein, 445 aa, Unknown
  Description of Unknown: uncultivated organism sequence
  Category: MG37 effectors
  Description: MG37-167 effector
MSSSSTTASSQGTRQRTRSCATELVCHRCDHRYPLTDTVFACPDCGKGLDIAYDYELAGTHFRDFPISERPQNIWHFEELLPILDANAQARVGQYSGYTPLIRADRLGAELGLNNLYLKDDSTSRPSLSYKDRVVSMSVARLLERGKTEIGCVSTGNVGTAVASMAAKAGVDAFIFYPNRLEEMKARACMALGAKVVQVEGNYDEANRRCREVAAETGMDFANITLRPFYAEGAKTAAFEIVEQLQWASPDHIVSPAAGGTLSSRMHKGLGELQLLGLSETEGTQIHIAQPSGCNPIASAILAEEAEVVPVMPETAAHSLAIGAPGDGYLVIDAVHKRGGTAAFASDPEIFAGIDLLAATEGLLTEPAGGTTIAVLEKLAAAGRFAPEDTVVALITGNGLKTLDEHPSKAWPAKIDCELDPMLGALAELKRTPTLMQTAREQLRA

SEQ ID NO: 415 - protein, 437 aa, Unknown
  Description of Unknown: uncultivated organism sequence
  Category: MG37 effectors
  Description: MG37-168 effector
MSDAVEPHQGEAVGPRTTSCATELVCRDCGYRTPLLDTAFKCPACGEGLDIDYDYERATSLIAERGLADRPDNIWRFEELLPILSQRAQAKVGQFAGQTPLIKADRLGAELGLKNLYLKDDSTNRPSLSYKDRVVSMAVARMLALGKNEIGCVSTGNVGTAVAALAAKAGATAYNFYPRNMEKGKAKACRALGAQVCQLDGNYDQANRACRELSLASGIEFANITLRPFYAEGAKTMAFEVVEQLDWAAPDHFVIPAAGGTLSSRVHKGLNELEIVGLAETAGTKINIAQASGCGPIATAILGGGEIEPQTPDTAAHSIAIGAPGDGALVLDAVRTRGGSAATASDAEIFAAIDLLGATEGILTEPAGGTTVAATARLAAEGKIGADDTVVAVISGNGLKTLQDHPEKQWPEMVSCDVETMGELLAEFRQTAAAALR

SEQ ID NO: 416 - protein, 430 aa, Unknown
  Description of Unknown: uncultivated organism sequence
  Category: MG37 effectors
  Description: MG37-169 effector
MSLPADQRTRSCATELVCPDCGIGLPLSDTTFRCPDCDKGLDVVYDYELARQRIAEIGPAQRPQNIWRYEELLPIVDRAASERVGAFAGQTPLIRADRLGAELGLRNLYVKDDSTNRPSLSYKDRVVSMAVARAIELGCTEIGCVSTGNVGTATAALANKAGLTPYIFYPANLERAKARSCRALGAEVCQLNGNYDQANKACRELAEASGMQFANITLRPFYSEGAKTLAYEVVEQLDWVSPDHIVMPAAGGTLSSRVHKGLNELEAVGLAQTAHTRAHIGQPSGCSPIATAIVEDAAEIVHQVPETLAQSLAIGAPGDGPLVVDAVRSRRGSAAAVPDGEIITAMELLAATEGVLTEPAGGTTLAATMKLAQQGVIRPDDTVVVVISGNGLKTLSEQPVRPWPERIPCDPAAMEEVVRGFRRSGVGAAL

SEQ ID NO: 417 - protein, 445 aa, Unknown
  Description of Unknown: uncultivated organism sequence
  Category: MG37 effectors
  Description: MG37-170 effector
MSTVTSQKRAPEPARRTRSCAKALACHRCDLEYPLQERVFACPQCAKGLDVIYDYELAARRFEEVPREARPHNIWHFEELLPIVDAAAQARVGLTAGYTPLIAANRLGAELGLSNLYLKDDSTSRPSLSYKDRVVAMSVARLLELGEQEMGCVSTGNVGTAVASYAAKAGVDAYVFYPNRLEDTKARACRALGAKVCQVEGNYDEANRRCREVAEATGLEFANITLRPFYAEGAKTSAFEICEQLDWRAPDHIVTAAAGGTLSSRMHKGLRELAQLGLADTDPTRIHIAQPSGCNPIASAIIAEEAEIRAVTPETAAHSLAIGAPGDGYLVIDAVLKRGGTGGFASDPEIFAGIDLLAATEGILTEPAGGTTIAVLEKLAAAGRFGADESVVAIVTGNGLKTLDDHPEKPWPAKIDCELDAMLAALEDLRRGGSPSASERERLPA

SEQ ID NO: 418 - protein, 445 aa, Unknown
  Description of Unknown: uncultivated organism sequence
  Category: MG37 effectors
  Description: MG37-171 effector
MSPSSTASPQGTRKRTRSCATDLVCHRCEHRYPLNDTVFACPDCGKGLDIAYDYELAASHFRASPSSERPQNIWHFEELLPILDASAQARVGQHSGYTPLIRADRLGAELGLSNLYLKDDSSNRPSLSYKDRVVSMSLARLLERGKTEIGCVSTGNVGTAVASMAAKAGVDAFIFYPNRLEEMKARACMALGAQVVQVQGNYDEANRRCREVAAETGMDFANITLRPFYAEGAKTAAFEIVEQLQWASPDHIVSPAAGGTLSSRMHKGLGELQLLGLSETDATQIHIAQPSGCNPIASAILAEEAEVHPVMPETAAHSLAIGAPGDGYLVIDAVHKRGGTAAFASDPEIFAGIDLLAATEGLLTEPAGGTTIAVLEKLAAAGRFAPEDTVVALITGNGLKTTDCLQDAYEQNKAIRPRLTDFENFVEERNAVNEALRLVGESYVR

SEQ ID NO: 419 - protein, 445 aa, Unknown
  Description of Unknown: uncultivated organism sequence
  Category: MG37 effectors
  Description: MG37-172 effector
MSTPTAQSPHQGSRQRTRSCATGLVCHRCGHSYPLEDTVFACPDCGKGLDVEYDYELAARRFEEVPRSQRPQNIWRFEELLPIVDATAQARVAQHAGWTPLIRADRLGAELGLANLYLKDDSTSRPSLSYKDRVVSMSVARLLEKGKQEIGCVSTGNVGTAVASMAAKAGVDAYVFYPNRLEDMKARACRALGAKVCQVEGNYDEANKRCREVALATGMDFANITLRPFYAEGAKTAAFEIVGQLEWQAPEHIITAAAGGTLSSRLHKGLGELQLLGLAETDPTRIHIAQPSGCNPIASAILAEEAEVHAVTPETAAHSLAIGAPGDGYLVIDAVLKRGGTAGFASDPEIFAGIDLLAATEGLLTEPAGGTTIAVLEKLAAAGRFDPGDTVVAIITGNGLKTLDDHPAKPWPDKIDCELDAMLEALATLKGSGSLVDDAREQLQA

SEQ ID NO: 420 - protein, 358 aa, Unknown
  Description of Unknown: uncultivated organism sequence
  Category: MG37 effectors
  Description: MG37-173 effector
MSEAVDPRLGGPGGPRTSSCATELVCRECGYRAPLSDTAFRCPTCDAGLDVDYDYERAKASIAARGLAERPWNIWRFEELLPIAGRRAAGTVAQFAGQTPLIPARRLGAELGLRNLYVKDDSTNRPSLSYKDRVVGMAVARALELGAGEIGCVSTGNVGTATASLAAAAGLKPYVFYPANLERAKARGCRALGAQVCQVDGNYDEANRACRELTEATGIPFANISLRPFYAEGAKTLAYELVEGLGWRSPDHVVMPAAGGTLSSRVHKGLLEFEILDLAETAATKLHVGQPTGCSPIVTTIVAGAKETVPQQPETLAHSLAIGAPGDGDLVVEAVRSRGGSAAAVPDGRSPLTTSSSS

SEQ ID NO: 421 - protein, 439 aa, Unknown
  Description of Unknown: uncultivated organism sequence
  Category: MG37 effectors
  Description: MG37-174 effector
MSDAADPHLGEAIGPRTSSCATELVCRDCGYRTPLLDTAFKCPACGEGLDIDYDYERAKSLIAKRGLAERPDNIWRFEELLPILSQRAQGMVGQFSGQTPLIKADRLGAELGLKNLYLKDDSTNRPTLSYKDRVVSMAIARMLALGKDEIGCVSTGNVGTAVAALAAKAGAMAYIFYPGNMEKGKAKACRALGAQVCQLDGNYDEANRACRELSLASGIEFANITLRPFYAEGAKTVAYEVVEKLDWVSPDHFVIPAAGGTLSSRVHKGLVELEKVGLSETAQTKIHAAQADGCGPIAAAILDGSGEIEPQTPHTAAHSLAIGAPGDGPLVVDAVMSRGGSAATASDPEIFEALDLLGATEGILTEPAGGTTVASTAKLAAEGKLGPDDTVVAVISGNGYKTLDEHPEKPWPSMVSCDVESMGVMLAEFRQHGAGATLS

SEQ ID NO: 422 - protein, 444 aa, Unknown
  Description of Unknown: uncultivated organism sequence
  Category: MG37 effectors
  Description: MG37-175 effector
MSTQTAHPTAGPRQRTRSCATGLVCHRCEHSYPLESTVFACPDCGKGLDIVYDYELAASHFRDVPSSERPQNIWHFEELLPIVDASAQARVGQHSGYTPLIRADRLGAELGLSNLYLKDDSSNRPSLSYKDRVVSMSVARLLERGETEMGCVSTGNVGTAVASLAAKAGVAAYVFYPNALEDTKARACMALGAKVCQVEGNYDEANKRCRELAEATGMDFANITLRPFYAEGAKTAAFEIVEQLDWQSPDHIITAAAGGTLSSRLHKGLVELQLLELAETDPTRIHIAQPSGCNPIATAIVAEEAEIHAVTPETAAHSLAIGNPGDGYLVIDAVLKRGGTGGFASDPEIFAGIDLLAATEGLLTEPAGGTTIAVLEKLAASGRFAPDDTVVAIITGNGLKTLDDHPRKPWPAKVDCELDAMMAALSELKSGGTLVESAREQLRF

SEQ ID NO: 423 - protein, 388 aa, Unknown
  Description of Unknown: uncultivated organism sequence
  Category: MG37 effectors
  Description: MG37-176 effector
MLLHADVRERLGEIPPAEREINIWRFEELLPIVDAKAQARVGRYSGRTPLIHADRLGAELGLKKLYLKDDSTSRPSLSYKDRVVSMAVARLLELGEDEIGCVSTGNVGTAVSSLASKAGVRAYVFYPSNMERGKARACRALGAAVCQLDGNYDEANRACRELALASGIQFANITLRPFYAEGAKTVAYEVVEQLEWEAPDHIVIPAAGGTLSSRVHKGLDELETVGLAETSGVKIDVAQAEGCSPIATAISDGSGRIEPQTPHTAAHSIAIGAPGDGRLVVDAVMSRGGSAATASDQEIFEAIDLLGATEGILTEPAGGTTIACTARLANEGKLGPEDTVVAIVSGNGYKTLDEHPDKPWAEGVACDVDAMSEMLEEFRQHGVGATLG

SEQ ID NO: 424 - protein, 445 aa, Unknown
  Description of Unknown: uncultivated organism sequence
  Category: MG37 effectors
  Description: MG37-177 effector
MSTHTAESPARGARQRTRSCATGLACHRCQHSYELADTVFACPDCGKGLDVVYDYELAARHFRDFPSSERPRNIWHFEELLPIVDAGAQARVGQHSGYTPLIRAERLGAELGLSNLYLKDDSTSRPSLSYKDRVVSMSVARLLERGKREIGCVSTGNVGTAVASLAATAGVDAYVVYPNRLEDMKARACRALGAKVFQVEGNYDEANRRCRELAEATGMDFANITLRPFYAEGAKTAAFEIVEQLGWQAPDHIVTAAAGGTLSSRLHKGLGELQLLGLSQTDPTRIHIAQPSGCNPIASAILAEEAEVHPVTPETAAHSLAIGAPGDGYLVVDAVRKRGGTGGFATDPEIFAGIDLLAATEGILTEPAGGTTIAVLEKLAAAGRFAPDDTVVAIVTGNGLKTLDDHPQKPWPDKVDCELDAMLAALAELKSGGTLMDTAREQLHA

SEQ ID NO: 425 - protein, 1341 aa, Unknown
  Description of Unknown: uncultivated organism sequence
  Category: MG37 effectors
  Description: MG37-178 effector
MKKWGKRIISGVIVASLLTAAAISGSEQGTATVSSVVQAGTETSFMGKLLEGGYIDVFTSWTQEEQNKFYDRLSPKEKSVFLEVTNCQIIRELIKSERTKEELERFFDRLEPYFLMLKKGSQEKPDEEIVIECINQIEGKDYESLEQYLKQLVSEKHGYYLDFYTALKRVKDGKSEIESAVNDLYKNLGFLKEDKVPAKPDKVSPLPVQVQKKAAKAVSDGYSNFKAVSSLKALKDAVASVEKGEKIAVRVDKGFNVTSAIRTNGRHVKIYADGESAHNLNRAVGYKDAMLEVNGGSLTLGAYDGDGRAKNNLYINGKNVAASAPMIEVTSGQLYLNKYSRIIDGYFLADFAGGAGIAMNSGTSCYMFGGKIDSCRAKSSKDVSSSSPKSSHGGGVLVGNGASFYMFAGSIEHCQAIHGGGIMNYGTLRLYGGTVSDCAASNKKKDALGGAVKVQGAIETDGKVNSTKGDLGVWKYTRSGTWAVNGKDGYQQKSTTGVVLKNNQADAGGAVCLNNGSNGAIQDCNIYGNHSNGNGAGICLSNGSYKKGAALEIKTGAVIHGNESKGYGGGIYCADSVKGSLRGGSMYDNSAVYGAGVYHEAEFRMTGGTVRNNHSGNSGGGIYAKGKLSMTGGEISSNTAATYGGGAILKNAGGSLSGGSIKNNTASVNGGGLQIDGAVSFSNVSVSSNSASGKGGGISVSSAGTCSFSSGNVSGNTSKAGGGGIYIDGTCKANGSNFTGNQSYGDGGAVYIASGTFTTFQANQAVNIQGNSASGNGSGIYNRNTAILNNNAHILNNQCKNGTQRGIFHEGSLFSIEGHTEIQQEIYLAKDRFITVSNRYFSNSNSLTARISLDAANIRNGYAAVKGNISNSADSNYKTGDALLNNQSVNGRFMYAGSGYVMRPGNLKKSSSGCVPYSIVLSQAYQIRYDKNSKEEVMNMPTAAVKYWEEDIRLSALTPSGGSGVFVAWNTNADGTGDGYQPGNVYTANADATLFALWPHYRVEYLPGIQGAAGTTDSQEQNKSENILLRKNSFRSSEGKFIGWKQDISSARKRRELEPVGYKELKEERERGKSDHILAFAKSYKKVNASVNLDNKNSLLNAEDIFFMEGQWDSKPDIILHDKKTFLENEKIRKNDLLKAVKGCYDDEDGDLTEKVQIIKLDYGTSMEGYRPEPQNFSGGMNDTDVIDTYFMKLEKDETVEVKVIFQVEDSVGNVAEKEGTVYVTYNNPPKLHSQNLAFYQKDLDNNPQTVLKEILENYQVEDLEDDKSGLKVPVSVVDPIPMQIEKLNSVGEHKIVYQAIDSLGKKTKLDSTVYIAENNPFKDSYKYLSLIHISEPTRPY

SEQ ID NO: 426 - protein, 438 aa, Unknown
  Description of Unknown: uncultivated organism sequence
  Category: MG37 effectors
  Description: MG37-179 effector
MSPSTTSSSTQGARKLTRSCATGLICHRCDRRYPLTDAVFACPDCGKGLDIAYDYERAARHFKEVPSSERPQNIWHFEELLPIVDASAQARVGRYAGYTPLIHADRLGAELGLSNLYLKDDSTSRPSLSYKDRVVSMSVARLLELGKDEIGCVSTGNVGTAVASLAAKAGVDAYVFYPNRLEDMKARACRALGAKVCQVEGNYDEANRRCREVAEATGLEFANITLRPFYAEGAKTAAFEIVEQLDWQSPDHIVTAAAGGTLSSRLHKGLGELQLLGLSETDPTRIHIAQPSGCNPIATAILAEEAEIHAVMPETAAHSLAIGNPGDGYLVIDAVRKRGGTGGFASDPEIFAGIDLLAATEGLLTEPAGGTTIAVLEKLAREGKFAPDDTVVAIVTGNGLKTLDEHPAKPWPAKVDCELAAMLAALDGLGRKPSPVAA

SEQ ID NO: 427 - protein, 1004 aa, Unknown
  Description of Unknown: uncultivated organism sequence
  Category: MG53 effectors
  Description: MG53-1 effector
MNRSFTARLSAKTPRRLRDYLWATHRIFNESLAYVLKHYFWMQNLNDRTAEQDRRNRLRNRFDDAQLDRLRMIYRDMMGLDLPKEKRAGRSQSAHAWMEPITFSTESKGSGPGESSKNLLPQVKEAIRQIRRRNTWLFDRELAFPLSPNKGFRRGLFEAAARRILNFEQNQDTHKSYLEEARSQYERWTGGEQRDVTDEEGADERRAGWRRTVLLRAWGKEQNAQREAEIDEIARLNWSDFERARVAFEAYEQERSEKRAREHGQQFDGTKVERINAAMTRGWRDIYERLMPPDAQGAPDRTTAEEVIKGYQMSEPRRIGDVNFFLWLADKPHLWRYVDTMRAYNTHQRKLQQYAKDIQFRYPRYNVRPDWFTFSETSPGYMYTIVSMSPLVVELSVLVPKEDEPILKKHAKGKPLTEDEQARLSQPIDWSTYHLTREALANRLDRYREDLTKKHADLIAKANLGPVHDWTNGMWQQLLDGFFRGDPPLDMARFTRVMVRYALSTDRRLRPFVPQPSEDSDLIGRLEVLSNERKKRHYQGTYEYWFGPLAEARGLLVERRRYLRRIPLTVGGIRLEYRGRLRSDAEPIFTLSCELDERLNGPEGKRVFPAPAHRIPPKSDTAETAEGSAASAANKRRISKKRPKMPVGLRVMAVDLGLRHPGTGAVVEFVDDGHGHGRLPEPLKPVAVEILDVAGTSLVHIQRHQDERRRKQKKACPRGSRRRFEIRGAHLAHGQEFARGLLNHVENLKDDRRKKAAHTILRAALKHKVDYIVFENLAGYRPEMEFGRKVNAALMTWNRRELVEFVKMEAAPLGIHVYEWVPPHHTSRFCHRCGAVGHRFSHIRSIDAKKDALAPAEPLLDNAGNPKLDSYGKPILRRKWTPQARRVRGTPLGLIAGMRQAIDGGRQFCCTECGLIVNADYNAAMNLARKLADEFHAYQRYAYDREKRTWTVNGETLPGRDFWERAKALVQQRLNQRFRQPPETPPAGGWPRSLEPSPIEPTPW

SEQ ID NO: 428 - protein, 1005 aa, Unknown
  Description of Unknown: uncultivated organism sequence
  Category: MG53 effectors
  Description: MG53-2 effector
MNRSFTARLSRKTHRRLRDYLWATHRIFNESLAYLLKHYFWMQNLTDRELEQDKKNRLRQRFDAAQLDQLQLIYRDMMGLDLPKEKRAGRSQSAQAWMEPITFSTRSTGKGPGELSTNILPKVKVAIRTMRQQNLWVFDRELAFPIEPHNGFRRGLFGGAARRILNFEQNQETHRGYLEDAKRAYERWRGGQAREAAEDDTVDARRAGWRRTVLLRAWGEGQEPNREAEIDGIAQLQWADFQRAREEFSQYESQRAADRAREQKRPVTENAVEKINAAMTRGWRDVYQQRLMPPDADGPPDAATAGRLIKDYQAAEPTRIGDINFFLWLADKPHLWRFVDTMKAYNAHQRKLERYGRPIQFTYPRYNRRPEWFTFSETSPGHMYTIVSMTPLKVDLAVFVPNEDVPLLEKLSKGQPLTGEETRRLNEPLDWTAYRLTPERLVERRNAHRTKLTERIPDAIAKYGLDAVHAWTDGVWERLLGGFFREDPPLDMSRFTRVMVRYSLSTDVRLRPFAPEPASEEDLLGRLVVRSNDRQKPHWQGTYQYMFGPLTEPNDSLPDRRRHLRAMPMVVGGIRLEYRDCLRNDADPIFTLSCELDERVAGPEGKQVYPAPQHRIPKKAQPTEAAEEGTPQEGKKRKDAKKRPKMPVGLRVLSVDLGMRHIGTGAVVEFVDDGHGNGRLPHPLKPVGIEFLDAPGIALRHIDRHSDERRRKQRKACPRGSRRAFEIRGAHLPRGQVFARHLLDHTENLKDDRRKKAAHAILRAALKHNVDYIVFENLKGYRPDFEFGRRVNATLMKWNRRELVEFVKMEAQPFGIWVYDFVRPSHTSQFCHRCGAAGYRFSQITRREAAFDTPAPKEPLFDEHGNRKLDSNGKPLFRHRWTPQARRIRGTPLGLIAGMRQAIDGGKHFCCSECGLIVNADYNAAMNLARKLADDFSAYQKYSYNPEDKSWALSGKRMAGKTFWEHIKATVQQRLNTRFGQPVQTPPAGGWPKEFAPESIGLTPW

SEQ ID NO: 429 - protein, 784 aa, Unknown
  Description of Unknown: uncultivated organism sequence
  Category: MG54 effectors
  Description: MG54-1 effector
MGVRALRARIECDRETLLHLWRTHCAFNQRLLSILTKLFGMRRGELGETAARRALYQRVARFLLARDSKDAPYLLNSVSIQGWKPATALKMKVRMPAPDGTLAEVSADTWAPEAAKLSAHGTLAYDKEAVRDGLPDSLFQPMLRDAVAYISGHIELARNWEAEHADWLKAKAEWEEKDEHKKYLALRPRFDAFEQSVGGKAGKRRERWHLYLTWLRENPALAAWRGGPPAVHPLDAKATARVAKAKPWKKRSVEADEFWKANPELRELDKLHGYYEREFVRRRKTKKNPDGFDHRPTFTLPHAVLHPRWTLFNAPQTSPQGYADLRLPQRPGTLGSVKLRLLTGEKAPDGCPNEWVGVQFRADPRLSQFAERAEAQEIRKGKKKGTQKTVRVFRFVDQQLNCERPAQISGAKLIFKNVKLNDDGSLKSATPYLVFACTIDNLPLTEHARAIQWSETGEVTKTGKKRKAKKLPTGLVTCAVDLGLRNLAFLTLATSGEGPQNNTHDGIRVLRSRNQWLALEETAGTHPGRWSAGPDLAHIAAHKREIRRLRRLRGKPVKGQQSHVELQGHIDHMGQDRFKKAARAIVNFALNVDRAAGQSGQPYPRADLLIVEKLEGFIPDAARERGINRALVAWNRGQLVTRIKEVAADAGLKLFPVHPAGTSQCCSRCGALGRRYSIVRDQQTGVPAIRFGWVEKLFACPNRECPGRAPDKPDQPFTCNADHNASLNLHRRFVLDDRAVAAFFAWKNKTNAERERELTQMDQALRPELEKLHRLPLAELATPF

SEQ ID NO: 430 - protein, 784 aa, Unknown
  Description of Unknown: uncultivated organism sequence
  Category: MG54 effectors
  Description: MG54-2 effector
MGVRALRARIECDRETLLHLWRTHCAFNQRLLSILTKLFGMRRGELGETAARRALYQRVARFLLARDSKDAPYLLNSVSIQGWKPATALKMKVRMPAPDGTLAEVSADTWAPEAAKLSAHGTLAYDKEAVRDGLPDSLFQPMLRDAVAYISGHIELARNWEAEHADWLKAKAEWEEKDEHKKYLALRPRFDAFEQSVGGKAGKRRERWHLYLTWLRENPALAAWRGGPPAVHPLDAKATARVAKAKPWKKRSVEADEFWKANPELRELDKLHGYYEREFVRRRKTKKNPDGFDHRPTFTLPHAVLHPRWTLFNAPQTSPQGYADLRLPQRPGTLGSVKLRLLTGEKAPDGCPNEWVGVQFRADPRLSQFAERAEAQEIRKGKKKGTQKTVRVFRFVDQQLNCERPAQISGAKLIFKNVKLNDDGSLKSATPYLVFACTIDNLPLTEHARAIQWSETGEVTKTGKKRKAKKLPTGLVTCAVDLGLRNLAFLTLATSGEGPQNNTHDGIRVLRSRNQWLALEETAGTHPGRWSAGPDLAHIAAHKREIRRLRRLRGKPVKGQQSHVELQGHIDHMGQDRFKKAARAIVNFALNVDRAAGQSGQPYPRADLLIVEKLEGFIPDAARERGINRALVAWNRGQLVTRIKEVAADAGLKLFPVHPAGTSQCCSRCGALGRRYSIVRDQQTGVPAIRFGWVEKLFACPNRECPGRAPDKPDQPFTCNADHNASLNLLRRFVLDDRAVAAFFAWKNKTNAERERELTQMDQALRPELEKLHRLPLAELATPF

SEQ ID NO: 431 - protein, 783 aa, Unknown
  Description of Unknown: uncultivated organism sequence
  Category: MG55 effectors
  Description: MG55-2 effector
GCKLMYELKHRIIDRLEQMFSFKTRGEWFREGVCPQCGKKELYTHAHNPRIVKCGRLNKCGYEEHVKDICEDLFKDWSKEFPKTEAKPHAAADAYLEHGRGFDLTKLKGRFTQEAFHNEQKFPGQVSATVRFELAPGVYWERLIDRPERFGRQKANFKGKYEGLSWTMWQLDDLCHAESIWITEGIFNSIALTLSGVPSIATMSSGNYPVKLLQQITDRCHELKKDKPRLCWAYDNDKEGRKKLKKFHLRALQEKWSSTAALPPNQIKGRSFDWNDLYMHDLLHSEERKKYRHYGELLIAESAEQAGLLIYNFKEGRTRTFFFNHEFRLYYFNLDIDKYNKALDIIEKNENLNHLLDEQKREQALRDSASCTEICNRQIKPLYFQRNEITDEHWYYAQIVSEDTEVNTTFTSSMIRNSDKFAERLLGVNEGAWWTGSTNQLVSYMKPRTEFIKRVKTIDYIGYTKEDKAWLFNDYAVHDGQIIPINEHDYFRIKRLDIKTLSNDPQIQLNPKAKFNPTWWKDFYRVRGNKGIVALAWWMGTYFAEQIRGLNSSYPFMEIVGQAGAGKSRLIEFMWKLSGRKDYEGFDPNKSTSVAVYRNFAKISNLPVVLIEGDRNDINGNAIQKAKFSWDELKDAFNGRAIRSKGVKNAGNDTYEPPFRGAILISQNTQIQASEAILTRTLLLEFDRSGQSLETKRIVDELDRMELEDACTFMTHCLRNEDKILETYASKLQSIEDHYHEIGITHTRIALCHAQVAALIEAMTKHVLPIDLEDMLEAQEMLE

SEQ ID NO: 432 - protein, 788 aa, Unknown
  Description of Unknown: uncultivated organism sequence
  Category: MG55 effectors
  Description: MG55-3 effector
GEWFREGVCPQCGKKELYTHAHNPRIVKCGRLNKCGYEEHVKDICEDLFKDWSKEFPKTEAKPHAAADAYLEHGRGFDLTKLKGRFTQEAFHNEQKFPGQVSATVRFELAPGVYWERLIDRPERFGRQKANFKGKYEGLSWTMWQLDDLCHAESIWITEGIFNSIALTLSGVPSIATMSSGNYPVKLLQQITDRCHELKKDKPRLCWAYDNDKEGRKKLKKFHLRALQEKWSSTAALPPNQIKGRSFDWNDLYMHDLLHSEERKKYRHYGELLIAESAEQAGLLIYNFKEGRTRTFFFNHEFRLYYFNLDIDKYNKALDIIEKNENLNHLLDEQKREQALRDSASCTEICNRQIKPLYFQRNEITDEHWYYAQIVSEDTEVNTTFTSSMIRNSDKFAERLLGVNEGAWWTGSTNQLVSYMKPRTEFIKRVKTIDYIGYTKEDKAWLFNDYAVHDGQIIPINEHDYFRIKRLDIKTLSNDPQIQLNPKAKFNPTWWKDFYRVRGNKGIVALAWWMGTYFAEQIRGLNSSYPFMEIVGQAGAGKSRLIEFMWKLSGRKDYEGFDPNKSTSVAVYRNFAKISNLPVVLIEGDRNDINGNAIQKAKFSWDELKDAFNGRAIRSKGVKNAGNDTYEPPFRGAILISQNTQIQASEAILTRTLLLEFDRSGQSLETKRIVDELDRMELEDACTFMTHCLRNEDKILETYASKLQSIYDHYHEIGITHTRIALCHAQVAALIEAMTKHVLPIDLEDMLEAQDMLEDMARERVAQLTGDHPDEEKFWDAYEYLQGN

SEQ ID NO: 433 - protein, 909 aa, Unknown
  Description of Unknown: uncultivated organism sequence
  Category: MG55 effectors
  Description: MG55-5 effector
MITYQDLLLPFGVKEKKGKKYAKCPFCKNGTLNINSNVFFCSKCGFRGSERDFLKKLNIKTTSDVIVSNTHPQVKINNPERPIFLVFDSELFKYLSDKFSNINLILNPIVSMKEVQNKILYICSEKQNIEYADIFFASAKLLKILNYDELFKCNTEEQLKELVLKSSFYDPYPINGLIISDDKKIVDYINKLKYTAVLAKTVSPSIIEENCNVFFLYKTATIYDIAKVINPLFQKTQNIFLFSAENITVNVFTDILSEKQKFTVQFKKIVYQTYEKIIINSDIFKKIPPNIFEQTMNEFYGCKKLIENMEFNSFLNLVLSKYDFLIKNIPWGKIEMSYLNIYEKYVGSIKKIGKSYMALCPFHPDTNPSMKIDPEKGFFYCFGCNVKGKLNNFLDKLKAECGVEVDKEDYENSKTNKKGFIKKEPINYDEVYTNKTYYSYVDLNGNLAYIKIRYDTPKENSPDVRPKTFVIEFHTQDKRLFFYNLQGLNYIKDEDKKNYEIWFAEGEKCVDVIERVLDPEPEEEYPCIVLGYNNPEREWEYLPESYKAIFKDRDIKIFVDNDEIGQKKALQLIEILKKYAKKISLIQFSDKPSGYDIADFLEEGNPIFDALAISNTVYEVRKFSGNVLDILEYEVPEQKYVLQDNLHIPTGILSIIAGSGGLGKSYLSLYFALELMAEGKNVSMITLEDPIEKIIERIQRLLRKYQKTIDKSVKFTVYEYQEQDLLELTKNILENESDVLFIDPIGSVFEDENDNAETSRFMRKLAQIAISTKKNIFLVHHIRKMMQKPKEKETTKEDLYDMVRGASAIPNTAKHVVYVRRWKEDKNVLEVITVKHNYHRTDIDLRVKNLFDRNVPVEIEKFEFEKKIERPTKELVESEVVAKNIDEQDKDFSLSKRKESKNGRRDKQL

SEQ ID NO: 434 - protein, 853 aa, Unknown
  Description of Unknown: uncultivated organism sequence
  Category: MG55 effectors
  Description: MG55-6 effector
MKTIYITEEQKNNIKNIELLTEARGERALRKYIIDYTNSYVAQFLDIPLTEIPQNLIAICNPGEGESEMFSSVKNNSSGNNKFIDFLRVNFYEQFGMLHNGPTKKYMEGIARIALGELGFYSFDNRLQGSKIVNLGRVIKIISNNEDLLRSNNINLDGNLNNLSYNELMEYLNPVVQEYIDNSKNELNNSVYETPANYVIHEIKDVSVNNYGTPMKTPTRESYDYLESLAPYCDWCIVGNRHPGMYGQYTSNGGKFYICEKEGFKDIPREQGENCPLDEYGLSLICVLVAPDGFPENITTRWNHDFNGENNPNLENAIQLQNILKVKYLDVFKPRNEEEVNSMTRTGIQESEKPAAQDQVDNKVNAGIMDAVTAGGTMEEGAEPESDKYEIGSEKDGDINPYYHVNESDDKEESELKKYCGEIADFMKKIGINVYPYPKLNLDWSEQDGLFIKTGFYAPDEKAITIFCKDRHPKDILRTFSHEMIHHSQNLNGKDLNFSSDDDVKDNDKLKDIEAEAYLKGNIYFRQWTEYKNSERDSLNESKTNKKVINDEGKVVPEKCEKCGGKIGVYICGEPIYKCSECGEYYGTVKFNLKESEIFEETNPDNIDLSSFNIKKELNPKFWKNGLLDSRIRLKLMDIADDFIDFLGIDWVKPDDIIMTGSLANFNWNKKYSDIDLHILIDFSKVDKRKDFVKKYFDSLKNSWNEQHEGLSIFGFPVEVYVQDTNESHTSTGVYSLDKNEWIKEPERKKLATSKVNKSLIRNKVANYINQIDDLEEKYNTNKDNEFKVRKISEKLEKLWDTIKNERKSELNNDKGKEISNGNIIFKCLRRLNYIDKLYDLKTKTYDKMNSLP

SEQ ID NO: 435 - protein, 881 aa, Unknown
  Description of Unknown: uncultivated organism sequence
  Category: MG55 effectors
  Description: MG55-7 effector
MNNDAMEHTLGGGILTTSGSKQRKTSKFVMGKYTLYETKDRMYIVGSNKRETMFRILEIDLTVPRGELTVLEDNVFFTRNEIMNVLASLEEATEDGLHKKITGYGLLGFIKFTCWYYLIMVTKYSQVAVIGGHGIYHIDGIDIIPITNNYKKPEKSSDEARLLNIFKDLDLTKTFYFSYTYDITNTLQTNILREKLKAVDRCDITIPCGITDYNEMFVWNNNLLSPIFACIDTVFDWFQCIIHGFIDQVNVSVLGKSIYITLIARRSHHFAGARFLKRGVNNKGHVANEVETEQIVTDMILTPFHQPGNGFFDSDRYTSFVQHRGSIPLYWTQDASNLTTKPPIRINVVDPFFSPAALHFDNLFQRYGGGTIQILNLIKTKEKTPRETKLLWEFEQCIDYLNEFLPTLKKLDYTSWDMSRASKQDGQGVIEFLEKYAVNTVTTTGIFHNGPDFASTKIQEGICRSNCIDCLDRTNAAQFVIGKRALGCQLKSLGIIDNSYLEYDSDIVNILTELFHDLGDTIALQYGGSHLVNTMETYRKINQWSSHSRDMIESIKRFYSNSFVDAQRQDAINLFLGHYSWREGFPSLWEMNTDFYLHNAYSLNMPKRSYTHWWNDYNIKSIKELINEELIATGNDVTREKIIKNVRGYPGAFDNYWNEYYLPRSVTWIRDLFAYNMNSTRRYHNAVSKQDKAMSPFTSRKQSWLNNKLKMITSSKSLEKAEGRVVETTDLDRDTSPKQELELYEHYLHIISDRSQKLEEKMNSFSYSKYPIFISHESSEIPPMRKVIGEPLVDIAEDFTDVYDDDDDDDGDDENDEMTTEALLIAPDHVSVDEKFYEKVLNVDDYKPALDDYSAVIHIKPDNLQLYRDLCFSKDIQLDFQ

SEQ ID NO: 436 - protein, 996 aa, Unknown
  Description of Unknown: uncultivated organism sequence
  Category: MG55 effectors
  Description: MG55-8 effector
MNRIYQGRVLSWSQAGEGEEAKPIKGMDNPLWVHHELFQAAVNYYYLALGALGQAATEGPFFGLQSRIKESWESDPIHKRKASGLRQLLMPYLKINESTTLDEVYSLVLGQGHAKPKTLFKVGLAVAKDLGGDSSIQMKGREYLPRLCDTKYKGKFPRETTSREKEQMKLLLPHWLHGDDVDNRIHEIIGKLKFHHFANKTGKDLSFDESKALLATGVKFLSEKSLITSSEQVKLVEKIEKLPQDFSIPTYAGGSVNKEALQVRFYAYLITINFWSSKRGLKLLRDAYPKPKTTKIPDVTLSDEETFMLVDEDDPVKMARGKRGYVFRAFTSLPVWGGKSAADIQWKEFDIAAFKEALTTFNLYKQKTEERKDRLAKVEVSLDRMNGGEKYLQADKEIRDEAADLPVMKGDPRVEKLRELLYKKIPGVDGDRFDVGVTLRSLRHYDDLVKVWQSTSRNNSDKGDAEIRDLLIDCVTQSQQKNKRTFGDVNLFRALCEPENWIVWENSDEDFLKQKNAKSWADNVVDAFRIQLKLLDDQEYLQQPIKFRPAHPIDSPRQFRFSDLVTKNHTLHKPENHLQVSVAHRDEASGLFSKQGLSLHYSAPRIYRDAIGSSGEESDHGVWLQPMMKALGIPDLPKVDIKSAAVVLNMKIDRDKTDVRAYVDFPIDLKDAAKALSDYMGKQDLWDKQFNTNKDKEKLGLYWKGMTNAPEKLWHSKKEVKENGMQILGVDLGQRTAFAYSLIDCRGDKDFSKKQNGSKRNIITAIGHDGNNTWEAALLHSGMGRLPGEDSKQFDKNGNWVTERGGKKGRKANADDIVLAKCLLKEMEVDEEGSLSEDLLKVEYAPELWDRMLRYCKCMRNRLGRYYYSAVDLLSEKPDDREKMIQYLKSHPLPGVKENDELSETWKEFAIRCLEKYETDLQKFREILLAITDEILPVRGKRWKWVPHPDFPEHGYHLLINESDESTKGKKIRGQRGLSFDRMEQLENLRKLFQAL

SEQ ID NO: 437 - protein, 912 aa, Unknown
  Description of Unknown: uncultivated organism sequence
  Category: MG55 effectors
  Description: MG55-9 effector
MSEIKHRIINRLENMFSFKTRGEWFREGVCPQCGKKELYTHAHNPRIVKCGRLVKCGYEEHVKDICEDLFKDWSEYHPQTDTNPNAAADAFLSEGRGFDISNLIGKYTQQFYKDSNTGESSATVRFMLDDKNYWERLIDRPERFGNKKARFNFGFKNAGQAWSMHELDEICRLGEKGEAIWITEGIFDAIALSQSGVKAISCLSCVNYPSAFLKQIADRCHELKIDKPRLRWAFDNDSAGKGYTVKWHERSRAEGWSSTAAQPPANGGKKLDWNDLFQWDKLNPDQFPKYKHYGELLIAESAEDAGLLIYNFKQGRLKSFYFEYNYAMYHFNLDIEKYTKKLEKIEEDENQDHLLDKQKREMALRECQSIRQICSSSIQPLYFVRDNITDQSFYYIKVQSEKQQIVVNFTSDQISSPAKLKPRLLGVLSGTNWKGNQNDVDYLIDRMKDLKTVHTVDFIGYSREYQTYLFEKYAIHKGQIIPINEHNFFKVKRKELKTLAVSPAITLNPKQEFKPSWWNDFHRVRGAKGIVALAWWMGSYFAEQIRAMHSSYPFMEIVGEAGAGKSRLIEMMWKLSGRKDYEGFDANKSTNVAVYRNFAQIANLPVVLIEGDRNDVNGNAVQKSKFSWDELKDAFNGRAIRSKGLKTAGNETYEPPFRGAILISQNTAIQASEAILTRTLHLYFDRKGQSLETKRIVDELDRMELEDACAFMTHCLRNEDKILQTYASKLQSIEDHYHEIGITHTRIALCHAQVAALIEAMTKHVLPIDLEDMLEAQEMLEQMARERVEQLNGDHPDVEKFWDVYEYLQGNRSPEWGLNHHPADAQTVAINLNEIYKVAARNYQQLPEINEMKKLLRTSRKYKFIESNKQVYSDRFPADDVAAVNKSREAPGKPSRNVKCWIFTNPNLGAKK

SEQ ID NO: 438 - protein, 909 aa, Unknown
  Description of Unknown: uncultivated organism sequence
  Category: MG55 effectors
  Description: MG55-10 effector
MSELKHRIIERLEKTFNFKKRDEWFREGLCPSCGKKEVFTHAINPRIVKCGRLNKCGYEEHVKDICEDLFKDWSKEFPKTEAKPHAAADAYLQHGRGFDLSKINGLYTQEAFHNEKKFPGLVSATVRFKLAPGIYWERLIDRPERFGRQKANFIGKYEGYSWTMMELDALCNADSIWFTEGIFNAIALTLSNVPAVATMSSGNYPTKLLQQITDRCHELKKDKPRLCWAFDNDKAGKKAIKKFHLRAIQEKWSSTAALPPHQIKDKNFDWNDLYMHDLLHSEERKKYRHYGELLIAETAEQAGLLIYNFKEGRTRTFYYNHDFRLYYFNLDIDKFNKSLEHIEKNEDMDHLLEQQKREQALRDSASCTELCTRQIQPLYFQRNEITDDHWYYVQIISEDSEINTTFTSSMIRNSDKFAERLLGVHEGAWWTGSTNQLISYMKPRTEFIKRVKTIDYVGYTKEDKAWLFNDYAVHDGQIIPINKHDYFRIKRMDIKTLSNDPHIQLNPQGKFTPTWWNDFYRVRGTKGIIALAWWMGSYFAEQIRAEHSSYPFIEIVGEAGAGKSRLIEFMWKLSGRKDYEGFDPNKSTSVSVYRNLSKVSNLPVVLIEGDRNDANGNAVQKAKFSWDELKDAFNGRSIRSKGLKTSGNETYEPPFRGAVLISQNTAIQASEAILTRTLHLYFDRKGQSLETKRIVDELDRMELEDACTFMTHCLRNESKILETYKNSLQEIEAEYHEMGITHTRIALCHAQVASLITAMAQHVLPIDLEEVIKAQNMLQVMARDRVDQLNGDHPDVEKFWDVYEYLEGNRSAAWSLNHHDSDNQTVAINLNEVYKVAARNFQQLPEINEMKKLLRTSRKYKFIESNRQCHSERFPADEVSGVAKDREPTVKPKRNVKCWIFTNPNLGGK

SEQ ID NO: 439 - protein, 909 aa, Unknown
  Description of Unknown: uncultivated organism sequence
  Category: MG55 effectors
  Description: MG55-11 effector
MSELKHRIIERLEKTFNFKKRDEWFREGLCPSCGKKEVFTHAINPRIVKCGRLNKCGYEEHVKDICEDLFKDWSKEFPKTEAKPHAAADAYLQHGRGFDLSKINGLYTQEAFHNEKKFPGLVSATVRFKLAPGIYWERLIDRPERFGRQKANFIGKYEGYSWTMMELDALCNADSIWFTEGIFNAIALTLSNVPAVATMSSGNYPTKLLQQITDRCHELKKDKPRLCWAFDNDKAGKKAIKKFHLRAIQEKWSSTAALPPHQIKDKNFDWNDLYMHELLHSEERKKYRHYGELLIAETAEQAGLLIYNFKEGRTRTFYYNHDFRLYYFNLDIDKFNKSLEHIEKNEDMDHLLEQQKREQALRDSASCTELCTRQIQPLYFQRNEITDEHWYYVQIISEDNEINTTFTSSMIRNSDKFAERLLGVHEGAWWTGSTNQLISYMKPRTEFIKRVKTIDYVGYTKEDKAWLFNDYAVHDGQIIPINKHDYFRIKRMDIKTLSNDPHIQLNPQGKFTPTWWNDFYRVRGTKGIIALAWWMGSYFAEQIRAEHSSYPFIEIVGEAGAGKSRLIEFMWKLSGRKDYEGFDPNKSTSVSVYRNLSKVSNLPVVLIEGDRNDANGNAVQKAKFSWDELKDAFNGRSIRSKGLKTSGNETYEPPFRGAVLISQNTAIQASEAILTRTLHLYFDRKGQSLETKRIVDELDRMELEDACTFMTHCLRNESKILETYKNSLQEIEAEYHEMGITHTRIALCHAQVASLITAMAQHVLPIDLEEVIKAQNMLQVMARDRVDQLNGDHPDVEKFWDVYEYLEGNRSAAWSLNHHDSDNQTVAINLNEVYKVAARNFQQLPEINEMKKLLRTSRKYKFIESNRQCHSERFPADEVSGVAKDREPTVKPKRNVKCWIFTNPNLGGK

SEQ ID NO: 440 - protein, 906 aa, Unknown
  Description of Unknown: uncultivated organism sequence
  Category: MG55 effectors
  Description: MG55-13 effector
MSNIHVLIDEKLNQLFSFKRVGEWYRQGICPNCGKKELYTHAVNPRVVKCARLNKCGYEEHVKEICEDLFKDWSKDFPRTKENPNAAADAYLLHARGFDPNILKGLYTQELFRNDLKYPNEVTATIRFKLANGIYWERFIDRPERFGRQKANFIGKYEGHAWTLEQLDTLCNAQSIWITEGIFNAIALSFSKQPSIATLSTSNYPSLILKQITDRCIELKKDRPRLRWAFDNDKAGKKAIKKFHLRALQEKWNSTAALPSGQLDWNDLYQRDQLHSEYRDQYKHYGELHIAESPEQAGLLIYNYKDARRKTFWFIHNFRLYWFNLDMDKYTKELERIEADPERDLLLDSQKRELALQQCAAVSEICNRQLNPLYFQRNEITDESWYYFQILNPESEAKATFTADQISARGKFAPRLLSVQVGAWWTGNDHQLLTFMKNQTERLREVKTIDFIGYSKEYQAYIFNKHAVYKGQVIDINDHDFYKVGRIELKTLANSPNVQLNPKSTFKPTWWKDFYRVRGAKGLVALAWWTGSYFAEQIRSMHSSFPFIEIVGEAGAGKSRLIEFMWKLSGRPDYEGFDANKSTNVAVYRNFAQISNLPVVLIEGDRNDQNGNSVGKPKFSWDELKDAYNGRAIRSKGLKTAGNETYEPPFRGAIMISQNTAIQASEAILTRTLHLYFDRKGQSLETKRIVDDLDRMNIEEACTYMTHCLRHENAFLKTYAEKLEQTEKEFHNNGITHTRIALCHAQVSALIDAVAKHILHDVIDLEEVCAAQNMLLDMAHERVKQLNGDHPLVEQFWDVYEYLNSSRSTEFSINHFEHDAHQIAINLNEVYKVAAKNYQQLPDIKEMKNLLTASRRYKFVDKSRVVKSHRYPADEVKNALEDKTLREHTVRCWIFQNPAISGSPNS

SEQ ID NO: 441 - protein, 906 aa, Unknown
  Description of Unknown: uncultivated organism sequence
  Category: MG55 effectors
  Description: MG55-14 effector
MSNIHVLIDEKLNQLFSFKRVGEWYRQGICPNCGKKELYTHAVNPRVVKCARLNKCGYEEHVKEICEDLFKDWSKDFPRTKENPNAAADAYLLHARGFDPNILKGLYTQELFRNDLKYPNEVTATIRFKLANGIYWERFIDRPERFGRQKANFIGKYEGHAWTLEQLDTLCNAQSIWITEGIFNAIALSFSKQPSIATLSTSNYPSLILKQITDRCIELKKDRPRLRWAFDNDKAGKKAIKKFHLRALQEKWNSTAALPSGQLDWNDLYQRDQLHSEYRDQYKHYGELHIAESPEQAGLLIYNYKDARRKTFWFIHNFRLYWFNLDMDKYTKELERIEADPERDLLLDSQKRELALQQCAAVSEICNRQLNPLYFQRNEITDESWYYFQILNPESEAKATFTADQISARGKFAPRLLSVQVGAWWTGNDHQLLTFMKNQTERLREVKTIDFIGYSKEYQAYIFNKHAVYKGQVIDINDHDFYKVGRIELKTLANSPNVQLNPKSTFKPTWWKDFYRVRGAKGLVALAWWTGSYFAEQIRTMHSSFPFIEIVGEAGAGKSRLIEFMWKLSGRPDYEGFDANKSTNVAVYRNFAQISNLPVVLIEGDRNDQNGNSVGKPKFSWDELKDAYNGRAIRSKGLKTAGNETYEPPFRGAIMISQNTAIQASEAILTRTLHLYFDRKGQSLETKRIVDDLDRMNIEEACTYMTHCLRHENAFLKTYAEKLEQTEKEFHNNGITHTRIALCHAQVSALIDAVAKHILHDVIDLEEVCAAQNMLLDMAHERVKQLNGDHPLVEQFWDVYEYLNSSRSTEFSINHFEHDAHQIAINLNEVYKVAAKNYQQLPDIKEMKNLLTASRRYKFVDKSRVVKSHRYPADEVKNALEDKTLREHTVRCWIFQNPAISGSPNS

SEQ ID NO: 442 - protein, 769 aa, Unknown
  Description of Unknown: uncultivated organism sequence
  Category: MG55 effectors
  Description: MG55-15 effector
MYELKHRIIDRLEQMFSFKTRGEWFREGLCPSCGKKEVFTHAINPRIVKCGRLNKCGYEEHVKDICEDLFKDWSKEFPKTEAKPHAAADAYLQHGRGFDLSKINGLYTQEAFHNEKKFPGLVSATVRFKLAPGIYWERLIDRPERFGRQKANFIGKYEGYSWTMMELDALCNADSIWFTEGIFNAIALTLSNVPAVATMSSGNYPTKLLQQITDRCHELKKDKPRLCWAFDNDKAGKKAIKKFHLRAIQEKWSSTAALPPHQIKDKNFDWNDLYMHELLHSEERKKYRHYGELLIAETAEQAGLLIYNFKEGRTRTFYYNHDFRLYYFNLDIDKFNKSLEHIEKNEDMDHLLEQQKREQALRDSASCTELCTRQIQPLYFQRNEITDEHWYYVQIISEDNEINTTFTSSMIRNSDKFAERLLGVHEGAWWTGSTNQLISYMKPRTEFIKRVKTIDYVGYTKEDKAWLFNDYAVHDGQIIPINKHDYFRIKRMDIKTLSNDPHIQLNPQGKFTPTWWNDFYRVRGTKGIIALAWWMGSYFAEQIRAEHSSYPFIEIVGEAGAGKSRLIEFMWKLSGRKDYEGFDPNKSTSVSVYRNLSKVSNLPVVLIEGDRNDANGNAVQKAKFSWDELKDAFNGRSIRSKGLKTSGNETYEPPFRGAVLISQNTAIQASEAILTRTLHLYFDRKGQSLETKRIVDELDRMELEDACTFMTHCLRNEDKILETYASKLQSIEDHYHAIGITHTRIALCHAQVAALIEAMTKHVLPIDLE

SEQ ID NO: 443 - protein, 882 aa, Unknown
  Description of Unknown: uncultivated organism sequence
  Category: MG55 effectors
  Description: MG55-16 effector
MYELKHRIIDRLEQMFSFKTRGEWFREGVCPQCGKKELYTHAHNPRIVKCGRLNKCGYEEHVKDICEDLFKDWSKEFPKTEAKPHAAADAYLEHGRGFDLTKLKGRFTQEAFHNEQKFPGQVSATVRFELAPGVYWERLIDRPERFGRQKANFKGKYEGLSWTMWQLDDLCHAESIWITEGIFNSIALTLSGVPSIATMSSGNYPVKLLQQITDRCHELKKDKPRLCWAYDNDKEGRKKLKKFHLRALQEKWSSTAALPPNQIKGRSFDWNDLYMHDLLHSEERKKYRHYGELLIAESAEQAGLLIYNFKEGRTRTFFFNHEFRLYYFNLDIDKYNKALDIIEKNENLNHLLDEQKREQALRDSASCTEICNRQIKPLYFQRNEITDEHWYYAQIVSEDTEVNTTFTSSMIRNSDKFAERLLGVNEGAWWTGSTNQLVSYMKPRTEFIKRVKTIDYIGYTKEDKAWLFNDYAVHDGQIIPINEHDYFRIKRLDIKTLSNEPQIQLNPKAKFNPTWWKDFYRVRGNKGIVALAWWMGTYFAEQIRGLNSSYPFMEIVGQAGAGKSRLIEFMWKLSGRKDYEGFDPNKSTSVAVYRNFAKISNLPVVLIEGDRNDINGNAIQKAKFSWDELKDAFNGRAIRSKGVKNAGNDTYEPPFRGAILISQNTQIQASEAILTRTLLLEFDRSGQSLETKRIVDELDRMELEDACTFMTHCLRNEDKILETYASKLQSIEDHYHEIGITHTRIALCHAQVAALIEAMTKHVLPIDLEDMLEAQEMLEDMARERVEQLNGDHPDVEKFWDAYEYLQGNRSPEWGLNHHDNDAQTIAINLNEIYKVAARNYQQLPEINEMKKLLRTSRKYKFIESNKQVYSDRFPADDVAAV

SEQ ID NO: 444 - protein, 751 aa, Unknown
  Description of Unknown: uncultivated organism sequence
  Category: MG55 effectors
  Description: MG55-17 effector
MYELKHRIIDRLEQMFSVKTRGEWFREGVCPQCGKKELYTHAHNPRIVKCGRLNKCGYEEHVKDICEDLFKDWSKEFPKTEAKPHAAADAYLEHGRGFDLTKLKGRFTQEAFHNEQKFPGQVSATVRFELAPGVYWERLIDRPERFGRQKANFKGKYEGLSWTMWQLDDLCHAESIWITEGIFNSIALTLSGVPSIATMSSGNYPVKLLQQITDRCHELKKDKPRLCWAYDNDKEGRKKLKKFHLRALQEKWSSTAALPPNQIKGRSFDWNDLYMHDLLHSEERKKYRHYGELLIAESAEQAGLLIYNFKEGRTRTFFFNHEFRLYYFNLDIDKYNKALDIIEKNENLNHLLDEQKREQALRDSASCTEICNRQIKPLYFQRNEITDEHWYYAQIVSEDTEVNTTFTSSMIRNSDKFAERLLGVNEGAWWTGSTNQLVNYMKPRTEFIKRVKTIDYIGYTKEDKAWLFNDYAVHDGQIIPINEHDYFRIKRLDIKTLSNDPQIQLNPKAKFNPTWWKDFYRVRGNKGIVALAWWMGTYFAEQIRGLNSSYPFMEIVGQAGAGKSRLIEFMWKLSGRKDYEGFDPNKSTSVAVYRNFAKISNLPVVLIEGDRNDINGNAIQKAKFSWDELKDAFNGRAIRSKGVKNAGNDTYEPPFRGAILISQNTQIQASEAILTRTLLLEFDRSGQSLETKRIVDELDRMELEDACTFMTHCLRNEDKILETYASKLQSIEDHYHAIGITHTRIALCHAQ

SEQ ID NO: 445 - protein, 753 aa, Unknown
  Description of Unknown: uncultivated organism sequence
  Category: MG55 effectors
  Description: MG55-18 effector
NRRNKISGRKLMSELKHRIIDRLENMFSFKTRGEWFREGICPQCGKKELYTHAHNPRIVKCGRLVKCGYEEHVKDICEDLFKDWSEFHPQTDTNPNAAADAFLSEGRGFDISNLIGKYTQQFYKDSNTGESSATVRFMLDDKNYWERLIDRPERFGNKKARFNFGFKNAGQAWSVHELDEICRLGEKGEAIWITEGIFDAIALSQSGVKAISCLSCVNYPSAFLKQIADRCHELKIDKPRLRWAFDNDSAGKGYTVKWHERSRAEGWSSTAAQPPANGGKKLDWNDLFQWDKLNPDQFPKYKHYGELLIAESAEDAGLLIYNFKQGRLKSFYFEHHFSMYHFNLDIEKYTKKLEKIEEDETQDHLLDKQKRELALRECQSIRQICSASIQPLYFVRDSVTDQAFYYFKITSKKQETIVNFTSEQISSPAKLKTRLLSVLSGANWTGNQNDLDHFITRIEDLKTVLTIDFVGYSREHETYIFEKYAVHKGQVIPINEHDFFKVKRKEIKTLASSPEISLNPKKQFDPSWWNDFHKIRGAKGIVALAWWMGSYFAEQIRAMHSSYPFMEIVGEAGAGKSRLIELMWKLSGRKDYEGFDPNKGSFAGIYRNFGKVSNLPTVLIEADRNDVNGNSVQKSKFSWDELKDMFNGRTIRTMGVKTSGNETHEPPFRSSILISQNTQIQASEAILTRTLHLYFDRKGQSLETKRIVDELDRMELEDACTFMTHCLRNEDKILETYASKLQSIEDHYHEIGI

SEQ ID NO: 446 - protein, 777 aa, Unknown
  Description of Unknown: uncultivated organism sequence
  Category: MG55 effectors
  Description: MG55-19 effector
REGVCPQCGKKELYTHAHNPRIVKCGRLVKCGYEEHVKDICDDLFKDWSEYHPQTDTNPNAAADAFLSEGRGFDISNLIGKYTQQFYTDKDSKESSATVRFMLDDKNYWERLIDRPERFGNKKARFNFGFKNAGQAWSVHELDEICRLGEKGEAIWITEGIFDAIALSQSGVKAISCLSCVNYPSAFLKQIADRCHELKIDKPRLRWAFDNDSAGKGYTVKWHERSRAEGWSSTAAQPPANGGKKLDWNDLFQWDKLNPDQFPKYKHYGELLIAETAEDAGLLIYNFKQGRLKSFYFEHHFSMYHFNLDIEKYTKKLEKIEEDETQDHLLDKQKRELALRECQSIRQICSASIQPLYFVRDSVTDQAFYYFKITSKKQETIVNFTSEQISSPAKLKTRLLSVLSGANWTGNQNDLDHFITRIEDLKTVLTIDFVGYSREHETYIFEKYAVHKGQVIPINEHDFFKVKRKEIKTLASSPEISLNPKKQFDPSWWNDFHKVRGAKGIVALAWWMGSYFAEQIRAMHSSYPFMEIVGEAGAGKSRLIELMWKLSGRKDYEGFDPNKGSFAGIYRNFGKVSNLPTVLIEADRNDVNGNSVQKSKFSWDELKDMFNGRTIRTMGVKTSGNETHEPPFRSSILISQNTQIQASEAILTRTLHLYFDRKGQSLETKRIVDELDRMELEDACTFMTHCLRNEDKILETYASKLQSIEDHYHEIGITHTRIALCHAQVAALIEAMTKHVLPIDLEDMLEAQEMLEDMARERVEQLNGDHPDVEKFW

SEQ ID NO: 447 - protein, 793 aa, Unknown
  Description of Unknown: uncultivated organism sequence
  Category: MG55 effectors
  Description: MG55-20 effector
SGCKLMYELKHRIIDRLEQMFSFKTRGEWFREGVCPQCGKKELYTHAHNPRIVKCGRLNKCGYEEHVKDICEDLFKDWSKEFPKTEAKPHAAADAYLEHGRGFDLTKLKGRFTQEAFHNEQKFPGQVSATVRFELAPGVYWERLIDRPERFGRQKANFKGKYEGLSWTMWQLDDLCHAESIWITEGIFNSIALTLSGVPSIATMSSGNYPVKLLQQITDRCHELKKDKPRLCWAYDNDKEGRKKLKKFHLRALQEKWSSTAALPPNQIKGRSFDWNDLYMHDLLHSEERKKYRHYGELLIAESAEQAGLLIYNFKEGRTRTFFFNHEFRLYYFNLDIDKYNKALDIIEKNENLNHLLDEQKREQALRDSASCTEICNRQIKPLYFQRNEITDEHWYYAQIVSEDTEVNTTFTSSMIRNSDKFAERLLGVNEGAWWTGSTNQLVSYMKPRTEFIKRVKTIDYIGYTKEDKAWLFNDYAVHDGQIIPINEHDYFRIKRLDIKTLSNDPQIQLNPKAKFNPTWWKDFYRVRGNKGIVALAWWMGTYFAEQIRGLNSSYPFMEIVGQAGAGKSRLIEFMWKLSGRKDYEGFDPNKSTSVAVYRNFAKISNLPVVLIEGDRNDINGNAIQKAKFSWDELKDAFNGRAIRSKGVKNAGNDTYEPPFRGAILISQNTQIQASEAILTRTLLLEFDRSGQSLETKRIVDELDRMELEDACTFMTHCLRNEDKILETYASKLQSIEDHYHEIGITHTRIALCHAQVAALIEAMTKHVLPIDLEDMLEAQEMLEDMARERVEQ

SEQ ID NO: 448 - protein, 840 aa, Unknown
  Description of Unknown: uncultivated organism sequence
  Category: MG55 effectors
  Description: MG55-21 effector
MIFLLYHVIFIYNYTLMNFRKTLQKCKEKLQNNIINQNDSIWMPLDVRVCDNYHFKTDSFNLIVKYDSEHLEHNNTFHFNNYEHLQAKIVNVFFDKVQKSIIKTWMKLYKYTYDTVIQIFSHVYNLCNIYYKINFYDARKILTNFISYNCKNNYKFNYFYKLNKHTIRKFYFYRNNKLCNKEIKILKKQFTKIKFNNIYNSDNYINLFKILKEYRSEYVKYVKFYSANPIHFLNKLHFTDFYNKLQDEYKQLFINLKCPIEEIILQEKNINIPIFKYDDYNPYMKKYTDFIKNRDNINNYEEHNKIYRLYVNYENKLINKQKRLLEIRSKLIYTKLSVIVKLIDNVINTFYKHIYKIIEEKLPQQVNNFVDQVKLYKTNEQFRNKKNAILQKYGYKTTINYKNTINEMRKSSVGKKIIINEKKLLYKDIIKTNHVSIFEPKYTNSLRNNTNVSRHTIDLAVEKACANYKTCLTNLKNRNIDNFNLREIKLRKMIIDIEPNEFSKEGIRKNILGTTTGFYNGILFDFTTINKATILKYNEKLNKYTLHVPYINKNLSEDEKKEKIKILEKKLKMTKKQKKRNKRRRKEKIKKRNNKNKKKETIKNIKKEIKRIKKNNMEKTGEGTISLDPGVRKYLTGYSSEKKKNIEIRENIKIKKNCYKIYETTKKYGLSSGKKKKVKKKEKKEKKEKKVKREIKVISEKEKEKVKRKLENRSKKVYRQMTDFHNKVIKYLTENYASILIGDMSLKGILNKKTSKLKKKTKYLCTRLRIGMLRTKLKKKCEEKNLKYKLVNEAYTSKTCTKCGTINENLKSKETFNCNECKIIIDRDLNGARNIHLASL

SEQ ID NO: 449 - protein, 719 aa, Unknown
  Description of Unknown: uncultivated organism sequence
  Category: MG55 effectors
  Description: MG55-22 effector
MQVVKRDGKLVDFDQSKIRVAIEKANREVRPRERATKEEINQIIDYVEDLDKKRILVEDIQDIIEEQLMSFGKYLLAKKYITYRYTRELVRKANTTDQSIKELIDGESDYWNNENSNKNARVVTTQRDYLAGITSTDITRRFLLPEDVVKAHDEGIIHFHDADYFAQNALTNCELINLEDMLQNGTIMNGVMIEKPHRFLTAMTIATQIILGVTSSTYGGATVSLTHLAPFVKSSYDRYYKKYKKRGLSEAQCKEYAEQDTKKEVSDGVQTFNYQVNSMTNTNGQAPFLSVCMYLGETDEYKKELAMIIEEFLKQRIEGFKNEKGVYITPAFPKLLYVLEEDNIHKDSKYWYLTELAAKCTAKRLVPDYISEKKMKELKIDKNGNGNCYPCMGCRSFLTPYVDPETNKPKYYGRFNQGVVTINLVDVALSSKQDEEKFWKIFDERLELCHKALQIRHERLSKVTSDVAPILWQHGALARLEKGESIHKLLHDGYSTISLGYAGLYECVKYMTGHSHTDNGEGEEFAIKVMQKLNDKCKEWKEAEKIDYSVYGTPIESTTYKFAKCLKKRFGTVEGITDRSYITNSYHVPVFEDIDAFSKLKLESKFQKLSPGGAISYVETPNLQDNLEVVLQIINFIYDNIMYAELNTKSDYCQKCGFDGEILIDENLEWYCPNCGNRDHNTLNVARRTCGYIGSQFWNKGRTQEIKERVLHIDNKDDE

SEQ ID NO: 450 - protein, 719 aa, Unknown
  Description of Unknown: uncultivated organism sequence
  Category: MG55 effectors
  Description: MG55-23 effector
MQVVKRDGKLVDFDQSKIRVAIEKANREVRPRERATKEEINQIIDYVEDLDKKRILVEDIQDIIEEQLMSFGKYLLAKKYITYRYTRELVRKANTTDQSIKELIDGESDYWNNENSNKNARVVTTQRDYLAGITSTDITRRFLLPEDVVKAHDEGIIHFHDADYFAQNALTNCELINLEDMLQNGTIMNGVMIEKPHRFLTAMTIATQIILGVTSSTYGGATVSLTHLAPFVKSSYDRYYKKYKKRGLSEAQCKEYAEQDTKKEVSDGVQTFNYQVNSMTNTNGQAPFLSVCMYLGETDEYKKELAMIIEEFLKQRIEGFKNEKGVYITPAFPKLLYVLEEDNIHKDSKYWYLTELAAKCTAKRLVPDYISEKKMKELKIDKNGNGNCYPCMGCRSFLTPYVDPETNKPKYYGRFNQGVVTINLVDVALSSKQDEEKFWKIFDERLELCHKALQIRHERLSKVTSDVAPILWQHGALARLKKGESIHKLLHDGYSTISLGYAGLYECVKYMTGHSHTDNGEGEEFAIKVMQKLNDKCKEWKEAEKIDYSVYGTPIESTTYKFAKCLKKRFGTVEGITDRSYITNSYHVPVFEDIDAFSKLKLESKFQKLSPGGAISYVETPNLQDNLEVVLQIINFIYDNIMYAELNTKSDYCQKCGFDGEILIDENLEWYCPNCGNRDHNTLNVARRTCGYIGSQFWNKGRTQEIKERVLHIDNKDDE

SEQ ID NO: 451 - protein, 719 aa, Unknown
  Description of Unknown: uncultivated organism sequence
  Category: MG55 effectors
  Description: MG55-24 effector
MQVVKRDGKLVDFDQSKIRVAIEKANREVRPRERATKEEINQIIDYVEDLDKKRILVEDIQDIIEEQLMSFGKYLLAKKYITYRYTRELVRKANTTDQSIKELIDGESDYWNNENSNKNARVVTTQRDYLAGITSTDITRRFLLPEDVVKAHDEGIIHFHDADYFAQNALTNCELINLEDMLQNGTIMNGVMIEKPHRFLTAMTIATQIILGVTSSTYGGATVSLTHLAPFVKSSYDRYYKKYKKRGLSEAQCKEYAEQDTKKEVSDGVQTFNYQVNSMTNTNGQAPFLSVCMYLGETDEYKKELAMIIEEFLKQRIEGFKNEKGVYITPAFPKLLYVLEEDNIHKDSKYWYLTELAAKCTAKRLVPDYISEKKMKELKIDKNGNGNCYPCMGCRSFLTPYVDPETNKPKYYGRFNQGVVTINLVDVALSSKQDEEKFWKIFDERLELCHKALQIRHERLSKVTSDVAPILWQHGALARLEKGESIHKLLHDGYSTISLGYAGLYECVKYMTGHSHTDNGEGEEFAIKVMQKLNDKCKEWKEAEKIDYSVYGTPIESTTYKFAKCLKKRFGTVEGITDRNYITNSYHVPVFEDIDAFSKLKLESKFQKLSPGGAISYVETPNLQDNLEVVLQIINFIYDNIMYAELNTKSDYCQKCGFDGEILIDENLEWYCPNCGNRDHNTLNVARRTCGYIGSQFWNKGRTQEIKERVLHIDNKDDE

SEQ ID NO: 452 - protein, 719 aa, Unknown
  Description of Unknown: uncultivated organism sequence
  Category: MG55 effectors
  Description: MG55-25 effector
MQVVKRDGKLVDFDQSKIRVAIEKANREVKPRERATKEEINQIIDYVEDLDKKRILVEDIQDIIEEQLMSFGKYLLAKKYITYRYTRELVRKANTTDQSIKELIDGESDYWNNENSNKNARVVTTQRDYLAGITSTDITRRFLLPEDVVKAHDEGIIHFHDADYFAQNALTNCELINLEDMLQNGTIMNGVMIEKPHRFLTAMTIATQIILGVTSSTYGGATVSLTHLAPFVKSSYDRYYKKYKKRGLSEAQCKEYAEQDTKKEVSDGVQTFNYQVNSMTNTNGQAPFLSVCMYLGETDEYKKELAMIIEEFLKQRIEGFKNEKGVYITPAFPKLLYVLEEDNIHKDSKYWYLTELAAKCTAKRLVPDYISEKKMKELKIDKNGNGNCYPCMGCRSFLTPYVDPETNKPKYYGRFNQGVVTINLVDVALSSKQDEEKFWKIFDERLELCHKALQIRHERLSKVTSDVAPILWQHGALARLKKGESIHKLLHDGYSTISLGYAGLYECVKYMTGHSHTDNGEGEEFAIKVMQKLNDKCKEWKEAEKIDYSVYGTPIESTTYKFAKCLKKRFGTVEGITDRSYITNSYHVPVFEDIDAFSKLKLESKFQKLSPGGAISYVETPNLQDNLEVVLQIINFIYDNIMYAELNTKSDYCQKCGFDGEILIDENLEWYCPNCGNRDHNTLNVARRTCGYIGSQFWNKGRTQEIKERVLHIDNKDDE

SEQ ID NO: 453 - protein, 719 aa, Unknown
  Description of Unknown: uncultivated organism sequence
  Category: MG55 effectors
  Description: MG55-26 effector
MQVVKRDGKLVDFDQSKIRVAIEKANREVKPRERATKEEINQIIDYVEDLDKKRILVEDIQDIIEEQLMSFGKYLLAKKYITYRYTRELVRKANTTDQSIKELIDGESDYWNNENSNKNARVVTTQRDYLAGITSTDITRRFLLPEDVVKAHDEGIIHFHDADYFAQNALTNCELINLEDMLQNGTIMNGVMIEKPHRFLTAMTIATQIILGVTSSTYGGATVSLTHLAPFVKSSYDRYYKKYKKRGLSEAQCKEYAEQDTKKEVSDGVQTFNYQVNSMTNTNGQAPFLSVCMYLGETDEYKKELAMIIEEFLKQRIEGFKNEKGVYITPAFPKLLYVLEEDNIHKDSKYWYLTELAAKCTAKRLVPDYISEKKMKEYKIDKNGNGNCYPCMGCRSFLTPYVDPETNKPKYYGRFNQGVVTINLVDVALSSKQDEEKFWKIFDERLELCHKALQIRHERLSKVTSDVAPILWQHGALARLKKGESIHKLLHDGYSTISLGYAGLYECVKYMTGHSHTDNGEGEEFAIKVMQKLNDKCKEWKEAEKIDYSVYGTPIESTTYKFAKCLKKRFGTVEGITDRNYITNSYHVPVFEDIDAFSKLKLESKFQKLSPGGAISYVETPNLQDNLEVVLQIINFIYDNIMYAELNTKSDYCQKCGFDGEILIDENLEWYCPNCGNRDHNTLNVARRTCGYIGSQFWNKGRTQEIKERVLHIDNKDDE

SEQ ID NO: 454 - protein, 719 aa, Unknown
  Description of Unknown: uncultivated organism sequence
  Category: MG55 effectors
  Description: MG55-27 effector
MQVVKRDGKLVDFDQSKIRVAIEKANREVRPRERATKEEINQIIDYVEDLDKKRILVEDIQDIIEEQLMSFGKYLLAKKYITYRYTRELVRKANTTDQSIKELIDGESDYWNNENSNKNARVVTTQRDYLAGITSTDITRRFLLPEDVVKAHDEGIIHFHDADYFAQNALTNCELINLEDMLQNGTIMNGVMIEKPHRFLTAMTIATQIILGVTSSTYGGATVSLTHLAPFVKSSYDRYYKKYKKRGLSEAQCKEYAEQDTKKEVSDGVQTFNYQVNSMTNTNGQAPFLSVCMYLGETDEYKKELAMIIEEFLKQRIEGFKNEKGVYITPAFPKLLYVLEEDNIHKESKYWYLTELAAKCTAKRLVPDYISEKKMKELKIDKNGNGNCYPCMGCRSFLTPYVDPETNKPKYYGRFNQGVVTINLVDVALSSKQDEEKFWKIFDERLELCHKALQIRHERLSKVTSDVAPILWQHGALARLEKGESIHKLLHDGYSTISLGYAGLYECVKYMTGHSHTDNGEGEEFAIKVMQKLNDKCKEWKEAEKIDYSVYGTPIESTTYKFAKCLKKRFGTVEGITDRSYITNSYHVPVFEDIDAFSKLKLESKFQKLSPGGAISYVETPNLQDNLEVVLQIINFIYDNIMYAELNTKSDYCQKCGFDGEILIDENLEWYCPNCGNRDHNTLNVARRTCGYIGSQFWNKGRTQEIKERVLHIDNKDDE

SEQ ID NO: 455 - protein, 719 aa, Unknown
  Description of Unknown: uncultivated organism sequence
  Category: MG55 effectors
  Description: MG55-28 effector
MQVVKRDGKLVDFDQSKIRVAIEKANREVRPRERATKEEINQIIDYVEDLDKKRILVEDIQDIIEEQLMSFGKYLLAKKYITYRYTRELVRKSNTTDQSIKELIDGESDYWNNENSNKNARVVTTQRDYLAGITSTDITRRFLLPEDVVKAHDEGIIHFHDADYFAQNALTNCELINLEDMLQNGTIMNGVMIEKPHRFLTAMTIATQIILGVTSSTYGGATVSLTHLAPFVKSSYDRYYKKYKKRGLSEAQCKEYAEQDTKKEVSDGVQTFNYQVNSMTNTNGQAPFLSVCMYLGETDEYKKELAMIIEEFLKQRIEGFKNEKGVYITPAFPKLLYVLEEDNIHKESKYWYLTELAAKCTAKRLVPDYISEKKMKELKIDKNGNGNCYPCMGCRSFLTPYVDPETNKPKYYGRFNQGVVTINLVDVALSSKQDEEKFWKIFDERLELCHKALQIRHERLSKVTSDVAPILWQHGALARLKKGESIHKLLHDGYSTISLGYAGLYECVKYMTGHSHTDNGEGEEFAIKVMQKLNDKCKEWKEAEKIDYSVYGTPIESTTYKFAKCLKKRFGTIEGITDRSYITNSYHVPVFEDIDAFSKLKLESKFQKLSPGGAISYVETPNLQDNLEVVLQIINFIYDNIMYAELNTKSDYCQKCGFDGEILIDENLEWYCPNCGNRDHNTLNVARRTCGYIGSQFWNKGRTQEIKERVLHIDNKDDE

SEQ ID NO: 456 - protein, 719 aa, Unknown
  Description of Unknown: uncultivated organism sequence
  Category: MG55 effectors
  Description: MG55-29 effector
MQVIKRDGKVVDFDQSKIKIAIEKANKEVKPRERASKDEINQIIGYVEDLDKKRILVEDIQDIIEEQLMSFGKYVLAKKYITYRYTRELVRKANTTDQSIKELIDGESDYWNNENSNKNAQVVTTQRDYLAGITSTDITRRFLLPEDVVKAHDEGIIHFHDADYFAQNALTNCELINLEDMLQNGTIMNGVMIEKPHRFLTAMTIATQIILGVTSSTYGGATVSLTHLAPFVRSSYDRYYKKYKQRGLSEKQCKEYAEQDTKKEVSDGVQTFNYQVNSMTNTNGQAPFLSVCMYLGETDEYKQELAMIIEEFLKQRIEGFKNEKGVYITPAFPKLLYVLEEDNIHKDSKYWYLTELAAKCTAKRLVPDYISEKKMKEYKIDKNGNGNCYPCMGCRSFLTPYVDPETNKPKYYGRFNQGVVTINLVDVALSSKQDEEKFWKIFDERLELCHKALQIRHERLSKVTSDVAPILWQHGALARLKKGESIHKLLHDGYSTISLGYAGLYECVKYMTGNSHTDNGIGEEFALRVMQKLNDKCKEWKEAEKIDYSVYGTPIESTTYKFAKCLKKRFGTIEGITDRSYITNSYHVPVFEDIDAFSKLKLESKFQKLSPGGAISYVETPNLQNNLEVVLQIIHFIYDNIMYAELNTKSDYCQKCGFDGEILIDENLEWYCPNCGNRDHNTLNVARRTCGYIGSQFWNKGRTQEIKERVLHIDNKDDE

SEQ ID NO: 457 - protein, 708 aa, Unknown
  Description of Unknown: uncultivated organism sequence
  Category: MG55 effectors
  Description: MG55-30 effector
MKVIKRDGTTVSYDRNKIKIAIQKANSEVEPAEKVTDETIEYIISCIETKNRSRMLVEDIQDIIEQKLMDEKKFVLAKTYIIYRYSRELVRKANTTDDSILSLIQNRNKDVMEENSNKNATVASTQRDLIAGEVSKDLTKRILLPEKISKAHEEGILHFHDADYFLQPIFNCCLINIGDMLDNGTVMNGKLIESPKSFQVACTVMTQVIAAVASSQYGGQSVDVRHLGKYLRKSYNKFKTKMTAEFGDTVPEEIIEKMVQERLQDELRSGVQTIQYQINTLMTTNGQSPFVTLFLNLDKDDEYIKENAMIIEEILRQRLEGIKNEKGVYVTPAFPKLIYVLDEHNCLKGGKYDYITELAVKCSAKRLYPDYISAKKMRENYEGNVFSCMGCRSFLTPWKDENGNYKFEGRFNQGVVSLNLPQIGIIAAGDEETFWDLLEERLELCYEALMCRHNALMGVTSDVSPVHWQYGAIARLEKGEPIDKLLLDGYSTISLGYIGLYEVTKLMKGCSHTEPAGQDFALRVMNRLRAATDKWKAETGIGFGLYGSPAESLCYRFARIDLERFGSIPDVTDKGYYTNSYHVDVRENIDAFSKFRFESQFQKISSGGAISYVEIPNMRNNLDALAEVVRFIYDNIQYAEFNTKSDYCHVCGYDGEIMINDDNEWECPQCGNKDHAKMNVTRRTCGYLGENFWNVGKTKEIKARVLHL

SEQ ID NO: 458 - protein, 724 aa, Unknown
  Description of Unknown: uncultivated organism sequence
  Category: MG55 effectors
  Description: MG55-31 effector
MKIIKRSGAENTFDKEKIENAVAKANITVEEKDRLSEGEIGEIAQNIEDKCSEMNRAMDVETIQDWVEADIMRHGKYTVAKHYITYRYERSIVRQANTTDKQILSLLNFENEEVKQENSNKNPTVNSVQRDYMAGEVSKDITRRFLLPDDIVEAHEKGLIHFHDADYFAQHMHNCCLVNLEDMLQNGTVISEVMIEKPHSFSTACNIATQSIAQIASSQYGGQSITLSHLAPFVQISRDKYRREVKKEFAELNIPADEDTINKVAEMRVKAEIVQGVQMIQYQVITLMTTNGQAPFVTVFMYLDEVPEGQTRDDLAAIIEEMLRQRIQGVKNEKGVYITPAFPKLIYVLEEDNIREGSKYWELTKLAAKCTAKRMVPDYISEKKMKELKVDKNGNGQCYPCMGCRSFLTTYLDENGKPKYYGRFNQGVVTINLVDVACSSYKDMDKFWKIFDERLELCRRALMLRHERLKGTPSDVAPILWQNGALARLKKGETIDKLLFGGYSTISLGYAGLCECVRYMTGKSHTDPSATPFALEVMQHLNDACTKWRAETNIDFSLYGTPLESTTYKFARCLQKRFGVIEGVTDRNYITNSYHIHVTENIDAFDKLTFESQFQALSPGGAISYVEVPNMQNNIEAVLAVMQHIYDNIMYAELNTKSDYCQKCGFDGEIKIVEDDGKLVWECPNCGNRDQNTLNVARRTCGYIGTQFWNQGRTQEIKERVLHL

SEQ ID NO: 459 - protein, 719 aa, Unknown
  Description of Unknown: uncultivated organism sequence
  Category: MG55 effectors
  Description: MG55-32 effector
MQVIKRDGKVVDFDQSKIKIAIEKANKEVKPRERATKEEINQIISYIEELDKKRILVEDIQDIIEEQLMTFGKYILAKKYITYRYTRELVRKSNTTDQSIKELIDGESDYWNNENSNKNARVVTTQRDYLAGITSTDITRRFLLPEDVVKAHDEGIIHFHDADYFAQNALTNCELINLEDMLQNGTIMNGVMIEKPHRFLTAMTIATQIILGVTSSTYGGATVSITHLAPFVKSSYEKYYKKYKQRGLNEKQCKEYAEQDTRKEVSDGVQTFNYQVNSMTNTNGQAPFLSVCMYLGETDEYKQELAMIIEEFLKQRIEGFKNEKGVYITPAFPKLLYVLEEDNIHKDSKYWYLTELAAKCTAKRLVPDYISEKKMKEYKIDKNGNGNCYPCMGCRSFLTPYVDPETNKPKYYGRFNQGVVTINLVDVALSSKQDEEKFWKIFDERLELCHKALQIRHERLSKVTSDVAPILWQHGALARLKKGESIHKLLHDGYSTISLGYAGLYECVKYMTGNSHTDNGIGEEFALKVMQKLNDKCKEWKEAEKIDYSVYGTPIESTTYKFAKCLRKRFGTIEGITDRSYITNSYHVPVFEDIDAFSKLKLESKFQKLSPGGAISYVETPNLQNNLEVVLQIIHFIYDNIMYAELNTKSDYCQKCGFDGEILIDENLEWYCPNCGNRDHNTLNVARRTCGYIGSQFWNKGRTQEIKERVLHIDNKDDE

SEQ ID NO: 460 - protein, 404 aa, Unknown
  Description of Unknown: uncultivated organism sequence
  Category: MG55 effectors
  Description: MG55-33 effector
MAKVKKANTGLNRTVVFEVSVANNNIKKQVMASIDKYRAVARKMYSSVAMAATAGATIEVKNGDVRVKPYTQNSKDILSKAYNVSGKAQFYELRNFVLKDHANTWQSVIWDSCRLAVAGTWNHADPEFSKGEKKVGRGWLSLQGARAFGFFNRCGIGLPNTKSIQFGSKSMTMKWDKEIDDVTFFVDSKLPGNTFWKFKNIRDGVWERGTCYIGWKYKNIGGGKKVKTLYITMTYKLPENYFNEESGEGVMIVEFTDDPENGIVMYSDDKFHYSDKISVYEAIAWNKQLNVVKDYYKKQRASVGGRDKQWGLNQSLMVISNKSENLTKRRINGKKHRNHIWANRIVARVRQWGMGVVVLKDFPDGLLIDQEWSMFELKEILKYKLREIGCELKTYNTPKEEEAA

SEQ ID NO: 461 - protein, 724 aa, Unknown
  Description of Unknown: uncultivated organism sequence
  Category: MG55 effectors
  Description: MG55-34 effector
MKIIKRSGAENTFDKEKIENAVAKANITVEEKDRLSEGEIGEIAQNIEDKCSEMNRAMDVETIQDWVEADIMRHGKYTVAKHYITYRYERSIVRQANTTDKQILSLLNFENEEVKQENSNKNPTVNSVQRDYMAGEVSKDITRRFLLPDDIVEAHEKGLIHFHDADYFAQHMHNCCLVNLEDMLQNGTVISEVMIEKPHSFSTACNIATQSIAQIASSQYGGQSITLSHLAPFVQISRDKYRREVKKEFAELNIPADEDTINKVAEMRVKAEIVQGVQMIQYQVITLMTTNGQAPFVTVFMYLDEVPKGQTRDDLAAIIEEMLRQRIQGVKNEKGVYITPAFPKLIYVLEEDNIREGSKYWELTKLAAKCTAKRMVPDYISEKKMKELKVDKNGNGQCYPCMGCRSFLTTYLDENGKPKYYGRFNQGVVTINLVDVACSSYKDMDKFWKIFDERLELCRRALMLRHERLKGTPSDVAPILWQNGALARLKKGETIDKLLFGGYSTISLGYAGLCECVRYMTGKSHTDPSATPFALEVMQHLNDACAKWRAETNIDFSLYGTPLESTTYKFARCLQKRFGVIEGVTDRNYITNSYHIHVTENIDAFDKLTFESQFQALSPGGAISYVEVPNMQNNIEAVLAVMQHIYDNIMYAELNTKSDYCQKCGFDGEIKIVEDDGKLVWECPNCGNRDQNTLNVARRTCGYIGTQFWNQGRTQEIKERVLHL

SEQ ID NO: 462 - protein, 719 aa, Unknown
  Description of Unknown: uncultivated organism sequence
  Category: MG55 effectors
  Description: MG55-35 effector
MQVIKRDGKVVDFDQSKIKIAIEKANKEVKPRERATKEEINQIISYIEELDKKRILVEDIQDIIEEQLMTFGKYILAKKYITYRYTRELVRKSNTTDQSIKELIDGESDYWNNENSNKNARVVTTQRDYLAGITSTDITRRFLLPEDVVKAHDEGIIHFHDADYFAQNALTNCELINLEDMLQNGTIMNGVMIEKPHRFLTAMTIATQIILGVTSSTYGGATVSITHLAPFVRSSYDRYYKKYKQRGLSEKQCKEYAEQDTKKEISDGVQTFNYQVNSMTNTNGQAPFLSVCMYLGETDEYKQELAMIIEEFLKQRIEGFKNEKGVYITPAFPKLLYVLEEDNIHKDSKYWYLTELAAKCTAKRLVPDYISEKKMKELKIDKNGNGNCYPCMGCRSFLTPYVDPETNKPKYYGRFNQGVVTINLVDVALSSKQDEEKFWKIFDERLELCHKALQIRHERLSKVTSDVAPILWQHGALARLKKGESIHKLLHDGYSTISLGYAGLYECVKYMTGNSHTDNGIGEEFALKVMQKLNDKCKEWKEAEKIDYSVYGTPIESTTYKFAKCLRKRFGTIEGITDRSYITNSYHVPVFEDIDAFSKLKLESKFQKLSPGGAISYVETPNLQNNLEVVLQIIHFIYDNIMYAELNTKSDYCQKCGFDGEILIDENLEWYCPNCGNRDHNTLNVARRTCGYIGSQFWNKGRTQEIKERVLHIDNKDDE

SEQ ID NO: 463 - protein, 707 aa, Unknown
  Description of Unknown: uncultivated organism sequence
  Category: MG55 effectors
  Description: MG55-36 effector
MQVIKRDGSVVEYDRTKIAIAIGKANAEVEKKERASKEEIETILAAVEEKKKKRMLVEDIQDIIEEKLMELGHYELAKTYIIYRYNRALVRKANTTDEAILSLISNSNKDVMEENSNKNALAAATQRDLIAGEVSKDLTRRILLPEKISKAHDEGILHFHDADYFIQPIFNCCLINIGDMLDNGTVMNGKLIESPKSFQVACTVVTQIIAAVACSQYGGQSVDIRHLGKYLRKSRVKFEKHFRETCPELAEEEVKKLVDDRIQDELKSGVQTIQYQINTLMTTNGQSPFVTLFLYLDKDDEYLEENAQIVMEILRQRYEGIKNEKGVYVTPAFPKLVYVLDEINCLKGGKYDYITEFAVKCSAKRLYPDYISAKKMRETYEGNVFSPMGCRSFLSPWKDENGNYKFEGRFNQGVVSINLPQIGIIAKGDEEKFWKLFDERLDLCREALMCRHRALLGTKSDVSPIHWQYGAIARLDKGEVIDKLLFNGYSTLSLGYIGLYEVTKLMTGVTQTDPKGEEFALRVMQHMRDKTDEWKMETGLGFALYGTPAESLCYRFARIDKEKFGTIEDVTDKGYYTNSYHVDVREHIDAFSKFSFEAQFQRISSGGCISYVEIPNMQNNLEAMQEIVRFIYDNIQYAEFNTKSDYCHVCGWDGEIIINDDNEWECPNCHNKDHRKMNVTRRTCGYLGENFWNLGKTKEIKARVLHL

SEQ ID NO: 464 - protein, 719 aa, Unknown
  Description of Unknown: uncultivated organism sequence
  Category: MG55 effectors
  Description: MG55-37 effector
MQVIKRDGKVVDFDQSKIKIAIEKANKEVKPRERASKDEINQIIGYVEDLDKKRILVEDIQDIIEEQLMSFGKYVLAKKYITYRYTRELVRKANTTDQSIKELIDGESDYWNNENSNKNAQVVTTQRDYLAGITSTDITRRFLLPEDVVKAHDEGIIHFHDADYFAQNALTNCELINLEDMLQNGTIMNGVMIEKPHRFLTAMTIATQIILGVTSSTYGGATVSLTHLAPFVRSSYDRYYKKYKQRGLSEKQCKEYAEQDTKKEVSDGVQTFNYQVNSMTNTNGQAPFLSVCMYLGETDEYKQELAMIIEEFLKQRIEGFKNEKGVYITPAFPKLLYVLEEDNIHKDSKYWYLTELAAKCTAKRLVPDYISEKKMKEYKIDKNGNGNCYPCMGCRSFLTPYVDPETNKPKYYGRFNQGVVTINLVDVALSSKQDEEKFWKIFNERLELCHKALQIRHERLSKVTSDVAPILWQHGALARLKKGESIHKLLHDGYSTISLGYAGLYECVKYMTGNSHTDNGIGEEFALRVMQKLNDKCKEWKEAEKIDYSVYGTPIESTTYKFAKCLKKRFGTIEGITDRSYITNSYHVPVFEDIDAFSKLKLESKFQKLSPGGAISYVETPNLQNNLEVVLQIIHFIYDNIMYAELNTKSDYCQKCGFDGEILIDENLEWYCPNCGNRDHNTLNVARRTCGYIGSQFWNKGRTQEIKERVLHIDNKDDE

SEQ ID NO: 465 - protein, 730 aa, Unknown
  Description of Unknown: uncultivated organism sequence
  Category: MG55 effectors
  Description: MG55-38 effector
MQVIKRDGRIVDFDRQKIAAAIGKANAEVKPRERASKEDIKGIIEYVEGLDKKRILVEDIQDIIEEKLMECEKYLLAKKYITYRYTRELVRKANTTDQSIKELIDGESDYWNNENSNKNARVVTTQRDYLAGITSTDITRRFLLPKDVVEAHDEGIIHFHDADYFAQNALTNCELINLDDMLQNGTIMNGVMIEKPHRFLTAMTIATQIILAVTSSTYGGATVSLTHLAPFVRSSYERYYKKYKERGLSEKQCKEYAEQDTKKEIADGVQTFNYQVNSMTNTNGQAPFLSVNMYLGETKEYKKELAMVIEEFLKQRIEGFKNEKGVYITPAFPKLLYVLEKDNITEDSPYWYLTELAAKCTAKRMVPDYISEKKMLELKIDKNGNGNCYPCMGCRSFLTPYVDPKTNKPKYYGRFNQGVVTINLVDVALSSDKDMDKFWKIFDERLELCHRALQVRHERLSKVTSDVAPILWQNGALARLKKGESIHPLLHGGYSTISLGYAGLYECVKYMTDHSHTDNGEGKDFGIKVMQKLNDKCKEWKAAEDIDYSVYGTPIESTTYKFAKCLKKRFGVIEGITDRDYITNSYHIPVFEEIDAFSKLSIESQFQQLSPGGAISYIETPNLQNNIESVLQIIKFIYDNIMYAELNTKSDYCQVCGFDGEILIDDNLEWYCPNCGNRNHDTLNVARRTCGYIGSQFWNKGRTQEIKERVLHIDNKDAEMPKKEKTKVAV

SEQ ID NO: 466 - protein, 719 aa, Unknown
  Description of Unknown: uncultivated organism sequence
  Category: MG55 effectors
  Description: MG55-39 effector
MQVVKRDGKLVDFDQSKIRVAIEKANREVKPRERATKEEINQIIDYVEDLDKKRILVEDIQDIIEEQLMSFGKYLLAKKYITYRYTRELVRKANTTDQSIKELIDGESDYWNNENSNKNARVVTTQRDYLAGITSTDITRRFLLPEDVVKAHDEGIIHFHDADYFAQNALTNCELINLEDMLQNGTIMNGVMIEKPHRFLTAMTIATQIILGVTSSTYGGATVSLTHLAPFVKSSYDRYYKKYKKRGLSEAQCKEYAEQDTKKEVSDGVQTFNYQVNSMTNTNGQAPFLSVCMYLGETDEYKKELAMIIEEFLKQRIEGFKNEKGVYITPAFPKLLYVLEEDNIHKDSKYWYLTELAAKCTAKRLVPDYISEKKMKEYKIDKNGNGNCYPCMGCRSFLTPYVDPETNKPKYYGRFNQGVVTINLVDVALSSKQDEEKFWKIFDERLELCHKALQIRHERLSKVTSDVAPILWQHGALARLEKGESIHKLLHDGYSTISLGYAGLYECVKYMTGHSHTDNGEGEEFAIKVMQKLNDKCKEWKEAEKIDYSVYGTPIESTTYKFAKCLKKRFGTVEGITDRNYITNSYHVPVFEDIDAFSKLKLESKFQKLSPGGAISYVETPNLQDNLEVVLQIINFIYDNIMYAELNTKSDYCQKCGFDGEILIDENLEWYCPNCGNRDHNTLNVARRTCGYIGSQFWNKGRTQEIKERVLHIDNKDDE

SEQ ID NO: 467 - protein, 724 aa, Unknown
  Description of Unknown: uncultivated organism sequence
  Category: MG55 effectors
  Description: MG55-40 effector
MKIIKRNGAEATFDISKIIMAITKANAAVEECDRMTPRQIQRIAESVELACQELGRSAAVEEIQDMVEKQIMAHGAFEVAKAYITYRYTRSLVRRANTTDDRILSLIECNNEEAKQENSNKNPIVNSTQRDYMAGEVSRDITSRLLLPKDIVEAHEEGIIHFHDADYYAQHMHNCDLVNLEDMLENGTVITGTLIERPHSFSTACNIATQIIAQVASNQYGGQSISLTHLAPFVQVSRERIRREVEAEMQAIDAHPGEEKLAELVENRVREEIRRGVQTIQYQVVTLLTTNGQAPFVTVFMYLGEAKNEQERHDLAMIIEETLRQRYQGVKNEKGVWVTPAFPKLIYVLEEDNIHEDSPYWYLTELAARCTAKRMVPDYISEKKMLELKVDKNGEGHCYTCMGCRSFLTPYVDENGKPKYYGRFNQGVVTINLPDVALSSGGNMEKFWKIFDERLELCHRALMCRHERLKGTLSDAAPILWQYGALARLKKGEPIDKLLYGGYSTISLGYAGLYECVKYMTGKSHTDPSATPFALEIMQHMNDACAKWKQMHNIDFSLYGTPLESTTYKFAKCLQKRFGIIPGVTDKGYITNSYHIHVTEHIDAFSKLAFESKFQALSPGGAISYVEVPNMQNNIPAVLEVMKFIYDNIMYAELNTKSDYCQVCGYDGEIEIVEHDGKLIWRCPNCGNTDQDKMNVARRTCGYIGTQFWNQGRTQEIKERVLHL

SEQ ID NO: 468 - protein, 712 aa, Unknown
  Description of Unknown: uncultivated organism sequence
  Category: MG55 effectors
  Description: MG55-41 effector
MISKVRKRDGRIKDFDSRRIIEALRKAFEELGYTSSYEYINVAGSVVSELSKLDSEICDVEAIQDIVVKVLQESHPEVAKKYEEYRLKRTEIREENSKLIKSVEGLLNFSNDEVMLENSNKQAQLISTTRDLMAGEVSKFIVRKMIPKDILELHDRGVIHIHDMDYGANDMFNCELVNLQDMLDNGTVINKKMIHSPHTLRTAMTIATQISAQVASYQYGGQTMTLSHLAPYVRKSESVIRREIESDYPELSKERKDKIVERRLRKEIKDSVQLFNYQISTIQSTNGQAPFISLAIYLSERPGYEREVAMLAEEFFNQRIEGIENENGVKATQTFPKLLYFLDENNTYEGSEYFWLTQLAVKSTSLRMNPDYISAKKMKENVGHVFSCMGCRAFLSPFQDKDGNWIFYGRGNLGVCTINLPHVALSAKGDINKFWEILDERLEACRWVGEWRYNKMKGVKAKEAPILWQHGAISRLNPEDDVIKAIDERGFTVTLGYSGIYETVKVLIGKSHTTDNGFDLAEKIMIHLRDKCTEWKTEKPWLRFALYGTPQESTTETFSKALIRDFGEIEGICGKGKLWVTNSYHVDIQEEINAFDKLAIEGELQKYSTGGAVSYVETYNMSKNQEALLQVVQYMYETIMYAEINFESDVCGECGYSGVMDNDPKTLEWVCPNCGNRNQDTLSVVRRTCGYLAETKWTPGRLLDILNRVKHL

SEQ ID NO: 469 - protein, 724 aa, Unknown
  Description of Unknown: uncultivated organism sequence
  Category: MG55 effectors
  Description: MG55-42 effector
MKIIKRSGAENTFDKEKIENAVAKANITVEEKDRLSEGEIGEIAQNIEDKCSEMNRAMDVETIQDWVEADIMRHGKYTVAKHYITYRYERSIVRQANTTDKQILSLLNFENEEVKQENSNKNPTVNSVQRDYMAGEVSKDITRRFLLPDDIVEAHEKGLIHFHDADYFAQHMHNCCLVNLEDMLQNGTVISEVMIEKPHSFSTACNIATQSIAQIASSQYGGQSITLSHLAPFVQISRDKYRREVKKEFAELNIPADEDTINKVAEMRVKAEIVQGVQMIQYQVITLMTTNGQAPFVTVFMYLDEVPEGQTRDDLAAIIEEMLRQRIQGVKNEKGVYITPAFPKLIYVLEEDNIREGSKYWELTKLAAKCTAKRMVPDYISEKKMKELKVDKNGNGQCYPCMGCRSFLTTYLDENGKPKYYGRFNQGVVTINLVDVACSSYKDMDKFWKIFDERLELCRRALMLRHERLKGTPSDVAPILWQNGALARLKKGETIDKLLFGGYSTISLGYAGLCECVRYMTGKSHTDPSATPFALEVMQHLNDACAKWRAETNIDFSLYGTPLESTTYKFARCLQKRFGVIEGVTDRNYITNSYHIHVTENIDAFDKLTFESQFQALSPGGAISYVEVPNMQNNIEAVLAVMQHIYDNIMYAELNTKSDYCQKCGFDGEIKIVEDDGKLVWECPNCGNRDQNTLNVARRTCGYIGTQFWNQGRTQEIKERVLHL

SEQ ID NO: 470 - protein, 463 aa, Unknown
  Description of Unknown: uncultivated organism sequence
  Category: MG55 effectors
  Description: MG55-43 effector
MEQITLTRKIELFVNEEGNKKNECYDLLHYLNNNLYKIANDSVNYLHIKKNLPEFILKHNKEDYEKYVNNLNKMSEIKNFKSTEFIELKNQNRDIINKYSNNEEYKKMIYNDSKETTLVYHNINKRLPKGLSSISASLSKKIENDYKIKEKEYFLGKSTLNIYKRGLPIPFNISGKLVKDPSLFFKFDNGKYYINLFGYNFGLFFGPDRSNNKAIIEHIINDTDKYKLCDSAIQFKDKKIFLLLSFKQPLDNTIKLDDNKVLGVDLGVNAPVYLAINDNDYYKKQIGDIHHFDSHKLQYKKRYTSLIKNLEISNGGRGRKKKLSALDKLKKVEKNWTNTEQHKISNSVIKEALNNNCKYINIENLENYKENLTENKKYIMRIWGYYGIQEKIMYKAKKHNIVVRKINPAYTSQKCHKCGNIEKTARNKQIFTCLNEKCSIFGKEIHADFNGAKNISLSTEFKK

SEQ ID NO: 471 - protein, 1231 aa, Unknown
  Description of Unknown: uncultivated organism sequence
  Category: MG55 effectors
  Description: MG55-44 effector
MSVFSKYRNFFPVKKSISLGAIPTPVTVSNMKKDRILENDIIREERASRMEDVYDEEYKKLIEKILSSMDNKKELKELISAYEKRKEDRNGYADAENDFVESISKALSESEEYKNLCNAEYFSKELPKKVSSEIADLISKLNFGSFETHRKTRTTLFGVKDGSVAKRIGHDNFLIYMDNCAKLENALSILGKETLEKYVAEMGDASDITEELIYGYAEKENYISLFSQKAIDDYNLLINGYTVGKRTKIKGINELINEHNQQEKEKEMKLAFLSKLQKLPLFDATSYSVIPESFSSDSELIESIDMLYNKDIGERKSLKSVIENAAKIFLGFSEVYDLSHIYINPKKNNAFSKNFLGKWNILERLFKEDFAKKNESPKLKGKKLDKLVEDAYKNKVFSFTDVEKIADMCDGFEEFSIEKAYIRDILDKALAVSNAYNEYKAYMEEREKMENAPAIKRDNRAAAVIRELCLAVKECERSLIYILHGEELIEVGAEGDAVFYEKFNSLAETIKDSDRLYNKIRNFVSQTKVSEDKTRLMFNNDEFLKGWSDSSKKGGAIIRDGKEYYLICIMKGFKGIENIQSDGNDLDLMEYNFTGDVSKCLGKNLMYTGMKNKSGAGSKYVYNENSKIVADYGLTEDVFNAYQNGIHTKGYADQGYTEEEHKDALRKIIRYFNKALPLAYSGFDAEGLRDDYETFNEYCNELNKRNFTLGFRKASRTKIDEYEKAGYIYKFRIWCRDFSEKAYGIKQNYALIFNALFNEKNEYYSKIRLCGSAKLIFVKASIKDEDKVVHKAGQPIRNKNPKSGKPTSTYSYDIIKDRRKLKDHYIIQLPYEINRQALGNPVNLNAVVLDDIRNGNLKSIVSIKTGQDNLLWVCVTDMEGNIKKQYPLNVIDNNDYREKISARQNEMKSGNKEWRPGADIKSLKEGYLTLAIRKIVDAVFENDAILLLESSNGNKKEKTFGVDTRLYDRLADMLQVKLHYCFSKRKPFLEEGGLLNAYQLCGALPTGDKKKKVFQNGIVFFTNTAYTKNTDPITGFVPPVIGEYLNLKSAISIISNIKEIGYEKGQYYLLIDKKMYKNNYEGKTDWKCYIAGERIVAIRDDSLARGRRYEKADIGKIFADFLKENGIDANKNIKEQILERDDKPFFASLLEILNNVFRMNNGHGDENFFVSPVKNDKGLFFDSRISKEIPCTDANAAYNMARKMVISIEKIKNEETKTIPTTAEYLERIQK

SEQ ID NO: 472 - protein, 724 aa, Unknown
  Description of Unknown: uncultivated organism sequence
  Category: MG55 effectors
  Description: MG55-45 effector
MKIIKRSGAENTFDREKIENAVAKANITVEEKDRLSEGEIEEIAQNIENKCSEMNRAMDVETIQDWVEADIMRHGKYTVAKHYITYRYERSIVRQANTTDKQILSLLNFENEEVKQENSNKNPTVNSVQRDYMAGEVSKDITRRFLLPDDIVEAHEKGMIHFHDADYFAQHMHNCCLVNLEDMLQNGTVISEVMIEKPHSFSTACNIATQSIAQIASSQYGGQSITLSHLAPFVQISRDKYRREVKKEFAELNIPADEDTINKVAEMRVKAEIVQGVQMIQYQVITLMTTNGQAPFVTVFMYLDEVPEGQTRDDLAAIIEEMLRQRIQGVKNEKGVYITPAFPKLIYVLEEDNIREGSKYWELTKLAAKCTAKRMVPDYISEKKMKELKVDENGNGQCYPCMGCRSFLTTYLDENGKPKYYGRFNQGVVTINLVDVACSSYKDMDKFWKIFDERLELCRRALMLRHERLKGTPSDVAPILWQNGALARLKKGETIDKLLYGGYSTISLGYAGLCECVRYMTGKSHTDPSATPFALKVMQHLNDACAKWRAETNIDFSLYGTPLESTTYKFARCLQKRFGIIEGVTDRNYITNSYHIHVTENIDAFDKLTFESQFQALSPGGAISYVEVPNMQNNIEAVLAVMQHIYENIMYAELNTKSDYCQKCGFDGEIKIAEDDGKLVWECPNCGNRDQNTMNVARRTCGYIGTQFWNQGRTQEIKERVLHL

SEQ ID NO: 473 - protein, 730 aa, Unknown
  Description of Unknown: uncultivated organism sequence
  Category: MG55 effectors
  Description: MG55-46 effector
MQVIKRDGRIIDFDRQKIVSAIGKANAEVKPKERASKDDIKSIIEYIEGLGKKRILVEDIQDIIEEKLMELDKYSLAKKYITYRYTRELVRKANTTDQSIKELIDGESEYWNNENSNKNAKVVTTQRDYLAGITSTDITRRFLLPKDIVEAHDEGIIHFHDADYFAQNALTNCELINLEDMLQNGTIMNGVMIEKPHRFLTAMTIATQIILAVTSSTYGGATVSLAHLAPFVRSSYDRYYKKYKDRGLKEEQCKEFAMQDTKKEVADGVQTFNYQVNSMTNTNGQAPFLSVCMYLGETKEYKKELAMVIEEFLKQRIEGFKNEKGVYITPAFPKLLYVLEKDNVTEDSKYWYLTELAAKCTAKRMVPDYISEKKMLELKIDKNGNGNCYPCMGCRSFLTPYVDPKTNKPKYYGRFNQGVVTINLVDVALSSDKDMDKFWKIFDERLELCHRALQVRHERLSKVTSDVAPILWQHGALARLKKGESIHPLLHGGYSTISLGYAGLYECVKYMTEHSHTDNGEGKDFGIQVMQRLNDKCKEWKAAEDIDYSVYGTPIESTTYKFAKCLKKRFGVIKGITDRDYITNSYHIPVFEEIDAFSKLSIESQFQQLSPGGAISYVETPNLQNNIEAVIQIIKFIYDNIMYAELNTKSDYCQECGFDGEILIDDNLEWYCPNCGNRNHDTLNVARRTCGYIGSQFWNKGRTQEIKERVLHIDNKDAEMPKKEKTKVAV

SEQ ID NO: 474 - protein, 724 aa, Unknown
  Description of Unknown: uncultivated organism sequence
  Category: MG55 effectors
  Description: MG55-47 effector
MKIIKRSGAENTFDKEKIENAVAKANITVEEKDRLSEGEIGEIAQNIEDKCSEMNRAMDVETIQDWVEADIMRHGKYTVAKHYITYRYERSIVRQANTTDKQILSLLNFENEEVKQENSNKNPTVNSVQRDYMAGEVSKDITRRFLLPDDIVEAHEKGLIHFHDADYFAQHMHNCCLVNLEDMLQNGTVISEVMIEKPHSFSTACNIATQSIAQIASSQYGGQSITLSHLAPFVQISRDKYRREVKKEFAELNIPTDEDTINKVAEMRVKAEIVQGVQMIQYQVITLMTTNGQAPFVTVFMYLDEVPEGQTRDDLAAIIEEMLRQRIQGVKNEKGVYITPAFPKLIYVLEEDNIREGSKYWELTKLAAKCTAKRMVPDYISEKKMKELKVDKNGNGQCYPCMGCRSFLTTYLDENGKPKYYGRFNQGVVTINLVDVACSSYKDMDKFWKIFDERLELCRRALMLRHERLKGTPSDVAPILWQNGALARLKKGETIDKLLFGGYSTISLGYAGLCECVRYMTGKSHTDPSATPFALEVMQHLNDACAKWRAETNIDFSLYGTPLESTTYKFARCLQKRFGVIEGVTDRNYITNSYHIHVTENIDAFDKLTFESQFQALSPGGAISYVEVPNMQNNIEAVLAVMQHIYDNIMYAELNTKSDYCQKCGFDGEIKIVEDDGKLVWECPNCGNRDQNTLNVARRTCGYIGTQFWNQGRTQEIKERVLHL

SEQ ID NO: 475 - protein, 724 aa, Unknown
  Description of Unknown: uncultivated organism sequence
  Category: MG55 effectors
  Description: MG55-48 effector
MKIIKRNGAEENFDISKIIMAVTKANAAVEECDRMTPRQIQRIAESVELACQELGRSAAVEEIQDMVEKQIMAHGAFEVAKAYITYRYTRSLVRRANTTDDRILSLIECNNEEAKQENSNKNPIVNSTQRDYMAGEVSRDITSRLLLPKDIVEAHEEGIIHFHDADYYAQHMHNCDLVNLEDMLENGTVITGTLIERPHSFSTACNIATQIIAQVASNQYGGQSISLTHLAPFVQVSRERIRREVEAEMQAIDAHPGEEKLAELVENRVREEIRRGVQTIQYQVVTLLTTNGQAPFVTVFMYLGEAKNEQERHDLAMIIEETLRQRYQGVKNEKGVWVTPAFPKLIYVLEEDNIHEDSPYWYLTELAARCTAKRMVPDYISEKKMLELKVDKNGEGHCYTCMGCRSFLTPYVDENGKPKYYGRFNQGVVTINLPDVALSSGGNMEKFWKIFDERLELCHRALMCRHERLKGTLSDAAPILWQYGALARLKKGEPIDKLLYGGYSTISLGYAGLYECVKYMTGKSHTDPSATPFALEIMQHMNDACAKWKQMHNIDFSLYGTPLESTTYKFAKCLQKRFGIIPGVTDKGYITNSYHIHVTEKIDAFSKLAFESKFQALSPGGAISYVEVPNMQNNIPAVLEVMKFIYDNIMYAELNTKSDYCQVCGYDGEIEIVEHDGKLIWRCPNCGNTDQDKMNVARRTCGYIGTQFWNQGRTQEIKERVLHL

SEQ ID NO: 476 - protein, 712 aa, Unknown
  Description of Unknown: uncultivated organism sequence
  Category: MG55 effectors
  Description: MG55-49 effector
MISKVRKRDGRIKDFDSRRIIEALRKAFEELGYTSSYEYINVAGSVVSELSKLDSEICDVEAIQDIVVKVLQESHPEVAKKYEEYRLKRTEIREENSKLIKSVEGLLNFSNDEVMLENSNKQAQLISTTRDLMAGEVSKFIVRKMIPKDILELHDRGVIHIHDMDYGANDMFNCELVNLQDMLDNGTVINKKMIHSPHTLRTAMTIATQISAQVASYQYGGQTMTLSHLAPYVRKSESVIRREIESDYPELSKERKDKIVERRLKKEIKDSVQLFNYQISTIQSTNGQAPFISLAIYLSERPGYEREVAMLAEEFFNQRIEGIENENGVKATQTFPKLLYFLDENNTYEGSEYFWLTQLAVKSTSLRMNPDYISAKKMKENVGHVFSCMGCRAFLSPFQDKDGNWIFYGRGNLGVCTINLPHVALSAKGDINKFWEILDERLEACRWVGEWRYNKMKGVKAKEAPILWQHGAISRLNPEDDVIKAIDERGFTVTLGYSGIYETVKVLIGKSHTTDNGFDLAEKIMIHLRDKCTEWKTEKPWLRFALYGTPQESTTETFSKALIRDFGEIEGICGKGKLWVTNSYHVDIQEEINAFDKLAIEGELQKYSTGGAVSYVETYNMSKNQEALLQVVQYMYETIMYAEINFESDVCGECGYSGVMDNDPKTLEWVCPNCGNRNQDTLSVVRRTCGYLAETKWTPGRLLDILNRVKHL

SEQ ID NO: 477 - protein, 724 aa, Unknown
  Description of Unknown: uncultivated organism sequence
  Category: MG55 effectors
  Description: MG55-50 effector
MKIIKRNGAEATFDISKIIMAITKANAAVEEGDRMTPRQIQRIAESVELACQELGRSAAVEEIQDMVEKQIMAHGAFEVAKAYITYRYTRSLVRRANTTDDRILSLIECNNEEAKQENSNKNPIVNSTQRDYMAGEVSRDITSRLLLPKDIVEAHEEGIIHFHDADYYAQHMHNCDLVNLEDMLENGTVITGTLIERPHSFSTACNIATQIIAQVASNQYGGQSISLTHLAPFVQVSRERIRREVAAEMQAINADPGEEKLAELVENRVREEIRRGVQTIQYQVVTLLTTNGQAPFVTVFMYLGEAKNEQERHDLAMIIEETLRQRYQGVKNEKGVWVTPAFPKLIYVLEEDNIHEDAPYWYLTELAARCTAKRMVPDYISEKKMLELKVDKNGEGHCYTCMGCRSFLTPYVDENGKPKYYGRFNQGVVTINLPDVALSSGGNMEKFWKIFDERLELCHRALMCRHERLKGTLSDAAPILWQYGALARLKKGEPIDKLLYGGYSTISLGYAGLYECVKYMTGKSHTDPSATPFALEVMQHMNDACKHWKQMHNIDFSLYGTPLESTTYKFAKCLQKRFGIIPGVTDKGYITNSYHIHVTENIDAFSKLAFESKFQALSPGGAISYVEVPNMQNNIPAVLEVMKFIYDNIMYAELNTKSDYCQVCGYDGEIEIVERDGKLIWRCPNCGNTDQDKMNVARRTCGYIGTQFWNQGRTQEIKERVLHL

SEQ ID NO: 478 - protein, 463 aa, Unknown
  Description of Unknown: uncultivated organism sequence
  Category: MG55 effectors
  Description: MG55-51 effector
MARRIKNVASNNYTLGIDIGSTTAKLALMCDGKIVYSKYQRHRSRIISTTLDMLREMKEIYPVDKVRVTISGSAGMGMAEKAGIDFIQEVYATGEVVYKLAPDTGVVIELGGEDAKVIFFKGGVDERMNGSCAGGTGAFIDQMAVLLNMSVDDMDKASLEAKRIYPIASRCGVFAKTDIQPLLNQGASKSDIAASIFQAVVNQTITGLIQGRKIEGKVMFLGGPLYYCEGLKKRFYETLSLTEETAVFPEYALYAVAMGASMYAQNSEEISFEELEKRIENSAKCESRGLDTLPPLFASKEEYDYFVQRHNKATVPQKDINTYIGNAWLGIDCGSTTTKLVLISDDRSILYSFYSSNKGNPVKLVKEQLEIIYSLCQNRIKICGSSVTGYGEELIRHAFRTDEGVVETIAHYTAAKYFRPDVDFILDIGGQDIKCFKIRNGAIDSIIFRVRFFCRDIRKGNGI

SEQ ID NO: 479 - protein, 420 aa, Unknown
  Description of Unknown: uncultivated organism sequence
  Category: MG55 effectors
  Description: MG55-52 effector
MVTSSMKIKIIPVDVISKNWIFDIFNVSYKILNRAYDISRMLHQYPVIMSPVTPPKSQVYNLTTQEFPKVITTYLRDWVYQAENNYKSDVKAGLLSGKRSPRLYKKYGATRFQFLKNSNPKLIKENGDFFILINSRTNIKFKIIFDKKTGHLKTMLNRFLDLENKKYNLNSTFLIKYTNRKELMLILSYEQDIQGYVGIDNRVMGIDMGVRRFISLRINDIPSYQKSIHSEKLVQQKYGIAMKNKRVQESSVLAKSGHGRTRKMQVYNKVKDSETSFTDNVLDKLSKEVIESAAKLKVQQINMERLDKNSMKEQNSYLGRYWGVMTLMNLIEQKAIKRGIIIKYIDPYHTSQICSCCGSIGERNGAEFKCLSSKCDDFNKVIDSDYNAAMNIATSVDYLDDASKGKYYLNKTEKVLEEVL

SEQ ID NO: 480 - protein, 724 aa, Unknown
  Description of Unknown: uncultivated organism sequence
  Category: MG55 effectors
  Description: MG55-53 effector
MKIIKRNGAEVGFDITKIIIAITKANEAVEEADRMTPMQIQRIAESVELQCQKMNRAPTVEEIQDMVEHYIMAHGAFEVAKHYITYRYTRSLVRKSNTTDDKILSLIECNNEEAKQENSNKNPVVNSTQRDYMAGEVSRDLSERILLPQDIVEAHREGIIHFHDSDYYAQHMHNCDLVNLEDMLQNGTVITGTLIEKPHSFATACNIATQIVAQVASNQYGGQSISLTHLAPFVQVSRDKIRASVRSEFDAVGVAVTEDDINAIAEKRLREEIRRGVQTIQYQVVTLLTTNGQAPFVTVFMYLGEAKNQQEKDDLALIIEETLLQRYQGVKNEKGVWVTPAFPKLIYVLEEDNVHEDSKYWYLTKLAAKCTAKRMVPDYISEKKMLELKVDKNGNGHCYPCMGCRSFLTPYVDENGQPKYYGRFNQGVVTVNLPDIALSSGGNIEKFWRIFDERMELCHRALLCRHERLKGTLSDAAPILWQYGACARLKKGEPIDKLLYGGYSTISLGYAGLYECVKYMTGKSHTDPAATPFALEIMNALNAACKKWKAQHNIDFSLYGTPLESTTYKFAKCLQKRFGVIKGITDKGYITNSYHVHVTEPIDAFKKLEFEAQFQHLSPGGAISYVEVPDMQNNLDAVLEVMKFIYDHIIYAELNTKSDYCQVCGWDGEIEVVEEDGKLIWKCPQCGNTDQDKMNVARRTCGYIGTQFWNQGRTQEIKDRVLHL

SEQ ID NO: 481 - protein, 719 aa, Unknown
  Description of Unknown: uncultivated organism sequence
  Category: MG55 effectors
  Description: MG55-54 effector
MQVVKRDGKLVDFDQSKIRVAIEKANREVRPRERATKEEINQIIDYVEDLDKKRILVEDIQDIIEEQLMSFGKYLLAKKYITYRYTRELVRKANTTDQSIKELIDGESDYWNNENSNKNARVVTTQRDYLAGITSTDITRRFLLPEDVVKAHDEGIIHFHDADYFAQNALTNCELINLEDMLQNGTIMNGVMIEKPHRFLTAMTIATQIILGVTSSTYGGATVSLTHLAPFVKSSYDRYYKKYKKRGLSEAQCKEYAEQDTKKEVSDGVQTFNYQVNSMTNTNGQAPFLSVCMYLGETDEYKKELAMIIEEFLKQRIEGFKNEKGVYITPAFPKLLYVLEEDNIHKDSKYWYLTELAAKCTAKRLVPDYISEKKMKEYKIDKNGNGNCYPCMGCRSFLTPYVDPETNKPKYYGRFNQGVVTINLVDVALSSKQDEEKFWKIFDERLELCHKALQIRHERLSKVTSDVAPILWQHGALARLEKGESIHKLLHDGYSTISLGYAGLYECVKYMTGHSHTDNGEGEEFAIKVMQKLNDKCKEWKEAEKIDYSVYGTPIESTTYKFAKCLKKRFGTVEGITDRNYITNSYHVPVFEDIDAFSKLKLESKFQKLSPGGAISYVETPNLQDNLEVVLQIINFIYDNIMYAELNTKSDYCQKCGFDGEILIDENLEWYCPNCGNRDHNTLNVARRTCGYIGSQFWNKGRTQEIKERVLHIDNKDDE

SEQ ID NO: 482 - protein, 724 aa, Unknown
  Description of Unknown: uncultivated organism sequence
  Category: MG55 effectors
  Description: MG55-55 effector
MKIIKRSGAENTFDKEKIENAVAKANITVEEKDRLSEGEIGEIAQNIEDKCSEMNRAMDVETIQDWVEADIMRHGKYTVAKHYITYRYERSIVRQANTTDKQILSLLNFENEEVKQENSNKNPTVNSVQRDYMAGEVSKDITRRFLLPDDIVEAHEKGLIHFHDADYFAQHMHNCCLVNLEDMLQNGTVISEVMIEKPHSFSTACNIATQSIAQIASSQYGGQSITLSHLAPFVQISRDKYRREVKKEFAELNIPADEDTINKVAEMRVKAEIVQGVQMIQYQVITLMTTNGQAPFVTVFMYLDEVPEGQTRDDLAAIIEEMLRQRIQGVKNEKGVYITPAFPKLIYVLEEDNIREGSKYWELTKLAAKCTAKRMVPDYISEKKMKELKVDKNGNGQCYPCMGCRSFLTTYLDENGKPKYYGRFNQGVVTINLVDVACSSYKDMDKFWKIFDERLELCRRALMLRHERLKGTPSDVAPILWQNGALARLKKGETIDKLLFGGYSTISLGYAGLCECVRYMTGKSHTDPSATPFALEVMQHLNDACTKWRAETNIDFSLYGTPLESTTYKFARCLQKRFGVIEGVTDRNYITNSYHIHVTEDIDAFDKLTFESQFQALSPGGAISYVEVPNMQNNIEAVLAVMQHIYDNIMYAELNTKSDYCQKCGFDGEIKIVEDDGKLVWECPNCGNRDQNTLNVARRTCGYIGTQFWNQGRTQEIKERVLHL

SEQ ID NO: 483 - protein, 711 aa, Unknown
  Description of Unknown: uncultivated organism sequence
  Category: MG55 effectors
  Description: MG55-56 effector
MGIIVEKRDGVSRVAFDSNRIRNAVMKANEQVGEEDRASEAEIDLIVDEVIEKFGGLGYASVEEIQDVVEENLLSMKRKVGIKYHDFRRARAKTRNAAKESILQLVGGANKDVMEENSNKKATVASTQRDLIAGEVSKDITMSDILPTKIAKAHKEGVIHFHDMDYFIQPMFNCCLVNIKDMLDNGTVMNGKMIESPKSFQVACTVTTQIIASVASNQYGGQSVNVKHLAKYIRVSEKKYRKRFEALGMTGETLENLVEAELKAEISAGIQTMQYQINTLMTTNGQTPFVTLFLELEEGSEYEVEQAKLIEEILKQRLEGIKNNKGVYVTPAFPKLIYVLDEHNCLKGGKYDYLTKLAVKCSAKRMYPDYISAKKMRENHEGEVFSCMGCRSFLSEWKDEDGNYKWEGRFNQGVVSINLPQIAILSQTEEGADELRFWQLLDERLAICFEALMLRHKRLLGTKSDVSPIHWQDGAIARLKPGEVIDPLLKDGYSTISLGYIGIYETTKLMTGESNTTEKGRAFALKVMKYLRDTCDRWKSVTGLGFGLYGTPAESLCYRFARIDKKRFGEIKDVTDKGYYTNSYHVDVREPIDAFAKLQYEAEFQKISSGGAISYIEIPNMSKNLDALEAVVSYIYDNIQYAEVNTKSDYCQECGYDGEIIINDDNEWECPCCGNKNHETMNVVRRTCGYLGENFWNVGKTKEIKARVTHL

SEQ ID NO: 484 - protein, 724 aa, Unknown
  Description of Unknown: uncultivated organism sequence
  Category: MG55 effectors
  Description: MG55-57 effector
MKVIKRNGTEVVFDISKILVAVGKANNNVKEEHRMTPMQIQRIAESVELNCIELGRSPSVEEIQDMVEHQIMAHGAFEVAKEYITYRYTRSLVRRSNTTDDKILSLIECSNEEAKQENSNKNPIVNSTQRDYMAGEVSRDITNRLLLPKDIVQAHEEGIIHFHDADYYAQHMHNCDLVNLEDMLQNGTVITGTLIERPHSFSTACNIATQIIAQVASNQYGGQSISLAHLAPFVQVSREKIRRIVRTEMEKIHATPSEEEFNDLVESRLRDEVARGVQTIQYQVLTLLTTNGQAPFVTVFMYLNEARNEQEKKDLALIIEETLKQRYQGVKNEAGVWITPAFPKLIYVLEEDNIHDDSPYYYLTKLAAKCTAKRMVPDYISEKMMFQLKIDKNGEGHCYPCMGCRSFLTPYVDENGKPKYYGRFNQGVVTINLPDVALSSGGDIEKFWQIFDERLELCHRALMERHNRLKGTPSDVAPILWQYGACARLKKGEPIDKLLYGGYSTISLGYAGLYECVKYMTGKSHTDPAATPFALQIMNTMNAACKKWKEMHNIDFSLYGTPLESTTYKFAKCLQKRFGVIPGITDKGYITNSYHVHVTEKINAFDKLAFEAQFQHLSPGGAISYVEVPDMQNNLDAVLEVMKFIYDHIIYAELNTKSDYCQVCGWDGEIKIEEEDGKLIWKCPNCGNTDQNKMNVARRTCGYIGTQFWNQGRTQEIRDRVLHL

SEQ ID NO: 485 - protein, 719 aa, Unknown
  Description of Unknown: uncultivated organism sequence
  Category: MG55 effectors
  Description: MG55-58 effector
MQVVKRDGKLVDFDQSKIRVAIEKANREVRPRERATKEEINQIIDYVEDLDKKRILVEDIQDIIEEQLMSFGKYLLAKKYITYRYTRELVRKANTTDQSIKELIDGESDYWNNENSNKNARVVTTQRDYLAGITSTDITRRFLLPEDVVKAHDEGIIHFHDADYFAQNALTNCELINLEDMLQNGTIMNGVMIEKPHRFLTAMTIATQIILGVTSSTYGGATVSLTHLAPFVKSSYDRYYKKYKKRGLSEAQCKEYAEQDTKKEVSDGVQTFNYQVNSMTNTNGQAPFLSVCMYLGETDEYKKELAMIIEEFLKQRIEGFKNEKGVYITPAFPKLLYVLEEDNIHKDSKYWYLTELAAKCTAKRLVPDYISEKKMKELKIDKNGNGNCYPCMGCRSFLTPYVDPETNKPKYYGRFNQGVVTINLVDVALSSKQDEEKFWKIFDERLELCHKALQIRHERLSKVTSDVAPILWQHGALARLKKGESIHKLLHDGYSTISLGYAGLYECVKYMTGHSHTDNGEGEEFAIKVMQKLNDKCKEWKEAEKIDYSVYGTPIESTTYKFAKCLKKRFGTIEGITDRSYITNSYHVPVFEDIDAFSKLKLESKFQKLSPGGAISYVETPNLQDNLEVVLQIINFIYDNIMYAELNTKSDYCQKCGFDGEILIDENLEWYCPNCGNRDHNTLNVARRTCGYIGSQFWNKGRTQEIKERVLHIDNKDDE

SEQ ID NO: 486 - protein, 724 aa, Unknown
  Description of Unknown: uncultivated organism sequence
  Category: MG55 effectors
  Description: MG55-59 effector
MKVIKRNGTEVVFDISKILIAVGKANNNVKEEHRMTPMQIQRIAESVELNCIELGRSPSVEEIQDMVEHQIMAHGAFEVAKEYITYRYTRSLVRRSNTTDDKILSLIECSNEEAKQENSNKNPIVNSTQRDYMAGEGSRDITNRLLLPKDIVQAHEEGIIHFHDADYYAQHMHNCDLVNLEDMLQNGTVITGTLIERPHSFSTACNIATQIIAQVASNQYGGQSISLAHLAPFVQVSREKIRRIVRTEMEKIHATPSEEEFNDLVESRLRDEVARGVQTIQYQVLTLLTTNGQAPFVTVFMYLNEARNEQEKKDLALIIEETLKQRYQGVKNEAGVWITPAFPKLIYVLEEDNIHDDSPYYYLTKLAAKCTAKRMVPDYISEKMMFQLKIDKNGEGHCYPCMGCRSFLTPYVDENGKPKYYGRFNQGVVTINLPDVALSSGGDIEKFWQIFDERLELCHRALMERHNRLKGTPSDVAPILWQYGACARLKKGEPIDKLLYGGYSTISLGYAGLYECVKYMTGKSHTDPAATPFALQIMNTMNAACKKWKEMHNIDFSLYGTPLESTTYKFAKCLQKRFGVIPGITDKGYITNSYHVHVTEKINAFDKLAFEAQFQHLSPGGAISYVEVPDMQNNLDAVLEVMKFIYDHIIYAELNTKSDYCQVCGWDGEIKIEEEDGKLIWKCPNCGNTDQNKMNVARRTCGYIGTQFWNQGRTQEIRDRVLHL

SEQ ID NO: 487 - protein, 712 aa, Unknown
  Description of Unknown: uncultivated organism sequence
  Category: MG55 effectors
  Description: MG55-60 effector
MISKVRKRDGRIKDFDSRRIIEALRKAFEELGYTSSYEYINVAGSVVSELSKLDSEICDVEAIQDIVVKVLQESHPEVAKKYEEYRLKRTEIREENSKLIKSVEGLLNFSNDEVMLENSNKQAQLISTTRDLMAGEVSKFIVRKMIPKDILELHDRGVIHIHDMDYGANDMFNCELVNLQDMLDNGTVINKKMIHSPHTLRTAMTIATQISAQVASYQYGGQTMTLSHLAPYVRKSESVIRREIESDYPELSKERKDKIVERRLRKEIKDSVQLFNYQISTIQSTNGQAPFISLAIYLSERPGYEREVAMLAEEFFNQRIEGIENENGVKATQTFPKLLYFLDENNTYEGSEYFWLTQLAVKSTSLRMNPDYISAKKMKENVGHVFSCMGCRAFLSPFQDKDGNWIFYGRGNLGVCTINLPHVALSAKGDINKFWEILDERLEACRWVGEWRYNKMKGVKAKEAPILWQHGAISRLNPEDDVIKAIDERGFTVTLGYSGIYETVKVLTGKSHTTDNGFDLAEKIMIHLRDKCTEWKTEKPWLRFALYGTPQESTTETFSKALIRDFGEIEGICGKGKLWVTNSYHVDIQEEINAFDKLAIEGELQKYSTGGAVSYVETYNMSKNQEALLQVVQYMYETIMYAEINFESDVCGECGYSGVMDNDPKTLEWVCPNCGNRNQDTLSVVRRTCGYLAETKWTPGRLLDILNRVKHL

SEQ ID NO: 488 - protein, 722 aa, Unknown
  Description of Unknown: uncultivated organism sequence
  Category: MG55 effectors
  Description: MG55-61 effector
MEVIKRDGSKVAFDGSKIENAILKAMRYGSGIVKPEIASKISHEIEDWHKSSGAASISIYRIEGQVFEKLIEKGEVLTAKAYEGYRKVREFQRETNTIDNAIYGIVNQTNKEAMDENSNKDATVLATQRDLIAGEFSRDYCRRLLLPPKIVQAHDDGIIHFHDMDYYIQKMHNCDLVNLKDMFANGTVINDKLIETPKSLQTACTVATQIVQQVANGQYGGQTISISHLAPYVRVSYKKHLKAVRKEGKEVGIDYTEEQIEKIAKSRLHEEIKAGVQTIQYQINTFSTTNGQAPFLSIFMYLREEPDYIEETALLIEEILKQRYIGMKNPVGAYVTPAFPKLLYVLDDNNVPDDSQYRYLTDLAVKCVSKRMMPDFISAKIMRENYEGQVFPCMGCRSFLSPWKNEKGEYQWYGRFNQGVVTLNLTDVGLSANKNMDSFWKILDERLDLCYEALMLRHESLKGTPSDISPIHWQYGAIARLKPGEKIDSLLDTCYSTLSLGYIGLYECVVALIGQSHTTEEGDALALEIMQKLRNTCDKWKKDTGLGFALYGTPAESTTYTLARALKKRFGIVPGVTDKDYITNSYHVNVREHIDAFSKLGFEAKFQKISSGGAISYVEVTNMTNNFDAMKELINYMYETIQYAEINTKSDYCQECGFSGEILLDENNEWYCPNCGNRNHKTLNVCRRTCGYLGDNFWNKGRTQEIKERFVHLDNRVYQENN

SEQ ID NO: 489 - protein, 724 aa, Unknown
  Description of Unknown: uncultivated organism sequence
  Category: MG55 effectors
  Description: MG55-62 effector
MKIIKRNGAEENFDISKIIMAVTKANAAVEECDRMTPRQIQRIAESVELACQELGRSAAVEEIQDMVEKQIMAHGAFEVAKAYITYRYTRSLVRRANTTDDRILSLIECNNEEAKQENSNKNPIVNSTQRDYMAGEVSRDITSRLLLPKDIVEAHEEGIIHFHDADYYAQHMHNCDLVNLEDMLENGTVITGTLIERPHSFSTACNIATQIIAQVASNQYGGQSISLTHLAPFVQVSRERIRREVEAEMQAIDAHPGEEKLAELVENRVREEIRRGVQTIQYQVVTLLTTNGQAPFVTVFMYLGEAKNEQERHDLAMIIEETLRQRYQGVKNEKGVWVTPAFPKLIYVLEEDNIHEDSPYWYLTELAARCTAKRMVPDYISEKKMLELKVDKNGDGHCYTCMGCRSFLTPYVDENGKPKYYGRFNQGVVTINLPDVALSSGGNMEKFWKIFDERLELCHRALMCRHERLKGTLSDAAPILWQYGALARLKKGEPIDKLLYGGYSTISLGYAGLYECVKYMTGKSHTDPSATPFALEIMQHMNDACAKWKQMHNIDFSLYGTPLESTTYKFAKCLQKRFGIIPGVTDKGYITNSYHIHVTEHIDAFSKLAFESKFQALSPGGAISYVEVPNMQNNIPAVLEVMKFIYDNIMYAELNTKSDYCQVCGYDGEIEIVEHDGKLIWRCPNCGNTDQDKMNVARRTCGYIGTQFWNQGRTQEIKERVLHL

SEQ ID NO: 490 - protein, 724 aa, Unknown
  Description of Unknown: uncultivated organism sequence
  Category: MG55 effectors
  Description: MG55-63 effector
MKIIKRNGAEATFDISKIIMAITKANAAVEEGDRMTPRQIQRIAESVELACQELGRSAAVEEIQDMVEKQIMAHGAFEVAKAYITYRYTRSLVRRANTTDDRILSLIECNNEEAKQENSNKNPIVNSTQRDYMAGEVSRDITSRLLLPKDIVEAHEEGIIHFHDADYYAQHMHNCDLVNLEDMLENGTVITGTLIERPHSFSTACNIATQIIAQVASNQYGGQSISLTHLAPFVQVSRERIRREVAAEMQAINADPGEEKLAELVENRVREEIRRGVQTIQYQVVTLLTTNGQAPFVTVFMYLGEAKNEQERHDLAMIIEETLRQRYQGVKNEKGVWVTPAFPKLIYVLEEDNIHEDAPYWYLTELAARCTAKRMVPDYISEKKMLELKVDKNGEGHCYTCMGCRSFLTPYVDENGKPKYYGRFNQGVVTINLPDVALSSGGNMEKFWKIFDERLELCHRALMCRHERLKGTLSDAAPILWQYGALARLKKGEPIDKLLYGGYSTISLGYAGLYECVKYMTGKSHTDPSATPFALEIMQHMNDACKHWKQMHNIDFSLYGTPLESTTYKFAKCLQKRFGIIPGVTDKGYITNSYHIHVTENIDAFSKLAFESKFQALSPGGAISYVEVPNMQNNIPAVLEVMKFIYDNIMYAELNTKSDYCQVCGYDGEIEIVERDGKLIWRCPNCGNTDQDKMNVARRTCGYIGTQFWNQGRTQEIKERVLHL

SEQ ID NO: 491 - protein, 341 aa, Unknown
  Description of Unknown: uncultivated organism sequence
  Category: MG55 effectors
  Description: MG55-64 effector
MAATMKDIARRTGLGLATISSYFNGGNVREKNRVKIEEAIQELHYEVNEVARGLKTNATKTIGVVIPELNNTFCAEIITGMEDVLRSHGYATIVCDCRTDKKLERDAVEFLSRKRVDGIISMPVDAEGNHLKKFQKTGKPIVLIDRRIRELFCDSVLVDNEKAAEDAMRVFFQAGHRKIGIIGGPEEISTAQERLQGYRNAYEKENIPVRESLIYHGDYTIQGGVQGIEKLVADNPDMTAVFVTNYEMTMGAVIGMNELGLKIPEQLSMIGFDNLQFARACNPKLTIVAQPTQGIAGEVAGIMLKRLEGAASEETEPITEKLGAEIIMGKSVRVLDEKEKL

SEQ ID NO: 492 - protein, 724 aa, Unknown
  Description of Unknown: uncultivated organism sequence
  Category: MG55 effectors
  Description: MG55-65 effector
MKIIKRNGAEVGFDITKIIIAITKANEAVEEADRMTPMQIQRIAESVELQCQKMNRAPTVEEIQDMVEHYIMAHGAFEVAKHYITYRYTRSLVRKSNTTDDKILSLIECNNEEAKQENSNKNPVVNSTQRDYMAGEVSRDLSERILLPQDIVEAHREGIIHFHDSDYYAQHMHNCDLVNLEDMLQNGTVITGTLIEKPHSFATACNIATQIVAQVASNQYGGQSISLTHLAPFVQVSRDKIRASVRSEFDAVGVAVTEDDINAIAEKRLREEIRRGVQTIQYQVVTLLTTNGQAPFVTVFMYLGEAKSQQEKDDLALIIEETLLQRYQGVKNEKGVWVTPAFPKLIYVLEEDNIHEDSKYWYLTKLAAKCTAKRMVPDYISEKKMLELKVDKNGNGHCYPCMGCRSFLTPYVDENGQPKYYGRFNQGVVTVNLPDIALSSGGNIEKFWRIFDERMELCHRALLCRHERLKGTLSDAAPILWQYGACARLKKGEPIDKLLYGGYSTISLGYAGLYECVKYMTGKSHTDPAATPFALEIMNALNAACKKWKAQHNIDFSLYGTPLESTTYKFAKCLQKRFGVIKGITDKGYITNSYHVHVTEPIDAFKKLEFEAQFQHLSPGGAISYVEVPDMQNNLDAVLEVMKFIYDHIIYAELNTKSDYCQVCGWDGEIEVVEEDGKLIWKCPQCGNTDQDKMNVARRTCGYIGTQFWNQGRTQEIKDRVLHL

SEQ ID NO: 493 - protein, 707 aa, Unknown
  Description of Unknown: uncultivated organism sequence
  Category: MG55 effectors
  Description: MG55-66 effector
MQVIKRDGSVVDYDRAKIAIAIGKANAEVEKGERASKEEIGAILDHIESKKKKRMLVEDIQDIIEEKLMEQGHYELAKTYIIYRYNRALVRKANTTDEAILSLISNSNKDVMEENSNKNALAAATQRDLIAGEVSKDLTRRILLPEKISKAHDDGILHFHDADYFIQPIFNCCLINIGDMLDNGTVMNGKLIESPKSFQVACTVVTQIIAAVACSQYGGQSVDIRHLGKYLRKSRTKFENHYREACPELSDDEVKKLVDDRIQDELKSGVQTIQYQINTLMTTNGQSPFVTLFLYLDKDDEYLEENAQIVMEILRQRYEGIKNEKGVYVTPAFPKLVYVLDEINCLKGGKYDYITEFAVKCSAKRLYPDYISAKEMRETYEGNVFSPMGCRSFLSPWKDENGNYKFEGRFNQGVVSINLPQIGIIAQGDEEKFWKLFDERLDLCREALMCRHRALLGTKSDVSPIHWQYGAIARLDKGETIDKLLMGGYSTLSLGYIGLYEVTKLMTGVTQTDPKGEEFAVRVMQHMRDKTDQWKKETGLGFALYGTPAESLCYRFARIDKERFGTIEDVTDKGYYTNSYHVDVREHIDAFSKFSFEAQFQKISSGGCISYVEIPNMQNNLEAMQEIVRFIYDNIQYAEFNTKSDYCHVCGWDGEIIINDDNEWECPNCHNKDHKKMNVTRRTCGYLGENFWNLGKTKEIKARVLHL

SEQ ID NO: 494 - protein, 720 aa, Unknown
  Description of Unknown: uncultivated organism sequence
  Category: MG55 effectors
  Description: MG55-67 effector
MKIMKRSGIEADFDVTKISAAIKKANCEVAAVDQLSEEQIEEISTNVEKICSDIGRTLGVEEIQDLVEDQIMNKRAFVLARKYITYRYTRALVRKSNSTDKQILSLLECNNEEAKQENSNKNPTVNSVQRDYMAGEVSKDITKRFLLPEDIVAAHEQGIIHFHDSDYFAQHMHNCCLVNLEDMLQNGTVISETMIERPKSFSTACNIATQSIAQIASSQYGGQSISLAHLAPFVDVSRQKFRLQVRDEFEKANIAASEEQINNVAEQRVRDEIKRGVQMIQYQVITLMTTNGQAPFVTVFMYLDEVPEGRLRDDLALVTEEILRQRIQGVKNEKGVYITPAFPKLIYVLEEDNITEGSKYWELTKLAAKCTAKRMVPDYISEKIMRKLKDGNCYPCMGCRSFLTVYHDENDKPKFYGRFNQGVVTINLVDVACSSGKDMDKFWQIFDERLDLCYRALMCRHKRLLDTPSDVAPILWQYGALARLKKGETINKLLYNGYSTISLGYAGLCECTRYMTGHSHTDPESTPFALQVMQHMNDACAKWREETNIDFSLYGTPLESTTYKFAKCLQKRFGIIEGVTDRGYITNSYHVHVTEEINAFDKLKFEAQFQELSPGGAISYVEVPNMENNIEAVLNVMKYIYDNIMYAELNTKSDYCQCCGYTGQIQIVTDEHGKLIWECPNCGNTDQNKMNVARRTCGYIGTQFWNQGRTQEIKERVLHL

SEQ ID NO: 495 - protein, 732 aa, Unknown
  Description of Unknown: uncultivated organism sequence
  Category: MG55 effectors
  Description: MG55-68 effector
MKVIKRDGKIVEYDREKIRIAIGKANNEVSKKYRATEEEIKDIIEYIEELKKSRILVEDIQDIIEQKLMEMGKYELAKEYITYRYTRALVRKANTTDQSIKELIEGESEYWNNENSNKNAKVVTTQRDYLAGITSTDITRRFLLPDDVVKAHDEGIIHFHDADYFAQNALHNCDLINLEDMLQNGTNINGVLIEKPHKFLTAMTIATQIITAVTSSQYGGATVTMTHLAPFVRDSYNAYLKKYRERHLSKEQCEKFAKEDLKKEIQDGVQTFQYQINSMTTTNGQSPFLSVCMYLGETTEYKEELAMIIEEILKQRILGMKNEKGVYVTPAFPKLLYVLEEDNIHEDSKYYYLTKLAAKCTAKRMVPDYISEKIMKELKVDKNGNGQCYPCMGCRSFLTPYIDPETNKPKYYGRFNQGVVTINLVDVALSSGKDMNKFWKIYEERLELCHKALKVRHERLAKATSDVAPILWQYGALARLKKGESIHKLLHGGYSTISLGYAGLYECVKYMTGNSHTDGAKGEEFGLEVMQKLNDKCKEWKEAEDIDYSVYGTPIESTTYKFAKCLQRRFGKIKGITDRNYITNSYHVPVFEEIDAFSKLKLESKFQRLSPGGAISYVETPNLQDNLEVVLQIIKFIYDNIMYAELNTKSDYCQKCGFDGEILLDDNLEWYCPNCGNRDHSTLNVARRTCGYIGSNFWNKGRTQEIKERVLHIDNKDDTKKVEKEAKKDEIQ

SEQ ID NO: 496 - protein, 724 aa, Unknown
  Description of Unknown: uncultivated organism sequence
  Category: MG55 effectors
  Description: MG55-69 effector
MKIIKRNGAEVGFDITKIIIAITKANEAVEEADRMTPMQIQRIAESVELQCQKMNRAPTVEEIQDMVEHYIMAHGAFEVAKHYITYRYTRSLVRKSNTTDDKILSLIECNNEEAKQENSNKNPVVNSTQRDYMAGEVSRDLSERILLPQDIVEAHREGIIHFHDSDYYAQHMHNCDLVNLEDMLQNGTVITGTLIEKPHSFATACNIATQIVAQVASNQYGGQSISLTHLAPFVQVSRDKIRASVRSEFDAVGVAVTEDDINAIAEKRLREEIRRGVQTIQYQVVTLLTTNGQAPFVTVFMYLGEAKSQQEKDDLALIIEETLLQRYQGVKNEKGVWVTPAFPKLIYVLEEDNVHEDSKYWYLTKLAAKCTAKRMVPDYISEKKMLELKVDKNGNGHCYPCMGCRSFLTPYVDENGQPKYYGRFNQGVVTVNLPDIALSSGGNIEKFWRIFDERMELCHRALLCRHERLKGTLSDAAPILWQYGACARLKKGEPIDKLLYGGYSTISLGYAGLYECVKYMTGKSHTDPAATPFALEIMNALNAACKKWKAQHNIDFSLYGTPLESTTYKFAKCLQKRFGVIKGITDKGYITNSYHVHVTEPIDAFKKLEFEAQFQHLSPGGAISYVEVPDMQNNLDAVLEVMKFIYDHIIYAELNTKSDYCQVCGWDGEIEVVEEDGKLIWKCPQCGNTDQDKMNVARRTCGYIGTQFWNQGRTQEIKDRVLHL

SEQ ID NO: 497 - protein, 719 aa, Unknown
  Description of Unknown: uncultivated organism sequence
  Category: MG55 effectors
  Description: MG55-70 effector
MQVIKRDGKVVDFDQSKIKIAIEKANKEVKPRERATKEEINQIISYIEELDKKRILVEDIQDIIEEQLMTFGKYILAKKYITYRYTRELVRKSNTTDQSIKELIDGESDYWNNENSNKNARVVTTQRDYLAGITSTDITRRFLLPEDVVKAHDEGIIHFHDADYFAQNALTNCELINLEDMLQNGTIMNGVMIEKPHRFLTAMTIATQIILGVTSSTYGGATVSITHLAPFVKSSYEKYYKKYKQRGLNEKQCKEYAEQDTRKEVSDGVQTFNYQVNSMTNTNGQAPFLSVCMYLGETDEYKQELAMIIEEFLKQRIEGFKNEKGVYITPAFPKLLYVLEEDNIHKDSKYWYLTELAAKCTAKRLVPDYISEKKMKELKIDKNGNGNCYPCMGCRSFLTPYVDPETNKPKYYGRFNQGVVTINLVDVALSSKQDEEKFWKIFDERLELCHKALQIRHERLSKVTSDVAPILWQHGALARLKKGESIHKLLHDGYSTISLGYAGLYECVKYMTGNSHTDNGIGEEFALKVMQKLNDKCKEWKEAEKIDYSVYGTPIESTTYKFAKCLRKRFGTIEGITDRSYITNSYHVPVFEDIDAFSKLKLESKFQKLSPGGAISYVETPNLQNNLEVVLQIIHFIYDNIMYAELNTKSDYCQKCGFDGEILIDENLEWYCPNCGNRDHNTLNVARRTCGYIGSQFWNKGRTQEIKERVLHIDNKDDE

SEQ ID NO: 498 - protein, 722 aa, Unknown
  Description of Unknown: uncultivated organism sequence
  Category: MG55 effectors
  Description: MG55-71 effector
MEVIKRDGSKVAFDGTKIENAILKAMRYGSGIVKPEIASKISHEIEDWHKSSGAASISIYRIEGQVFEKLIEKGEVLTAKAYEGYRKVREFQRETNTIDNAIYGIVNQTNKEAMDENSNKDATVLATQRDLIAGEFSRDYCRRLLLPPKIVQAHDDGIIHFHDMDYYIQKMHNCDLVNLKDMFANGTVINDKLIETPKSLQTACTVATQIVQQVANGQYGGQTISISHLAPYVRVSYKKHLKAVRKEGEEVGIDYTEEQIEKIAKSRLHEEIKAGVQTIQYQINTFSTTNGQAPFLSIFMYLREEPDYIEETALLIEEILKQRYIGMKNPVGAYVTPAFPKLLYVLDDNNVPDGSQYRYLTDLAVKCVSKRMMPDFISAKIMRENYEGQVFPCMGCRSFLSPWKNEKGEYQWYGRFNQGVVTLNLTDVGLSANKNMDSFWKILDERLDLCYEALMLRHESLKGTPSDISPIHWQYGAIARLKPGEKIDSLLDTCYSTLSLGYIGLYECVVALIGQSHTSEEGDALALEIMQKLRNACDKWKKDTGLGFALYGTPAESTTYTLARALKKRFGVVPGVTDKDYITNSYHVNVREQIDAFAKLGFEAKFQKISSGGAISYVEVTNMTNNFDAMKELINYMYETIQYAEINTKSDYCQECGFSGEILLDENNEWYCPNCGNRNHKTLNVCRRTCGYLGDNFWNKGRTQEIKERFVHLDNRVYQENN

SEQ ID NO: 499 - protein, 724 aa, Unknown
  Description of Unknown: uncultivated organism sequence
  Category: MG55 effectors
  Description: MG55-72 effector
MKIIKRSGAENTFDKEKIENAVAKANITVEEKDRLSEGEIGEIAQNIEDKCSEMNRAMDVETIQDWVEADIMRHGKYTVAKHYITYRYERSIVRQANTTDKQILSLLNFENEEVKQENSNKNPTVNSVQRDYMAGEVSKDITRRFLLPDDIVEAHEKGLIHFHDADYFAQHMHNCCLVNLEDMLQNGTVISEVMIEKPHSFSTACNIATQSIAQIASSQYGGQSITLSHLAPFVQISRDKYRREVKKEFAELNIPADEDTINKVAEMRVKAEIVQGVQMIQYQVITLMTTNGQAPFVTVFMYLDEVPEGQTRDDLAAIIEEMLRQRIQGVKNEKGVYITPAFPKLIYVLEEDNIREGSKYWELTKLAAKCTAKRMVPDYISEKKMKELKVDKNGNGQCYPCMGCRSFLTTYLDENGKPKYYGRFNQGVVTINLVDVACSSYKDMDKFWLIFDERLELCRRALMLRHERLKGTPSDVAPILWQNGALARLKKGETIDKLLFGGYSTISLGYAGLCECVRYMTGKSHTDPSATPFALEVMQHLNDACAKWRAETNIDFSLYGTPLESTTYKFARCLQKRFGVIEGVTDRNYITNSYHIHVTENIDAFDKLTFESQFQALSPGGAISYVEVPNMQNNIEAVLAVMQHIYDNIMYAELNTKSDYCQKCGFDGEIKIVEDDGKLVWECPNCGNRDQNTLNVARRTCGYIGTQFWNQGRTQEIKERVLHL

SEQ ID NO: 500 - protein, 1253 aa, Unknown
  Description of Unknown: uncultivated organism sequence
  Category: MG55 effectors
  Description: MG55-73 effector
MGIFENYTNLYAVKKSIQIGAIPTERTKKTLATMGIVEKDRQRVENISKFCQVFDRFHKERAGKILEETSFKTLPAYESAYDAYHKALVEKAEDADAIRDELVNRTDEVLKEISDAFLKNDSITELFTGDFLNKEMPALLTDKKEKKLAEELSKSAGGFIRYHQARSLLYSVKHGSIAFRLINDNYPFFYKNCEIIEKFRAVSGRTEEFLEGMRKLDWFRDSYLDEISDRDNYGSCFTQAAIDRYNVMLNGFTMPDRVKIKGLNEYINEYNHTLSAAEKREKGLRLLDPLYKLPLFNDNSFSVIPEKFETDGELLDTVDRIFNDTIYTKALGEAIDEACRLFDKDLGEYDASGIYIAPRQLTAFSLMAFDKWNAIEKLFNLDYDNKNYKKLVLDNPKANEDKYEKDRRNVLNRNIFSLEDIRKLALLDEEESGDAVEALCRNVREKKAEVLAAYNEYTEARKERKEKEEREEEVVSVRRDVRLRSAIKGLCDSIKEFERSLNFILSGRSLTETGLAGDADFINAFNELHDIIREYDAAYNKIRNFISRTKTKSDSVELLFGNSSFLGGWSDMSVKGGTFIKDGDKIFFVAASHGATKLLDDEYLTYEDGEETVEVMDYYLLADAAKSIGRIFIYNGMKNKDGGPAKYKYNPDAVPAKEYGLTEELFNAYAKGMHKSNYKENGFTDEDNRKTLDALTEYLGKAMPKYFTKLDFQLEKHYDTYRDICDDLKKKASFALSFKKVSKDYIQKLENNGDICLFRLWCKDFSEHSSGREGNYTVILKNLFNTDKDAVSTIRLSGNAALRFEKASLKKEDLVVHKAGTWVENKNPNSENRKRKLEYDIIKDRRFHHDRFRLMLPYALNYTEGDFCPVNEKVREDIKAGKFKYITSVKGGMDNLLWVCVTDLKGNIVEQFPINTIGNTDWREKISIRQQEMKEGNKNWTPGTDIRTLKEGYLSLAIKLVYDTIMKYESLVVLEDNAPNFKGNKFGIDTRLYEVFTEALRQKLRYAFSRTEGERDYGGVLKGFQLVNPEKPKGMQDGIIFLINPAYTSNIDPATGFISYIRPRYENITRTKNMIEKIDGFAVKNGMFCMDIDFSRFGDVLKGTRSEWTVWANGSRIIWKRDEDLAKGGKFVEISINEAFLDFFKKNRIDIKGDIKAQLLSNNSKAFYSEFCELFGALLKLSNGKNDDNFIISPVKNKKGQFFNSKTSDTVTCSDSNSAYNLCRKMAICVRNISNDVKKPVPKSEEFIKEIQG

SEQ ID NO: 501 - protein, 573 aa, Unknown
  Description of Unknown: uncultivated organism sequence
  Category: MG55 effectors
  Description: MG55-74 effector
MPFNIEKLRPDYRTKNFQIPITSINLPEEFWTEAKTYKNCWNEIVAEFISFGEEHDALIVRYRELKTEKADLTGIKEELEALRDKRRDAVKAKWKAQSEHLFNNDLEVMLTGVEKSLKENSFRFKRGLDSIIFTKRYGKGGVKFSDLFTVEDSRSDSLKRKPFIVRKGIKRDSKRAEHKTPLHGSFLVGKNRVRLNFYGLWTYADFLDDCFIKRVSLNGKRDFQGWKWYLTVAAEMPPTEHLINRTLPVAGLDLGYRIFPEYIRFGVVSDSAGNIFEFRLPHGNMENQYLRRKNVFLEKNYGRKIDFVRDLYDYFAKDSAQGKTLEEAKQAVKKIYDTAQSEKINLPEEYKQAFTGFVKMRNHGLLKIKRVCGELIENLPDDKNQEVLIALTETKILIEEWSEKNDQFEQEKYFFRQKFIGRRKQLYRNIAVWLSTNYSKVIFEKDLNLAKLATKSKKSSRVTDAALLESNKFRQWTSLSELVRYLGETDQDFVGNWLTAGTTAYSTYFCDECGAGRASVPEDLIAVCDNGHRRDQDVKASRNLLAEAEIKPEKNSVKIPDYLKKNIVRITEK

SEQ ID NO: 502 - protein, 720 aa, Unknown
  Description of Unknown: uncultivated organism sequence
  Category: MG55 effectors
  Description: MG55-75 effector
MKIMKRSGIEADFDVTKISAAIKKANCEVAAVDQLSEEQIEEISTNVEKICSDIGRTLGVEEIQDLVEDQIMNKRAFVLARKYITYRYTRALIRKSNSTDKQILSLLECNNEEAKQENSNKNPTVNSVQRDYMAGEVSKDITKRFLLPEDIVAAHEQGIIHFHDSDYFAQHMHNCCLVNLEDMLQNGTVISETMIERPKSFSTACNIATQSIAQIASSQYGGQSISLAHLAPFVDVSRQKFRLQVRDEFEKANIAASEEQINNVAEQRVRDEIKRGVQMIQYQVITLMTTNGQAPFVTVFMYLDEVPEGRLRDDLALVTEEILRQRIQGVKNEKGVYITPAFPKLIYVLEEDNITEGSKYWELTKLAAKCTAKRMVPDYISEKIMRKLKDGNCYPCMGCRSFLTVYHDENDKPKFYGRFNQGVVTINLVDVACSSGKDMDKFWQIFDERLDLCYRALMCRHKRLLDTPSDVAPILWQYGALARLEKGETINKLLYNGYSTISLGYAGLCECTRYMTGHSHTDPESTPFALQVMQHMNDACAKWREETNIDFSLYGTPLESTTYKFAKCLQKRFGIIEGVTDRGYITNSYHVHVTEEINAFDKLKFEAQFQELSPGGAISYVEVPNMENNIEAVLNVMKYIYDNIMYAELNTKSDYCQCCGYTGQIQIVTDEHGKLIWECPNCGNTDQNKMNVARRTCGYIGTQFWNQGRTQEIKERVLHL

SEQ ID NO: 503 - protein, 724 aa, Unknown
  Description of Unknown: uncultivated organism sequence
  Category: MG55 effectors
  Description: MG55-76 effector
MKIIKRSGAENTFDKEKIENAVAKANITVEEKDRLSEGEIGEIAQNIEDKCSEMNRAMDVETIQDWVEADIMRHGKYTVAKHYITYRYERSIVRQANTTDKQILSLLNFENEEVKQENSNKNPTVNSVQRDYMAGEVSKDITRRFLLPDDIVEAHEKGLIHFHDADYFAQHMHNCCLVNLEDMLQNGTVISEVMIEKPHSFSTACNIATQSIAQIASSQYGGQSITLSHLAPFVQISRDKYRREVKKEFAELNIPADEDTINKVAEMRVKAEIVQGVQMIQYQVITLMTTNGQAPFVTVFMYLDEVPEGQTRDDLAAIIEEMLRQRIQGVKNEKGVYITPAFPKLIYVLEEDNIREGSKYWELTKLAAKCTAKRMVPDYISEKKMKELKVDKNGNGQCYPCMGCRSFLTTYLDENGKPKYYGRFNQGVVTINLVDVACSSYKDMDKFWKIFNERLELCRRALMLRHERLKGTPSDVAPILWQNGALARLKKGETIDKLLFGGYSTISLGYAGLCECVRYMTGKSHTDPSATPFALEVMQHLNDACAKWRAETNIDFSLYGTPLESTTYKFARCLQKRFGVIEGVTDRNYITNSYHIHVTENIDAFDKLTFESQFQALSPGGAISYVEVPNMQNNIEAVLAVMQHIYDNIMYAELNTKSDYCQKCGFDGEIKIVEDDGKLVWECPNCGNRDQNTLNVARRTCGYIGTQFWNQGRTQEIKERVLHL

SEQ ID NO: 504 - protein, 723 aa, Unknown
  Description of Unknown: uncultivated organism sequence
  Category: MG55 effectors
  Description: MG55-77 effector
MKVIKRDKKEVEFDSTKIEAAIKKARNACTSSNLSDENIADIADYITYKCKKLDHSVSVEDIQDMVEDQLMAHGEFALAKEYVKYRYNRQLVRKSNTTDEKILSLIELQNEEVKQENSNKNPTINSTQRDYMAGEVSRDLTNRILLPKDIVEAHEKGIIHFHDSDYFAQHMHNCDLVNLEDMLQNGTVISGTLIEKPHSFHTACNVATQIVAQVASAQYGGQSISLAHLAPFVDISRKKIYNKFRKNFEELGINVTEDKLSELVEKEVKEEINRGVQTIQYQVVTLMTTNGQTPFVTVFMYLGEAKNEREKADLALIIEEVLRQRIQGVKNEKGAWITPAFPKLIYVLEEQNITEDAPYFYLTELAAKCTAKRMVPDYISEKIMLELKKDKNGEGHCYTCMGCRSFLTPYLDKNGKPKYYGRFNQGVVTINLVDVACSSHKDINKFWEIFDERLELCHRALMCRHKRLKGTPSDVAPILWQHGALARLKKGEAIDKLLYGGYSTISLGYAGLCECTRYMTGKSHTDPSATPFALEVMKHMNDACAKWKEEENIDFSLYGTPLESTTYKFAKCLQKRFGIIKGVTDKAYITNSYHVHVTEEIDAFTKLAFESQFQKLSPGGAISYVEVPNMQNNIPAVIQVIQFIYDNIMYAELNTKSDYCQKCGYDGEIKLFKEDGKYVWKCPNCGNTDQNFLNIARRTCGYIGVNFWNFGRTEEIAERKLHL

SEQ ID NO: 505 - protein, 730 aa, Unknown
  Description of Unknown: uncultivated organism sequence
  Category: MG55 effectors
  Description: MG55-78 effector
MQVIKRDGRIVDFDRQKIAAAIGKANAEVKPRERASKEDIKGIIEYVEGLDKKRILVEDIQDIIEEKLMECEKYLLAKKYITYRYTRELVRKANTTDQSIKELIDGESDYWNNENSNKNARVVTTQRDYLAGITSTDITRRFLLPKDVVEAHDEGIIHFHDADYFAQNALTNCELINLDDMLQNGTIMNGVMIEKPHRFLTAMTIATQIILAVTSSTYGGATVSLTHLAPFVRSSYERYYKKYKERGLSEKQCKEYAEQDTKKEIADGVQTFNYQVNSMTNTNGQAPFLSVNMYLGETKEYKKELAMVIEEFLKQRMEGFKNEKGVYITPAFPKLLYVLEKDNITEDSPYWYLTELAAKCTAKRMVPDYISEKKMLELKIDKNGNGNCYPCMGCRSFLTPYVDPKTNKPKYYGRFNQGVVTINLVDVALSSDKDMDKFWKIFDERLELCHRALQVRHERLSKVTSDVAPILWQNGALARLKKGESIHPLLHGGYSTISLGYAGLYECVKYMTDHSHTDNGEGKDFGIKVMQKLNDKCKEWKAAEDIDYSVYGTPIESTTYKFAKCLKKRFGVIEGITDRDYITNSYHIPVFEEIDAFSKLSIESQFQQLSPGGAISYVETPNLQNNIESVLQIIKFIYDNIMYAELNTKSDYCQVCGFDGEILIDDNLEWYCPNCGNRNHDTLNVARRTCGYIGSQFWNKGRTQEIKERVLHIDNKDAEMPKKEKTKVAV

SEQ ID NO: 506 - protein, 736 aa, Unknown
  Description of Unknown: uncultivated organism sequence
  Category: MG55 effectors
  Description: MG55-79 effector
MENRDHMDVIHVKTNVIKRNGQEVSFDISKIINAIGKANKEVESIHQMNEFQIRAVADNIARKIASYPHAVNVEDIQDMVETGIMEMRGYEVAQKYVRYRYKREISRKSNTTDDGILSLIDLSNEEVKQENSNKNPVINSTQRDYMAGEVSKDLTKRLLLPEEIVKAHEEGIIHFHDADYFAQREHNCDLINLEDMLQNGTVISQTLIEKPHSFFTACNVTTQIVAQVASNQYGGQSFTLAHLAPFVDISRKKITKEVIEERKETGESMDESIIEKIVERRLKEEIKSGIQTIQYQLITLMTCNGQAPFVTMFMYLDEVPDGQTRKDLAMIIEEVLRQRMQGVKNEKGVWITPAFPKLIYVLDEDNIHDDSPYYYLTKLAAECTAKRMVPDYISAKIMKSLKNGDVYPCMGCRSFLTPDTEGLGPHGEHKYYGRFNQGVVTINLVDVACSSDGDMDRFWKILEDRLELCHRALRCRHERLLGTVSDVAPILWQYGALARLKKGETIDKLLFNNYSTISLGYAGLYEMCVRMLGVSHTTEEGRKFALAVMQKLNDKCAEWRKAENISYSVYGTPMESTTYKFAKCLQKRFGIIPGVTDKNYITNSYHVHVAEKIDAFHKLKFESDFQKLSPGGAISYIEVPNMQTNIPAVLTVMKYIYENIMYAELNTKSDYCMVCGYDGEIKIVEDENGKLVWECPNCGNRDQHKMSVARRTCGYIGTQFWNQGRTQEIKDRVLHL

SEQ ID NO: 507 - protein, 734 aa, Unknown
  Description of Unknown: uncultivated organism sequence
  Category: MG55 effectors
  Description: MG55-80 effector
MIYNKCILKQGEDMEMKIIKRDGSIVDYNPEKIRIAIKKANNEVSRKERATETEIEEIITYIEDLKKSRILVEDIQDIIEQKLMSLEKYQLAKTYITYRYTRALVRKANTTDQSIKELIEGESEYWNNENSNKNATVVTTQRDYLAGITSTDITRRFLLPEDIVKAHDEGIIHFHDADYFAQNALTNCELINLEDMLQNGTIMNGVMIEKPHRFITACTIATQIILAVTSSTYGGATISLSHLAPFVKSSYDKYYKKYKDRGLTEKQCEEYAKQDTRKEVSDGVQTFNYQVNSMTNTNGQAPFLSVCMYLGETEEYKEELAMIIEEFLKQRIEGFKNEKGVYVTPAFPKLLYVLEEDNVHEDSKFWYLTELAAKCTAKRMVPDYISEKKMLELKVDKNGEGHCYPCMGCRSFLTPYVDPETNKPKYYGRFNQGVVTINLVDVALTSGKDKNKFWKIYDERLELCHRALQARHERLSKVTSDVAPILWQNGAFARLPKGAPIHPLLHGGYSTISLGYAGLYECVKYMTDKSHTDNGEGKEFAIEVMKKLNEKCKEWKEKEDIDYSVYGSPIESTTYKFAKCLKERFGVVEGITDKNYITNSYHVPVFEEIDAFSKLKLESEFQVLSPGGAISYVETPNLQDNLEVVLQIIRFIYDNIMYAELNTKSDYCQKCGFDGEILIDDNLEWYCPNCGNRDHNTLNVARRTCGYIGSNFWNKGRTQEIKERVLHIDNKDDE

SEQ ID NO: 508 - protein, 420 aa, Unknown
  Description of Unknown: uncultivated organism sequence
  Category: MG55 effectors
  Description: MG55-81 effector
MNKYISAVKIRIVPLNKNTFDYINNLMYQTNKIYNDAYSHEWVFIKQKLSESIIPVKSAKTTKVYHSVRDLHPTFPTAILSNICHRVKKDFSNDIKNGLFKGKRTPRLYKYGAPIIYQFNSGGINPNFHNVNDDIILRIKNGLDFKLLFGKDKSGNKKLLERLMDKNDKSLNINRVFNVTYNKRDKHYYIIFTYETESEDYEKVKGRVCGIDLGVRRFVSIRLNDNIHVQKSIHSDDLIRVKMDINKKRREYQKSMVMAKGGHGRNRKLKYLDTIRKKEINFTNTALHKLSKQVIDFCIKYKVEQINMELLNRNIDKNSFFSRYWPISNFIDKLKYKVDSYGINLKFVDPYHTSQICSICGEIGERNGDTFICQNDKCKIHNENIDSDYNAAYNIAKSKLYVDKYENTQYYKLKNKEKVL

SEQ ID NO: 509 - protein, 739 aa, Unknown
  Description of Unknown: uncultivated organism sequence
  Category: MG55 effectors
  Description: MG55-82 effector
MNIIKRDGSVVEYDANKIRTAIGKANAEVQKNEKASKEEIEEIIKYIQELNKKRMLVEDIQDIIEEKLMSYNHYQLAKAYITYRYTRSLVRQANTTDQSIKELIDGTSEYWNTENSNKNARVVTTQRDYLAGITSTDISRRFLIPKEVVDAHDEGLIHFHDMDYFAQNALHNCDLIDLEDMLQNGTCINGVMIEKPHRFITAMTIATQIITAVNSSQYGGVTITLTHLAPFVRDSYLRYVKKYEERGFSKEDVEKYAKEDLQKEVVDGVQTFQYQINSMTTTNGQAPFLSVCMYLGETEEYKPELAMIIEEVLRQRTEGMKNEKGIYVTPAFPKLLYVLEEDNIKEGSKYYYLTKLAAKCTAKRLVPDYISEKKMKEYKIDSNGDGQCYPCMGCRSFLTPYVDPKTKKAKYYGRFNQGVVTINLPDVALSSGKDVEKFWKIMDERLELCHRGLKTRYERLSHATSDVAPILWQNGALARLPKGASIKPLLHGGYSTISLGYAGLYECVKYMTGDSHTDGAKGEEFGLAVMQYLNDKCAQWKKEENMDYSVYGTPIESTTYKFSKCLQKRFGKIEGITDRGYITNSYHVPVFEKIDAFKKLSIESKFQRLSPGGAISYIETPNLQNNLDAVMQVIQYIYDNIVYAELNTKSDYCQKCGFDGEILLGDDLEWHCPNCGNKDHNTLNVARRTCGYIGTNFWNKGRTQEIKERVLHLENTDDENDKTKVTKAEAKVRVANQQQ

SEQ ID NO: 510 - protein, 724 aa, Unknown
  Description of Unknown: uncultivated organism sequence
  Category: MG55 effectors
  Description: MG55-83 effector
MKIIKRSGAENTFDKEKIENAVAKANITVEEKDRLSEGEIGEIAQNIEDKCSEMNRAMDVETIQDWVEADIMRHGKYTVAKHYITYRYERSIVRQANTTDKQILSLLNFENEEVKQENSNKNPTVNSVQRDYMAGEVSKDITRRFLLPDDIVEAHEKGLIHFHDADYFAQHMHNCCLVNLEDMLQNGTVISEVMIEKPHSFSTACNIATQSIAQIASSQYGGQSITLSHLAPFVQISRDKYRREVKKEFAELNIPADEDTINKVAEMRVKAEIVQGVQMIQYQVITLMTTNGQAPFVTVFMYLDEVPEGQTRDDLAAIIEEMLRQRIQGVKNEKGVYITPAFPKLIYVLEEDNIREGSKYWELTKLAAKCTAKRMVPDYISEKKMKELKVDKNGNGQCYPCMGCRSFLTTYLDENGKPKYYGRFNQGVVTINLVDVACSSYKDTDKFWKIFDERLELCRRALMLRHERLKGTPSDVAPILWQNGALARLKKGETIDKLLFGGYSTISLGYAGLCECVRYMTGKSHTDPSATPFALEVMQHLNDACAKWRAETNIDFSLYGTPLESTTYKFARCLQKRFGVIEGVTDRNYITNSYHIHVTENIDAFDKLTFESQFQALSPGGAISYVEVPNMQNNIEAVLAVMQHIYDNIMYAELNTKSDYCQKCGFDGEIKIVEDDGKLVWECPNCGNRDQNTLNVARRTCGYIGTQFWNQGRTQEIKERVLHL

SEQ ID NO: 511 - protein, 724 aa, Unknown
  Description of Unknown: uncultivated organism sequence
  Category: MG55 effectors
  Description: MG55-84 effector
MKIIKRSGAENTFDKEKIENAVAKANITVEEKDRLSEGEIGEIAQNIEDKCSEMNRAMDVETIQDWVEADIMRHGKYTVAKHYITYRYERSIVRQANTTDKQILSLLNFENEEVKQENSNKNPTVNSVQRDYMAGEVSKDITRRFLLPDDIVEAHEKGLIHFHDADYFAQHMHNCCLVNLEDMLQNGTVISEVMIEKPHSFSTACNIATQSIAQIASSQYGGQSITLSHLAPFVQISRDKYRREVKKEFAELNIPADEDTINKVAEMRVKAEIVQGVQMIQYQVITLMTTNGQAPFVTVFMYLDEVPEGQTRDDLAAIIEEMLRQRIQGVKNEKGVYITPAFPKLIYVLEEDNIREGSKYWELTKLAAKCTAKRMVPDYISEKKMKELKVDKNGNGQCYPCMGCRSFLTTYLDENGKPKYYGRFNQGVVTINLVDVACSSYKDMDKFWKIFDERLELCRRALMLRHERLKGTPSDVAPILWQNGALARLKKGETIDKLLFGGYSTISLGYAGLCECVRYMTGKSHTDPSATPFALEVMQHLNDACAKWRAETNIDFSLYGTPLESTTYKFARCLQKRFGVIEGVTDRSEVTNSYHIHVTENIDAFDKLTFESQFQALSPGGAISYVEVPNMQNNIEAVLAVMQHIYDNIMYAELNTKSDYCQKCGFDGEIKIVEDDGKLVWECPNCGNRDQNTLNVARRTCGYIGTQFWNQGRTQEIKERVLHL

SEQ ID NO: 512 - protein, 327 aa, Unknown
  Description of Unknown: uncultivated organism sequence
  Category: MG55 effectors
  Description: MG55-85 effector
MITAIQRLKEENERLNHRAGHDWLTGLYDREGAEEKINRLIRERGCGVMILLDVDRFRRINSRHGHIVGDHVLSSIAAVLDSMVFRHDVVGRVDDDEFVVFMPVDQDEKFLQQRCRQIRDRLKTMELPGGAEISISLSTGGAICGKDDTYRSLFARAYGELDKDKVSAREQTADSEARKGNFMVDLKQVRGELAEQSLIPGAYCQDYETFKHIYRFVERRLRRAEISSYILLITLTDGNGDFPPLTRREEQMAVLKDEIQISLRSGDVFTQYSSCQYLVMISDASAENVEMIADRICTAFYKAIGGACQGVLLHHCYPMWPAGEKEP

SEQ ID NO: 513 - protein, 722 aa, Unknown
  Description of Unknown: uncultivated organism sequence
  Category: MG55 effectors
  Description: MG55-87 effector
MEVIKRDGSKVAFDGSKIENAILKAMRYGSGIVKPEIASKISHEIEDWHKSSGAASISIYRIEGQVFEKLIEKGEVLTAKAYEGYRKVREFQRETNTIDNAIYGIVNQTNKEAMDENSNKDATVLATQRDLIAGEFSRDYCRRLLLPPKIVQAHDDGIIHFHDMDYYIQKMHNCDLVNLKDMFANGTVINDKLIETPKSLQTACTVATQIVQQVANGQYGGQTISISHLAPYVRVSYKKHLKAVRKEGKEVGIDYTEEQIEKIAKSRLHEEIKAGVQTIQYQINTFSTTNGQAPFLSIFMYLREEPDYIEETALLIEEILNQRYIGMKNPVGAYVTPAFPKLLYVLDDNNVPDDSQYRYLTDLAVKCVSKRMMPDFISAKIMRENYEGQVFPCMGCRSFLSPWKNEKGEYQWYGRFNQGVVTLNLTDVGLSANKNMDSFWKILDERLDLCYEALMLRHESLKGTPSDISPIHWQYGAIARLKPGEKIDSLLDTCYSTLSLGYIGLYECVVALIGQSHTTEEGDALALEIMQKLRNTCDKWKKDTGLGFALYGTPAESTTYTLARALKKRFGIVPGVTDKDYITNSYHVNVREHIDAFSKLGFEAKFQKISSGGAISYVEVTNMTNNFDAMKELINYMYETIQYAEINTKSDYCQECGFSGEILLDENNEWYCPNCGNRNHKTLNVCRRTCGYLGDNFWNKGRTQEIKERFVHLDNRVYQENN

SEQ ID NO: 514 - protein, 309 aa, Unknown
  Description of Unknown: uncultivated organism sequence
  Category: MG55 effectors
  Description: MG55-88 effector
MTTIINQFNSGGINPNFHNVNDDIILRIKNGLDFKLLFGKDKSGNKKLLERLMDKNDKSLNINRVFNVTYNKRDKHYYIIFTYETESEDYEKVKGRVCGIDLGVRRFVSIRLNDNIHVQKSIHSDDLIRVKMDINKKRREYQKSMVMAKGGHGRNRKLKYLDTIRKKEINFTNTALHKLSKQVIDFCIKYKVEQINMELLNRNIDKNSFFSRYWPISNFIDKLKYKVDSYGINLKFVDPYHTSQICSICGEIGERNGDTFICQNDKCKIHNENIDSDYNAAYNIAKSKLYVDKYENTQYYKLKNKEKVL

SEQ ID NO: 515 - protein, 724 aa, Unknown
  Description of Unknown: uncultivated organism sequence
  Category: MG55 effectors
  Description: MG55-89 effector
MKIIKRNGAEENFDISKIIMAVTKANAAVEECDRMTPRQIQRIAESVELACQELGRSAAVEEIQDMVEKQIMAHGAFEVAKAYITYRYTRSLVRRANTTDDRILSLIECNNEEAKQENSNKNPIVNSTQRDYMAGEVSRDITSRLLLPKDIVEAHEEGIIHFHDADYYAQHMHNCDLVNLEDMLENGTVITGTLIERPHSFSTACNIATQIIAQVASNQYGGQSISLTHLAPFVQVSRERIRREVEAEMQAIDAHPGEEKLAELVENRVREEIRRGVQTIQYQVVTLLTTNGQAPFVTVFMYLGEAKNEQERHDLAMIIEETLRQRYQGVKNEKGVWVTPAFPKLIYVLEEDNIHEDSPYWYLTELAARCTAKRMVPDYISEKKMLELKVDKNGEGHCYTCMGCRSFLTPYVDENGKPKYYGRFNQGVVTINLPDVALSSGGNMEKFWKIFDERLELCHRALMCRHERLKGTLSDAAPILWQYGALARLKKGEPIDKLLYGGYSTISLGYAGLYECVKYMTGKSHTDPSATPFALEIMQHMNDACAKWKQMHNIDFSLYGTPLESTTYKFAKCLQKRFGIIPGVTDKGYITNSYHIHVTEHIDAFSKLAFESKFQALSPGGAISYVEVPNMQNNIPAVLEVMKFIYDNIMYAELNTKSDYCQVCGYDGEIEIVEHDGKLIWRCPNCGNTDQDKMNVARRTCGYIGTQFWNQGRTQEIKERVLHL

SEQ ID NO: 516 - protein, 99 aa, Unknown
  Description of Unknown: uncultivated organism sequence
  Category: MG55 effectors
  Description: MG55-90 effector
MMSLIKRSYKYRMYPNKTQEELLAKTFGCVRVIWNACVDSFNSYDKETNPNPKFPTKSDLVIEKLWLNEVSAATLQQKQRDFIEFSKQYFNKNRKEKNR

SEQ ID NO: 517 - protein, 405 aa, Unknown
  Description of Unknown: uncultivated organism sequence
  Category: MG55 effectors
  Description: MG55-91 effector
MRLGVRMQRTNVIQLMPNKKQERILRECMLLSSCVYNSANYIVRQQFFNKESVSNFRDLQVKLQKSDDYRLLGRSYALPRLQIYGETNSARFKLIKANVQDKVGLPKYLKNRKTNTTIPSYLVIDGCQYSLSKTKATIPLSRAMRKKYDIKYFKIAYNGILKHKGKQQRGQIHYKNKKFYLYQSVEVTTPIMKSGNIAGLDLGIKNLLTVTTNTNQEKIIGSKRFFKQWQHYTDLIAQEQEKLSKINRKASNNLSRLYYKRSVYQDNLFNNVVAKMFRFLKRNNISTLVIGDIKGIREHNDKGKKLNTMMHNYWSFDKLLHKIENNAEASGIEIVMTTEEYTSRTCPICYDNSKENVKDRIFQCTFCGYIDHRDIIGARNIMIKGMHDQSNQSVHRQEILPLEVL

SEQ ID NO: 518 - protein, 724 aa, Unknown
  Description of Unknown: uncultivated organism sequence
  Category: MG55 effectors
  Description: MG55-92 effector
MKIIKRNGAEATFDISKIIMAVTKANAAVEEGDRMTPRQIQRIAESVELACQELGRSAAVEEIQDMVEKQIMAHGAFEVAKAYITYRYTRSLVRRANTTDDRILSLIECNNEEAKQENSNKNPIVNSTQRDYMAGEVSRDITSRLLLPKDIVEAHEEGIIHFHDADYYAQHMHNCDLVNLEDMLENGTVITGTLIERPHSFSTACNIATQIIAQVASNQYGGQSISLTHLAPFVQVSRERIRREVAAEMQAIDAHPGEEKLAELVENRVREEIRRGVQTIQYQVVTLLTTNGQAPFVTVFMYLGEAKNEQERHDLAMIIEETLRQRYQGVKNEKGVWVTPAFPKLIYVLEEDNIHEDSPYWYLTELAARCTAKRMVPDYISEKKMLELKVDKNGEGHCYTCMGCRSFLTPYVDENGKPKYYGRFNQGVVTINLPDVALSSGGNMEKFWKIFDERLELCHRALMCRHERLKGTLSDAAPILWQYGALARLKKGEPIDKLLYGGYSTISLGYAGLYECVKYMTGKSHTDPSATPFALEVMQHMNDACKQWKQMHNIDFSLYGTPLESTTYKFAKCLQKRFGIIPGVTDKGYITNSYHIHVTENIDAFSKLAFESKFQALSPGGAISYVEVPNMQNNIPAVLEVMKFIYDNIMYAELNTKSDYCQVCGYDGEIEIVEHDGKLIWRCPNCGNTDQDKMNVARRTCGYIGTQFWNQGRTQEIKERVLHL

SEQ ID NO: 519 - protein, 509 aa, Unknown
  Description of Unknown: uncultivated organism sequence
  Category: MG55 effectors
  Description: MG55-93 effector
MGQTITLAHLSPFIEDTRKDIKAHFPNFNDDEIEELVKRDIEVGVQTLQYQILTLLTTNGQTPFITIFANLAEVPEGKERTNLALVIEEVLRQRIQGVKNEKGVYITPAFPKIIYGLDECNINDDSKYFYLTKLAAECTSKRMVPDYQSNKIQRELKDGDIYPCMGCRSFLSKDGTKKNYARALNYSKHKGHKYYGRFNKGVVTINLPDVALSSKKDKDAFWKIFNERLELCHRALQYRYKRLAGTKSDIAPILWQYGAYARLNKDEKIDELLRHGYSTLSLGYAGLYECVKYMTGVSHTDENGKDFALAVMKYMNDCCDKWNKEENLGYSVYGSPIESTTYSFAKCLRKRFGKIKDITDHDYITNSYHVNVREDIDAFSKLKLESEFQKLSQGGAISYIEVPDLHKNIPAVIDILRFIYNNIMYAELNCKFDYCQKCGYSGEIQIKGEPGNLYWECPNCGNTDQKTMNIARRTCGYIGTNFWNQGRTEEIKDRVLHMDTLSKLKDRKK

SEQ ID NO: 520 - protein, 331 aa, Unknown
  Description of Unknown: uncultivated organism sequence
  Category: MG55 effectors
  Description: MG55-94 effector
MCRSFLTPYVDANGEPKYYGRFNQGVVTINLPDIALSSNGDIETFWDIFDERTELCHKALQMRHKRLEGTPSDVAPILWRYGALARLEKGETIDRLLHNGYSTLSLGYAGLYECVKYMTGKSHTDGDNGEKFGLEVMQALNDKCNKWKNEENIDYSLYGSPIESTTYKFAKCLKKRFGVIEGITDRDYITNSYHVPVFEKIDPFTKLSIESKFQKLSPGGAISYIECTDLTYNIDAVLEVMQFIYNNIMYAELNTKSDYCQVCGYDGEIKIVDEDGELIWECPNCGNRDKNKMNVARRTCGYIGSNFWNKGRTEEIAERYVHLDDHEYKEK

SEQ ID NO: 521 - protein, 707 aa, Unknown
  Description of Unknown: uncultivated organism sequence
  Category: MG55 effectors
  Description: MG55-95 effector
MKVIKRDGSTVEFNKSKIRDAITKSMKNGSGILLPDIARLIANDAEKYFAKEEDVATIYKIEKYVYDRLVHYGQAETARAYEGYRAVQEFKRNTNTTDDSILELLSKKNEDVMKENSNKNPVVSATQRDLIAGEVSKDIARRKLIPAHIVQAHDEGAIHWHDMDYTISPMFNCCLINLEDMFTNGTVINEKLVEEPKSFGTACTVATQIIAQVSSNQYGGQSITIKHLSKYLKVTEEKAFNHYMEMFNDESLATKLAKDIKMKELKDGVQTIRYQLSTLQTTNGQAPFSTIYLEIEDGNPYEEEMAMICEEMIRQRLEGMKNYKGQEIGEAFPKLVYLLDEHNCLEGGKYDYITKLAAKCTAKRLVPDYQSAKIMRENYEGNTFPPMGCRSHLSPWKDEKGNYKFYGRFNQGVVSLNLPQIAIMADKDMEMFWEMLDRRLELCKDALMTRHKMLLGVTSDSSPIHWQHGAIARLKKGEKIDKLLKDGYSTISLGYVGIAEMVQAMLGVTHTSKEGEKFALEVMNYMKEKCDKWKAETGLGFGLYGTPAESLIYRFCRIDKARFGEIQNVTDKLYYTNSYHVHVCEEIDAFSKLKFESQFHSISNGGCISYIEVPDMNKNVEAVEDIINFIYHNIQYAEINTKSDVCYKCGFNGEMELDRESLTWHCPSCGNDDESELQVMRRTCGYIGSSYWNKGRTAEIGDRVLHL

SEQ ID NO: 522 - protein, 729 aa, Unknown
  Description of Unknown: uncultivated organism sequence
  Category: MG55 effectors
  Description: MG55-96 effector
MKIVKRDGHIVDYDPEKIRVAIGKANEEVRGREKATKEEIKEIIKYIEDLNKKRILVEDIQDIIEQKLMEFDKYQLAKKYITYRYTRELVRKANTTDKSIKELIEGENEYWNSENSNKNAEVVTTQRDYLAGITSTDITRRFLLPEDIVEAHDAGIIHFHDADYFAQNALHNCELINLDDMLQNGTVINGVMIEKPHRFLTAATIATQIILAVTSSSYGGATVSLTHLAPFVRLSYEKYLKKYQARNFSKKDCEKYAMQDTKKEVEDGVQTFNYQVNSMTNTNGQAPFLSVNMYLGETEEYKDELAMIIEEFLKQRMLGFKNEKGVYITPAFPKLLYVLEEDNIHEGSKYWYLTKLAAECTAKRMVPDYISEKMMLKYKKNILGDGDCYPCMGCRSFLTPDRMLNIGNISKAKNYVEGKGKYYGRFNQGVVTINLPDVALSADGDMDEFWKIFDERLELCHRALQIRHKRLSNVTSDVAPILWQHGALARLEKGESIHELLHHGYSTISLGYAGLYECVKVMTGHSHTDNGPGKEFGIKVMQHLNDATNKWKKEEDIDYSVYGTPIESTTYKFAKCLKERFGTVKGITDRGYITNSYHVPVFEEIDAFSKLKLESEFQVLSPGGAISYVETPNLQGNIDAVIEVIQFIYDNIMYAELNTKSDYCQNCGYTGEILIDDDLEWYCPNCGNRDHNTLNVARRTCGYIGTNFWNKGRTQEIKERVLHIDNKEA

SEQ ID NO: 523 - protein, 707 aa, Unknown
  Description of Unknown: uncultivated organism sequence
  Category: MG55 effectors
  Description: MG55-97 effector
MKVIKRDGSTVEFNKSKIRDAITKSMKNGSGILLPDIARLIANDAEKYFAKEEDVATIYKIEKYVYDRLVHYGQAETARAYEGYRAVQEFKRNTNTTDDSILELLSKKNEDVMKENSNKNPVVSATQRDLIAGEVSKDIARRKLIPAHIVQAHDEGAIHWHDMDYTISPMFNCCLINLEDMFTNGTVINEKLVEEPKSFGTACTVATQIIAQVSSNQYGGQSITIKHLSKYLKVTEEKAFNHYMEMFNDESLATKLAKDIKIKELKDGVQTIRYQLSTLQTTNGQAPFSTIYLEIEDGNPYEEEMAMICEEMIRQRLEGMKNYKGQEIGEAFPKLVYLLDEHNCLEGGKYDYITKLAAKCTAKRLVPDYQSAKIMRENYEGNTFPPMGCRSHLSPWKDEKGNYKFYGRFNQGVVSLNLPQIAIMADKDMEMFWEMLDRRLELCKDALMTRHKMLLGVTSDSSPIHWQHGAIARLKKGEKIDKLLKDGYSTISLGYVGIAEMVQAMLGVTHTSKEGEKFALEVMNYMKEKCDKWKAETGLGFGLYGTPAESLIYRFCRIDKARFGEIQNVTDKLYYTNSYHVHVCEEIDAFSKLKFESQFHSISNGGCISYIEVPDMNKNVEAVEDIINFIYHNIQYAEINTKSDVCYKCGFNGEMELDRESLTWHCPSCGNDDESELQVMRRTCGYIGSSYWNKGRTAEIGDRVLHL

SEQ ID NO: 524 - protein, 318 aa, Unknown
  Description of Unknown: uncultivated organism sequence
  Category: MG55 effectors
  Description: MG55-98 effector
MCRSFLSNWKDPETGKYKWAGRFNCGVVSLNLPQIAILADKDLNKFWSLLDERLEMCHKALKFRHDLLLGTVSDVSPIHWQYGAIARLKPGEVIDKYLKDGYSTLSLGFVGVYEAVLALTGETHTKHQNLALEIVRRMKQKTIDWNIEENLGYGLYGSPAESLISRFAKIDKEKFGNIKGVTDKGYYTNSYHVFVGEEIDAFKKLTFEAPFHQYASGGCLSYIEMPNMEHNLDAVETLIQFIYDNVRYAEFNTKSDYCKACGFEGEIGFDKNHKWTCPKCGNQDQSKMTVTRRSCGYLGSNFWNEGRTKEIQSRVLHI

SEQ ID NO: 525 - protein, 724 aa, Unknown
  Description of Unknown: uncultivated organism sequence
  Category: MG55 effectors
  Description: MG55-99 effector
MKIIKRNGAEATFDISKIIMAITKANAAVEECDRMTPRQIQRIAESVELACQELGRSAAVEEIQDMVEKQIMAHGAFEVAKAYITYRYTRSLVRRANTTDDRILSLIECNNEEAKQENSNKNPIVNSTQRDYMAGEVSRDITSRLLLPKDIVEAHEEGIIHFHDADYYAQHMHNCDLVNLEDMLENGTVITGTLIERPHSFSTACNIATQIIAQVASNQYGGQSISLTHLAPFVQVSRERIRREVEAEMKAIDAHPGEEKLAELVENRVREEIRRGVQTIQYQVVTLLTTNGQAPFVTVFMYLGEAKNEQERHDLAMIIEETLRQRYQGVKNEKGVWVTPAFPKLIYVLEEDNIHEDSPYWYLTELAARCTAKRMVPDYISEKKMLELKVDKNGEGHCYTCMGCRSFLTPYVDENGKPKYYGRFNQGVVTINLPDVALSSGGNMEKFWKIFDERLELCHRALMCRHERLKGTLSDAAPILWQYGALARLKKGEPIDKLLYGGYSTISLGYAGLYECVKYMTGKSHTDPSATPFALEIMQHMNDACAKWKQMHNIDFSLYGTPLESTTYKFAKCLQKRFGIIPGVTDKGYITNSYHIHVTEHIDAFSKLAFESKFQALSPGGAISYVEVPNMQNNIPAVLEVMKFIYDNIMYAELNTKSDYCQVCGYDGEIEIVEHDGKLIWRCPNCGNTDQDKMNVARRTCGYIGTQFWNQGRTQEIKERVLHL

SEQ ID NO: 526 - protein, 722 aa, Unknown
  Description of Unknown: uncultivated organism sequence
  Category: MG55 effectors
  Description: MG55-100 effector
MEVIKRDGSKVAFDGSKIENAILKAMRYGSGIVKPEIASKISHEIEDWHKSSGAASISIYRIEGQVFEKLIEKGEVLTAKAYEGYRKVREFQRETNTIDNAIYGIVNQTNKEAMDENSNKDATVLATQRDLIAGEFSRDYCRRLLLPPKIVQAHDDGIIHFHDMDYYIQKMHNCDLVNLKDMFANGTVINDKLIETPKSLQTACTVATQIVQQVANGQYGGQTISISHLAPYVRVSYKKHLKAVRKEGEEVGIDYTEEQIEKIAKSRLHEEIKAGVQTIQYQINTFSTTNGQAPFLSIFMYLREEPDYIEETALLIEEILKQRYIGMKNPVGAYVTPAFPKLLYVLDDNNVPDDSQYRYLTDLAVKCVSKRMMPDFISAKIMRENYEGQVFPCMGCRSFLSPWKNEKGEYQWYGRFNQGVVTLNLTDVGLSANKNMDSFWKILDERLDLCYEALMLRHESLKGTPSDISPIHWQYGAIARLKPGEKIDSLLDTCYSTLSLGYIGLYECVVALIGQSHTTEEGDALALEIMQKLRNTCDKWKKDTGLGFALYGTPAESTTYTLARALKKRFGVVPGVTDKDYITNSYHVNVREHIDAFSKLGFEAKFQKISSGGAISYVEVTNMTNNFDAMKELINYMYETIQYAEINTKSDYCQECGFSGEILLDENNEWYCPNCGNRNHKTLNVCRRTCGYLGDNFWNKGRTQEIKERFVHLDNRVYQGNN

SEQ ID NO: 527 - protein, 722 aa, Unknown
  Description of Unknown: uncultivated organism sequence
  Category: MG55 effectors
  Description: MG55-101 effector
MEVIKRDGSKVAFDGSKIENAILKAMRYGSGIVKPEIASKISHEIEDWHKSSGAASISIYRIEGQVFEKLIEKGEVLTAKAYEGYRKVREFQRETNTIDNAIYGIVNQTNKEAMDENSNKDATVLATQRDLIAGEFSRDYCRRLLLPPKIVQAHDDGIIHFHDMDYYIQKMHNCDLVNLKDMFANGTVINDKLIETPKSLQTACTVATQIVQQVANGQYGGQTISISHLAPYVRVSYKKHLKAVRKEGKEVGIDYTEEQIEKIAKSRLHEEIKAGVQTIQYQINTFSTTNGQAPFLSIFMYLREEPDYIEETALLIEEILKQRYIGMKNPVGAYVTPAFPKLLYVLDDNNVPDDSQYRYLTDLAVKCVSKRMMPDFISAKIMRENYEGQVFPCMGCRSFLSPWKNEKGEYQWYGRFNQGVVTLNLTDVGLSANKNMDSFWKILDERLDLCYEALMLRHESLKGTPSDISPIHWQYGAIARLKPGEKIDSLLDTCYSTLSLGYIGLYECVVALIGQSHTTEEGDALALEIMQKLRNTCDKWKKDTGLGFALYGTPAESTTYTLARALKKRFGIVPGVTDKDYITNSYHVNVREQIDAFSKLGFEAKFQKISSGGAISYVEVTNMTNNFDAMKELINYMYETIQYAEINTKSDYCQECGFSGEILLDENNEWYCPNCGNRNHKTLNVCRRTCGYLGDNFWNKGRTQEIKERFVHLDNRVYQENN

SEQ ID NO: 528 - protein, 378 aa, Unknown
  Description of Unknown: uncultivated organism sequence
  Category: MG55 effectors
  Description: MG55-102 effector
MIAHKVLLYPNQEAEAFLQKQFEYARRDYNRQLETIVRGIQSGKVDLFNLKKWMDAVCAQAKKAPDFYDGESYHYPDIIGWNKKRVQAAAEDYLANPLNKPKYLKHSRYRKIFRLTSAPLDAQRFSVSEDHHLLLGGMHRIKMAEPLRFQTRPIACEISLRNDRYYASFLFAENLKPYLLTGKTAGVTVGSASLVAVADSDGKKVRFALDAKKRTRIHKRIRHLEKVLSHKEIGSAQYEKTRAKLMRAKRKEEDVIRNFVEQTSHTLVKAYDRIGIDDASTQIRLIQHAYAKPYLQEPFSALSNRLQSKAKSHGKTVVKVKDRRSSAPICSQCGERNRKTKGLSNRRWACPHCGAVHDSDLEGAERLCKEALKQERRI

SEQ ID NO: 529 - protein, 722 aa, Unknown
  Description of Unknown: uncultivated organism sequence
  Category: MG55 effectors
  Description: MG55-103 effector
MEVIKRDGSKVAFDGSKIENAILKAMRYGSGIVKPEIASKISHEIEDWHKSSGAASISIYRIEGQVFEKLIEKGEVLTAKAYEGYRKVREFQRETNTIDNAIYGIVNQTNKEAMDENSNKDATVLATQRDLIAGEFSRDYCRRLLLPPKIVQAHDDGIIHFHDMDYYIQKMHNCDLVNLKDMFANGTVINDKLIETPKSLQTACTVATQIVQQVANGQYGGQTISISHLAPYVRVSYKKHLKAVRKEGKEVGIDYTEEQIEKIAKSRLHEEIKAGVQTIQYQINTFSTTNGQAPFLSIFMYLREEPDYIEETALLIEEILKQRYIGMKNPVGAYVTPAFPKLLYVLDDNNVPDDSQYRYLTDLAVKCVSKRMMPDFISAKIMRENYEGQVFPCMGCRSFLSPWKNEKGEYQWYGRFNQGVVTLNLTDVGLSANKNMDSFWKILDERLDLCYEALMLRHESLKGTPSDISPIHWQYGAIARLKPGEKIDSLLDTCYSTLSLGYIGLYECVVALIGQSHTTEEGDALALEIMQKLRNTCDKWKKDTGLGFALYGTPAESTTYTLARALKKRFGVVPGVTDKDYITNSYHVNVREHIDAFSKLGFEAKFQKISSGGAISYVEVTNMTNNFDAMKELINYMYETIQYAEINTKSDYCQECGFSGEILLDENNEWYCPNCGNRNHKTLNVCRRTCGYLGDNFWNKGRTQEIKERFVHLDNRVYQENN

SEQ ID NO: 530 - protein, 335 aa, Unknown
  Description of Unknown: uncultivated organism sequence
  Category: MG55 effectors
  Description: MG55-104 effector
MNIWGCRSFLTPDRIKGNPARALNYKEGKGKYYGRFNMGVATINLVDVALSSGGDFDKFWELFEERTELCHQGLLVRIKRLEHMTTDVAPILWQHGAFARLEKGEHITDLIYGGYATASLGYAGLYECVRYMTGKSHTDNGEGCDFGIQVMQALNNKCNQWKAEENIDYSVYGTPIESTTYKFAKCLKKRFGEIEEVTNHDYITNSYHVNVREEIDAFTKLTLESKFQKLSPGGAISYVEVANLQNNIDAVLAIMKHIYDNIMYAEINTKSDYCQVCGYEGEIQIVEDENHKLVWECPNCKNRNQDKMNVARRTCGYIGTKFWNRAICSITMLFK

SEQ ID NO: 531 - protein, 724 aa, Unknown
  Description of Unknown: uncultivated organism sequence
  Category: MG55 effectors
  Description: MG55-105 effector
MKIIKRNGAEATFDISKIIMAVTKANAAVEEGDRMTPRQIQRIAESVELACQELGRSAAVEEIQDMVEKQIMAHGAFEVAKAYITYRYTRSLVRRANTTDDRILSLIECNNEEAKQENSNKNPIVNSTQRDYMAGEVSRDITSRLLLPKDIVEAHEEGIIHFHDADYYAQHMHNCDLVNLEDMLENGTVITGTLIERPHSFSTACNIATQIIAQVASNQYGGQSISLTHLAPFVQVSRERIRREVAAEMRAINADPGEEKLAELVENRVREEIRRGVQTIQYQVVTLLTTNGQAPFVTVFMYLGEAKNEQERHDLAMIIEETLRQRYQGVKNEKGVWVTPAFPKLIYVLEEDNIHEDSPYWYLTELAARCTAKRMVPDYISEKKMLELKVDKNGEGHCYTCMGCRSFLTPYVDENGKPKYYGRFNQGVVTINLPDVALSSGGNMEKFWKIFDERLELCHRALMCRHERLKGTLSDAAPILWQYGALARLKKGEPIDKLLYGGYSTISLGYAGLYECVKYMTGKSHTDPSATPFALEVMQHMNDACKQWKQMHNIDFSLYGTPLESTTYKFAKCLQKRFGIIPGVTDKGYITNSYHIHVTENIDAFSKLAFESKFQALSPGGAISYVEVPNMQNNIPAVLEVMKFIYDNIMYAELNTKSDYCQVCGYDGEIEIVEHDGKLIWRCPNCGNTDQDKMNVARRTCGYIGTQFWNQGRTQEIKERVLHL

SEQ ID NO: 532 - protein, 729 aa, Unknown
  Description of Unknown: uncultivated organism sequence
  Category: MG55 effectors
  Description: MG55-106 effector
MKIVKRDGHIVDYDSDKIRVAIGKANNEVKGKEKATKDEIEGIIKYIEDLNKKRILVEDIQDIIEEKLMELDRYQLAKKYITYRYTRELVRKANTTDQTIKELIEGENEYWNSENSNKNARVVTTQRDYLAGITSTDITRRFLLPDDIVKAHDEGIIHFHDADYFAQNALHNCELINLEDMLQNGTILNGVMIEKPHRFLTAATIATQIILAVSSSSYGGATVSLTYLAPFVRDSYNYYYKKYKAMNMSESDCKKYAEIDTKKEVADGVQTFNYQVNSMTSTNGQAPFLSVCMYLGETDEYKEELALIIEEFLNQRILGFKNEAGVYITPAFPKLLYILEEDNIREDSKYWYLTVLAAKCTAKRMVPDYISEKIMKQLKVNEKGVSECYPCMGCRSFLTPDRTMSLGNIAHAKNYVEGKGKYYGRFNQGVVTINLPDIALSSKRDMDKFWKIFDERLELCHRALQIRHKRLSNATSDVAPILWQHGALARLKEGESIHELLHHGYSTISLGYAGLYECVKYMTGHSHTDNGEGKKLGLEVMQHLNDAANKWKVEEDIDYSVYGSPIESTTYKFARCLKERFGVVKGITDRDYITNSYHVPVFEEIDAFEKLKLESEFQRLSPGGAVSYIETPNLQNNIESITEVMKFIYDNIMYAELNTKSDYCQKCGYTGEILVDDDMQWYCPNCGNRDHNSLNVARRTCGYIGTNFWNRGRTQEIKERVLHLDNKEA

SEQ ID NO: 533 - protein, 722 aa, Unknown
  Description of Unknown: uncultivated organism sequence
  Category: MG55 effectors
  Description: MG55-107 effector
MEVIKRDGSKVAFDGSKIENAILKAMRYGSGIVKPEIASKISHEIEDWHKSSGAASISIYRIEGQVFEKLIEKGEVLTAKAYEGYRRVREFQRETNTIDNAIYGIVNQTNKEAMDENSNKDATVLATQRDLIAGEFSRDYCRRLLLPPKIVQAHDDGIIHFHDMDYYIQKMHNCDLVNLKDMFANGTVINDKLIETPKSLQTACTVATQIVQQVANGQYGGQTISISHLAPYVRVSYKKHLKAVRKEGKEVGIDYTEEQIEKIAKSRLHEEIKAGVQTIQYQINTFSTTNGQAPFLSIFMYLREEPDYIEETALLIEEILKQRYIGMKNPVGAYVTPAFPKLLYVLDDNNVPDDSQYRYLTDLAVKCVSKRMMPDFISAKIMRENYEGQVFPCMGCRSFLSPWKNEKGEYQWYGRFNQGVVTLNLTDVGLSANKNMDSFWKILDERLDLCYEALMLRHESLKGTPSDISPIHWQYGAIARLKPGEKIDSLLDTCYSTLSLGYIGLYECVVALIGQSHTTEEGDALALEIMQKLRNACDKWKKDTGLGFALYGTPAESTTYTLARALKKRFGVVPGVTDKDYITNSYHVNVREHIDAFSKLGFEAKFQKISSGGAISYVEVTNMTNNFDAMKELINYMYETIQYAEINTKSDYCQECGFSGEILLDENNEWYCPNCGNRNHKTLNVCRRTCGYLGDNFWNKGRTQEIKERFVHLDNRVYQENN

SEQ ID NO: 534 - protein, 491 aa, Unknown
  Description of Unknown: uncultivated organism sequence
  Category: MG55 effectors
  Description: MG55-108 effector
MQVSRERIRREVEAEMKAIDAHPGEEKLAELVENRVREEIRRGVQTIQYQVVTLLTTNGQAPFVTVFMYLGEAKNEQERHDLAMIIEETLRQRYQGVKNEKGVWVTPAFPKLIYVLEEDNIHEDSPYWYLTELAARCTAKRMVPDYISEKKMLELKVDKNGEGHCYTCMGCRSFLTPYVDENGKPKYYGRFNQGVVTINLPDVALSSGGNMEKFWKIFDERLELCHRALMCRHERLKGTLSDAAPILWQYGALARLKKGEPIDKLLYGGYSTISLGYAGLYECVKYMTGKSHTDPSATPFALEIMQHMNDACAKWKQMHNIDFSLYGTPLESTTYKFAKCLQKRFGIIPGVTDKGYITNSYHIHVTEHIDAFSKLAFESKFQALSPGGAISYVEVPNMQNNIPAVLEVMKFIYDNIMYAELNTKSDYCQVCGYDGEIEIVEHDGKLIWRCPNCGNTDQDKMNVARRTCGYIGTQFWNQGRTQEIKERVLHL

SEQ ID NO: 535 - protein, 729 aa, Unknown
  Description of Unknown: uncultivated organism sequence
  Category: MG55 effectors
  Description: MG55-110 effector
MKIVKRDGHIVDYDSDKIRVAIGKANNEVKGKEKATKDEIEGIIKYIEDLNKKRILVEDIQDIIEEKLMELDRYQLAKKYITYRYTRELVRKANTTDQTIKELIEGENEYWNSENSNKNARVVTTQRDYLAGITSTDITRRFLLPDDIVKAHDEGIIHFHDADYFAQNALHNCELINLEDMLQNGTILNGVMIEKPHRFLTAATIATQIILAVSSSSYGGATVSLTYLAPFVRDSYNYYYKKYKAMNMSESDCKKYAEIDTKKEVADGVQTFNYQVNSMTSTNGQAPFLSVCMYLGETDEYKEELALIIEEFLNQRILGFKNEAGVYITPAFPKLLYILEEDNIREDSKYWYLTVLAAKCTAKRMVPDYISEKIMKQLKVNEKGVSECYPCMGCRSFLTPDRTMSLGNIAHAKNYVEGKGKYYGRFNQGVVTINLPDIALSSKRDMDKFWKIFDERLELCHRALQIRHKRLSNATSDVAPILWQHGALARLKEGESIHELLHHGYSTISLGYAGLYECVKYMTGHSHTDNGEGKKLGLEVMQHLNDAANKWKAEEDIDYSVYGSPIESTTYKFARCLKERFGVVKGITDRDYITNSYHVPVFEEIDAFEKLKLESEFQRLSPGGAVSYIETPNLQNNIESITEVMKFIYDNIMYAELNTKSDYCQKCGYTGEILVDEDMQWYCPNCGNRDHNSLNVARRTCGYIGTNFWNRGRTQEIKERVLHLDNKEA

SEQ ID NO: 536 - protein, 417 aa, Unknown
  Description of Unknown: uncultivated organism sequence
  Category: MG55 effectors
  Description: MG55-111 effector
MIRALVLRHEFDLQKLLSASIEVARKGFEWRQLPGRFSDKPRLGCKEVKNISTGNARTDETILRYYKTANVNMKEFHPSNVKVLINKQSIKVNDNNVITIVPFKLTIKNTDGRYNLAEKLCGDTIYVKKKQAKISIPEGSWQIIQAKLDETNIYLTLEKENCSVLNSNYFLGIDCNASGWAAIAASPKRIDSSGNEIKGIVKKFGSGIDHVHKKYRDLNRSFQQKDLLNKLTDRAADIVLDIQRKEAVVIVQCALDNKLAIKMENLTGILSRANSKIYSKELRARLNSWGYYQMQQLIVLQAEEMGVPVFFVNPAFTSQTCSVCGKLGVRESKSVFKCSDENCRYHKGTDADVNAAYNISKSELIVSPGEKGVKEMQGWWKQYWIDNPPLPKPVKIRKSRKKKDPKVENNQEFEAIN

SEQ ID NO: 537 - protein, 729 aa, Unknown
  Description of Unknown: uncultivated organism sequence
  Category: MG55 effectors
  Description: MG55-112 effector
MKIVKRDGHIVDYDPEKIRVAIGKANEEVRGREKATKEEIKEIIKYIEDLNKKRILVEDIQDIIEQKLMEFDKYQLAKKYITYRYTRELVRKANTTDKSIKELIEGESEYWNSENSNKNAEVVTTQRDYLAGITSTDITRRFLLPEDIVEAHDAGIIHFHDADYFAQNALHNCELINLDDMLQNGTVINGVMIEKPHRFLTAATIATQIILAVTSSSYGGATVSLTHLAPFVRLSYEKYLKKYQARNFSKKDCEKYAMQDTKKEVEDGVQTFNYQVNSMTNTNGQAPFLSVNMYLGETEEYKDELAMIIEEFLKQRMLGFKNEKGVYITPAFPKLLYVLEEDNIHEGSKYWYLTKLAAECTAKRMVPDYISEKMMLKYKKNILGDGDCYPCMGCRSFLTPDRMLNIGNISKAKNYVEGKGKYYGRFNQGVVTINLPDVALSADGDMDEFWKIFDERLEICHRALQIRHKRLSNVTSDVAPILWQHGALARLEKGESIHELLHHGYSTISLGYAGLYECVKVMTGHSHTDNGPGKEFGIKVMQHLNDATNKWKKEEDIDYSVYGTPIESTTYKFAKCLKERFGTVKGITDRGYITNSYHVPVFEEIDAFSKLKLESEFQVLSPGGAISYVETPNLQGNIDAVIEVIQFIYDNIMYAELNTKSDYCQNCGYTGEILIDDDLEWYCPNCGNRDHNTLNVARRTCGYIGTNFWNKGRTQEIKERVLHIDNKEA

SEQ ID NO: 538 - protein, 707 aa, Unknown
  Description of Unknown: uncultivated organism sequence
  Category: MG55 effectors
  Description: MG55-113 effector
MKVIKRDGSTVEFNKSKIRDAITKSMKNGSGILLPDIARLIANDAEKYFAKEEDVATIYKIEKYVYDRLVHYGQAETARAYEGYRAVQEFKRNTNTTDDSILELLSKKNEDVMKENSNKNPVVSATQRDLIAGEVSKDIARRKLIPAHIVQAHDEGAIHWHDMDYTISPMFNCCLINLEDMFTNGTVINEKLVEEPKSFGTACTVATQIIAQVSSNQYGGQSITIKHLSKYLKVTEEKAFNHYMEMFNDESIATKLAKDIKMKELKDGVQTIRYQLSTLQTTNGQAPFSTIYLEIEDGNPYEEEMAMICEEMIRQRLEGMKNYKGQEIGEAFPKLVYLLDEHNCLEGGKYDYITKLAAKCTAKRLVPDYQSAKIMRENYEGNTFPPMGCRSHLSPWKDEKGNYKFYGRFNQGVVSLNLPQIAIMADKDMEMFWEMLDRRLELCKDALMTRHKMLLGVTSDSSPIHWQHGAIARLKKGEKIDKLLKDGYSTISLGYVGIAEMVQAMLGVTHTSKEGEKFALEVMNYMKEKCDKWKAETGLGFGLYGTPAESLIYRFCRIDKARFGEIQNVTDKLYYTNSYHVHVCEEIDAFSKLKFESQFHSISNGGCISYIEVPDMNKNVEAVEDIINFIYHNIQYAEINTKSDVCYKCGFNGEMELDRESLTWHCPSCGNDDESELQVMRRTCGYIGSSYWNKGRTAEIGDRVLHL

SEQ ID NO: 539 - protein, 724 aa, Unknown
  Description of Unknown: uncultivated organism sequence
  Category: MG55 effectors
  Description: MG55-114 effector
MKIIKRNGAEENFDISKIIMAVTKANAAVEECDRMTPRQIQRIAESVELACQELGRSAAVEEIQDMVEKQIMAHGAFEVAKAYITYRYTRSLVRRANTTDDRILSLIECNNEEAKQENSNKNPIVNSTQRDYMAGEVSRDITSRLLLPKDIVEAHEEGIIHFHDADYYAQHMHNCDLVNLEDMLENGTVITGTLIERPHSFSTACNIATQIIAQVASNQYGGQSISLTHLAPFVQVSRERIRREVAAEMQAIDAHPGEEKLAELVENRVREEIRRGVQTIQYQVVTLLTTNGQAPFVTVFMYLGEAKNEQERHDLAMIIEETLRQRYQGVKNEKGVWVTPAFPKLIYVLEEDNIHEDSPYWYLTELAARCTAKRMVPDYISEKKMLELKVDKNGEGHCYTCMGCRSFLTPYVDENGKPKYYGRFNQGVVTINLPDVALSSGGNMEKFWKIFDERLELCHRALMCRHERLKGTLSDAAPILWQYGALARLKKGEPIDKLLYGGYSTISLGYAGLYECVKYMTGKSHTDPSATPFALEVMQHMNDACKHWKQMHNIDFSLYGTPLESTTYKFAKCLQKRFGIIPGVTDKGYITNSYHIHVTEHIDAFSKLAFESKFQALSPGGAISYVEVPNMQNNIPAVLEVMKFIYDNIMYAELNTKSDYCQVCGYDGEIEIVEHDGKLIWRCPNCGNTDQDKMNVARRTCGYIGTQFWNQGRTQEIKERVLHL

SEQ ID NO: 540 - protein, 729 aa, Unknown
  Description of Unknown: uncultivated organism sequence
  Category: MG55 effectors
  Description: MG55-115 effector
MKIVKRDGHIVDYDPQKIRIAIGKANNEVRGKEKVSKEQIDEIIKYIEELNKKRILVEDIQDIIEEKLMSYGKYTLAKKYITYRYTRELVRKANTTDKSIKELIEGENEYWNSENSNKNAEVVTTQRDYLAGITSTDITRRFLLPEDIVEAHDKGIIHFHDADYFAQNALHNCELINLDDMLQNGTVINGVMIEKPHRFITAATIATQIILAVTSSSYGGATVSLTHLAPFVRLSYEKYLKKYQSRNLSKKDCEKFAMQDTRKEVEDGVQTFNYQVNSMTNTNGQAPFLSVCMYLGETDEYKEELAMIIEEFLKQRILGFKNEKGVYITPAFPKLLYVLEEDNIHEDSKYWYLTKLAAECTAKRMVPDYISEKVMKELKKNELGNGECYPCMGCRSFLTPDRTMSLGNIAHAKNYVEGKGKYYGRFNQGVVTINLPDVALSADGDMDKFWKIFDERLELCHRALQIRHKRLSNATSDVAPILWQHGALARLKKGESIHELLHHGYSTISLGYAGLYECVKVMTGHSHTDNGEGKEFGLKVMQHLNDATAKWKAEEDIDYSVYGSPIESTTYKFAKCLKERFGTIKGITDRGYVTNSYHVPVFEEIDAFSKLKLESEFQRLSPGGAISYIETPNLQNNLDAVLEVIQFIYDNIMYAELNTKSDYCQKCGYTGEILIDDNLEWYCPNCGNRDHNTLNVARRTCGYIGTNFWNKGRTQEIKERVLHLDNKNA

SEQ ID NO: 541 - protein, 399 aa, Unknown
  Description of Unknown: uncultivated organism sequence
  Category: MG55 effectors
  Description: MG55-116 effector
MESRAWCNFILVQKKKIDRREAYPPRYLKGYPGFPGSQRYAAAAVLADSLTKLEQAAREQSAKTPVRFANLSSEDWTAIQERFSPATPNEANEKLRPRTARQTVSRRFAALRKANPQWSPAQLSEEILAGIFRCAEKLKTHLVAKGFDDRRAVIKLANLYNVAVALALEPVRAAGDYVSFYQEEAPKRKAFGDVRGGLHQPSDDSAAIQITGFSVGEDGTPNYNGLLVCKQADDRKEDSWVFLYCHQEGQAFQLADPNAKPRGKLLTDWIGFASRGGSRKKAQASVKQLVRGQVWVSEKTPPTVLPLAFGSRQGREYLWHFDRNLRSEGEWVLGNPADGVLLNAEGRKEFFGKWFPFMHEEKRSLPGFVVGLTFREAIFAHTRTFAKWLRGEADNWPPE

SEQ ID NO: 542 - protein, 729 aa, Unknown
  Description of Unknown: uncultivated organism sequence
  Category: MG55 effectors
  Description: MG55-117 effector
MKIVKRDGHIVDYDQQKIRIARGKSNNEVRGKEKVSKEQIDEIIKYIEELNKKRILVEDIQDIIEEKLMSYGKYTLAKKYITYRYTRELVRKANTTDKSIKELIEGENEYWNSENSNKNAEVVTTQRDYLAGITSTDITRRFLLPEDIVEAHDKGIIHFHDADYFAQNALHNCELINLDDMLQNGTVINGVMIEKPHRFITAATIATQIILAVTSSSYGGATVSLTHLAPFVRLSYEKYLKKYQSRNLSKKDCEKFAMQDTRKEVEDGVQTFNYQVNSMTNTNGQAPFLSVCMYLGETDEYKEELAMIIEEFLKQRILGFKNEKGVYITPAFPKLLYVLEEDNIHEDSKYWYLTKLAAECTAKRMVPDYISEKVMKELKKNELGNGECYPCMGCRSFLTPDRTMSLGNIAHAKNYVEGKGKYYGRFNQGVVTINLPDVALSADGDMDKFWKIFDERLELCHRALQIRHKRLSNATSDVAPILWQHGALARLKKGESIHELLHHGYSTISLGYAGLYECVKVMTGHSHTDNGEGKEFGLKVMQHLNDATAKWKAEEDIDYSVYGSPIESTTYKFAKCLKERFGTIKGITDRGYVTNSYHVPVFEEIDAFSKLKLESEFQRLSPGGAISYIETPNLQNNLDAVLEVIQFIYDNIMYAELNTKSDYCQKCGYTGEILIDDNLEWYCPNCGNRDHNTLNVARRTCGYIGTNFWNKGRTQEIKERVLHLDNKNA

SEQ ID NO: 543 - protein, 729 aa, Unknown
  Description of Unknown: uncultivated organism sequence
  Category: MG55 effectors
  Description: MG55-118 effector
MKIVKRDGHIVDYDPEKIRVAIGKANEEVRGREKATKEEIKEIIKYIEDLNKKRILVEDIQDIIEQKLMEFDKYQLAKKYITYRYTRELVRKANTTDKSIKELIEGENEYWNSENSNKNAEVVTTQRDYLAGITSTDITRRFLLPEDIVEAHDAGIIHFHDADYFAQNALHNCELINLDDMLQYGTVINGVMIEKPHRFLTAATIATQIILAVTSSSYGGATVSLTHLAPFVRLSYEKYLKKYQARNFSKKDCEKYAMQDTKKEIEDGVQTFNYQVNSMTNTNGQAPFLSVCMYLGETEEYKDELAMIIEEFLKQRILGFKNEKGVYITPAFPKLLYVLEEDNIREGSKYWYLTKLAAECTAKRMVPDYISEKMMLKYKKNILGDGDCYPCMGCRSFLTPDRMLNIGNIAKAKNYVEGKGKYYGRFNQGVVTINLPDVALSADGDMDEFWKIFDERLELCHRALQIRHKRLSNVTSDVAPILWQHGALARLEKGESIHELLHHGYSTISLGYAGLYECVKVMTGHSHTDNGPGKEFGLKVMQHLNDATSKWKAEEDLDYSVYGTPIESTTYKFAKCLKERFGTVKGITDRNYITNSYHVPVFEEIDAFSKLKLESEFQVLSPGGAISYVETPNLQGNIDAVIEIIQFIYDNIMYAELNTKSDYCQQCGYTGEILIDDNLEWYCPNCGNRDHNTLNVARRTCGYIGTNFWNKGRTQEIKERVLHIDNKEA

SEQ ID NO: 544 - protein, 724 aa, Unknown
  Description of Unknown: uncultivated organism sequence
  Category: MG55 effectors
  Description: MG55-119 effector
MKIIKRNGAEATFDISKIIMAITKANAAVEECDRMTPRQIQRIAESVELACQELGRSAAVEEIQDMVEKQIMAHGAFEVAKAYITYRYTRSLVRRANTTDDRILSLIECNNEEAKQENSNKNPIVNSTQRDYMAGEVSRDITSRLLLPKDIVEAHEEGIIHFHDADYYAQHMHNCDLVNLEDMLENGTVITGTLIERPHSFSTACNIATQIIAQVASNQYGGQSISLTHLAPFVQVSRERIRREVEAEMQAIDAHPGEEKLAELVENRVREEIRRGVQTIQYQVVTLLTTNGQAPFVTVFMYLGEAKNEQERHDLAMIIEETLRQRYQGVKNEKGVWVTPAFPKLIYVLEEDNIHEDSPYWYLTELAARCTAKRMVPDYISEKKMLELKVDKNGEGHCYTCMGCRSFLTPYVDENGKPKYYGRFNQGVVTINLPDVALSSGGNMEKFWKIFDERLELCHRALMCRHERLKGTLSDAAPILWQYGALARLKKGEPIDKLLYGGYSTISLGYAGLYECVKYMTGKSHTDPSATPFALEIMQHMNDACAKWKQMHNIDFSLYGTPLESTTYKFAKCLQKRFGIIPGVTDKGYITNSYHIHVTEKIDAFSKLAFESKFQALSPGGAISYVEVPNMQNNIPAVLEVMKFIYDNIMYAELNTKSDYCQVCGYDGEIEIVEHDGKLIWRCPNCGNTDQDKMNVARRTCGYIGTQFWNQGRTQEIKERVLHL

SEQ ID NO: 545 - protein, 722 aa, Unknown
  Description of Unknown: uncultivated organism sequence
  Category: MG55 effectors
  Description: MG55-120 effector
MRMKIIKRSGSEDTFDARKITAAVTKANYEVPTKERLSKEQIESITADVENICLDMNRALSVEEIQDLVEEQIMDRRAFAVARKYITYRYNRALLRKANSTDKQILSLLECNNEMVKQENSNKNPTVNSVQRDYMAGEVSKDITKRFLLPSEIVRAHEQGIIHFHDSDYFAQHMHNCCLVNLEDMLQNGTVISETMIEKPKSFSTACNIATQSIAQIASSQYGGQSISLTHLAPFVDISRQKYKKQVENELKEAGLSYNSKQVDEIAEIRVRDEIKRGVQMIQYQVITLMTTNGQAPFVSVFMYLDEAPEGRLREDLALIMEEILRQRMQGVKNEKGVYITPAFPKLLYVLEEDNVREGSKYWYLTQLAAKCTAKRMVPDYISEKIMKKMKDGNCYPCMGCRSFLTVYHDEKDRPKFYGRFNQGVVTINLVDVACSSDGDEEAFWKILDKRLELCKKALMYRHNRLKGTPSDVAPILWQYGALARLKKGEVIDKLLYNGYSTISLGYAGLCECTRYMTGKSHTDPSATPFALKVMEKLNDACSRWREEENIDFSLYGTPLESTTYKFAKCLQKRFGIIKGVTDKNYITNSYHVHVTEEINAFDKLKFEAQFQNLSPGGAVSYVEVPNMENNIDAVLQVMQFIYDNIMYAELNTKSDYCQVCDYSGQIEIVNDEHGKLIWKCPNCGNTDQDKMNVARRTCGYIGTQFWNQGRTQEIKERVLHL

SEQ ID NO: 546 - protein, 708 aa, Unknown
  Description of Unknown: uncultivated organism sequence
  Category: MG55 effectors
  Description: MG55-121 effector
MKVIKRDGSTADFDSSKIIVAIQKANQVVEPEDRIDQERIEAIAHYVESKNRMRLLVEDIQDMVEHQLMDEGKFNLAKSYIIYRYTRALVRKANTTDESILSLIRNSNKDVMEENSNKNAVMASTQRDLIAGEVSKDLTRRLILPEKISKAHDEGAIHFHDADYFVQPIFNCCLINVGDMLDNGTVMNGKLIESPKSFQVACTVMTQIIASVASSQYGGQSVDIRHLGKYLRRSYEKFKLTIKAEVGDSVADEVVERLTKRRLQDELRSGVQTIQYQINTLMTTNGQSPFVTIFLNLQADDEYLEENAMIVEEILRQRLEGIKNDKGVFVTPAFPKLVYVLDEHNCLKGGKYDYITKLAVKCSAKRLYPDYISAKKMRENYEGNVFAPMGCRSFLAAWKDDEGNYKFEGRFNQGVVSLNLPQVAILAHGDEEKFWPLLDERLQLCYEALMCRHNSLKGIRSDVSPVHWQYGAIARLEKGEVIDKYLEKGYSTISLGYIGLYEMTKLMKDVSHTTPEGEEFALRVMKYLRAACDKWKKETGLGFALYGTPAESLCYRFARIDKERFGTIADVTDKGYYTNSYHVDVREDIDAFSKFNFESQFQRISSGGAISYVEIPNMRHNLEAMEDVVRFIYDNIQYAEFNTKSDYCHVCGFDGEIIINDDLEWECPNCGNKNQTLMNVTRRTCGYLGENFWNVGKTKEIKSRVLHL

SEQ ID NO: 547 - protein, 708 aa, Unknown
  Description of Unknown: uncultivated organism sequence
  Category: MG55 effectors
  Description: MG55-122 effector
MRVIKRDGRTVEYDRNKILIAIRKANAEVDTFERVNDDMIDGIVAGIENMKRDTMQVEDIQDIIEQKLMAAGKFDLAKKYIIYRYTRELVRKANTTDDSIMSLLQNSNKDVMEENSNKNAYVASTQRDLIAGEVSKDLTKRILLPEKITKAHEDGVLHFHDMDYFIQPIFNCCLINIGDMLDNGTVMNGKLIESPKSFQVACTVMTQIISAVASSQYGGQSVDTRHLGKYLRKSADKYRKHYTERYAGKIAPDVIEEFVKERVNDELRSGVQTIQYQINTLMTTNGQSPFVTLFLNLDPKDEYIKENAMIIEEILRQRLEGIKNEKGVYVTPAFPKLIYVLDEHNALKGGEYDYITKLAVRCSAKRMYPDYISAKKMRENYEGNVFSCMGCRSFLTPWKDENGNYKFEGRFNQGVVSLNLPQIGILAKGDMEYFWQLLEERLSLCFEALMCRHRALEGVTSDVSPIHWQYGAIARLQKGEKIDKLLHGGYSTISLGYIGLYEVTKLMTGESQTTEKGSQFAKALMNRLRRATDTWKEETGIHFGLYGTPAESLCYRFAEIDKKRFGEIEDVTDKGYYTNSYHVDVREKIDAFSKFEFEAQFQVISSGGAISYVEVPNMQNNLPALEEVVKYIYEHIQYAEFNTKSDYCHVCGYDGEIIINDNLEWECPNCGNKDHDKMNVTRRTCGYLGENFWNVGKTKEINARVLHL

SEQ ID NO: 548 - protein, 708 aa, Unknown
  Description of Unknown: uncultivated organism sequence
  Category: MG55 effectors
  Description: MG55-123 effector
MRVIKRDGRTVEYDRNKILIAIRKANAEVDTFERVNDDMIDGIVAGIENMKRDTMQVEDIQDIIEQKLMAAGKFDLAKKYIIYRYTRELVRKANTTDDSIMSLLQNSNKDVMEENSNKNAYVASTQRDLIAGEVSKDLTKRILLPEKITKAHEEGVLHFHDMDYFIQPIFNCCLINIGDMLDNGTVMNGKLIESPKSFQVACTVMTQIISAVASSQYGGQSVDTRHLGKYLRKSADKYRKHYTERYAGKIAPDIIEEFVKERVNDELRSGVQTIQYQINTLMTTNGQSPFVTLFLNLDPKDEYIKENAMIIEEILRQRLEGIKNEKGVYVTPAFPKLIYVLDEHNALKGGEYDYITKLAVRCSAKRMYPDYISAKKMRENYEGNVFSCMGCRSFLTPWKDENGNYKFEGRFNQGVVSLNLPQIGILAKGDMEYFWQLLEERLSLCFEALMCRHRALEGVTSDVSPIHWQYGAIARLQKGEKIDKLLHGGYSTISLGYIGLYEVTKLMTGESQTTEKGSQFAKALMNRLRRATDTWKEETGIHFGLYGTPAESLCYRFAEIDKKRFGEIEDVTDKGYYTNSYHVDVREKIDAFSKFEFEAQFQVISSGGAISYVEVPNMQNNLPALEEVVKYIYEHIQYAEFNTKSDYCHVCGYDGEIIINDNLEWECPNCGNKDHDKMNVTRRTCGYLGENFWNVGKTKEINARVLHL

SEQ ID NO: 549 - protein, 720 aa, Unknown
  Description of Unknown: uncultivated organism sequence
  Category: MG55 effectors
  Description: MG55-124 effector
MKIIKRSGAEAVFDISKIIIAINKANHEVVEAERLTADQIKEIAQYIEDSCKDANHALNVEDIQDLVEDQLMDKRAFSVARKYITYRYKRALVRKSNSTDEQILSLIECNNEEVKQENSNKDSTVNSVQRDYMAGEVSKDITRRFLLPEDIVEAHEQGIIHFHDADYFAQHMHNCDLVNLEDMLQNGTVISGTRIDKPHSFSTACNIATQIIAQVASSQYGGQSISLAHLVPFVQISREKIHAELVQTLKESDVELSEEKINSIVERRLHAEIERGVQVIQYQVVTLMTTNGQSPFVTVFMYLNEAKNEQEKKDLAMIIEEVLDQRYQGVKNEDGVWITPAFPKLIYVLEEDNIHEDSEYYYLTKKAAKCTAKRMVPDYISEKKMKELKDGNCYTCMGCRSFLTVYHDEDGKPKFYGRFNQGVVTLNLVDLACSSGGDFEKFWKLFDERLDLCYRALMARHNRLKGTPSDVAPILWQYGALARLKKGETIDKLLYGGYSTISLGYAGLCECTRYMTGKPHTDPAATPFALKVMQRLNDACKEWKEKENIDFSVYGTPLESTTYKFAKCLQKRFGVIPGVTDKNYITNSYHVHVTENIDAFTKLKFESQFQALSPGGAISYVEVPNMQDNLDAVLSVMKFIYENIMYAELNTKSDYCQVCGYDGEIQIVKDDDGKLVWECPHCHNRDQDKMNVARRTCGYIGSQFWNQGRTQEIKERVLHL

SEQ ID NO: 550 - protein, 720 aa, Unknown
  Description of Unknown: uncultivated organism sequence
  Category: MG55 effectors
  Description: MG55-125 effector
MKIIKRSGTEAVFDISKIIIAINKANHEVVEAERLTADQIKEIAQYIEDSCKDANHALNVEDIQDLVEDQLMDKRAFSVARKYITYRYKRALVRKSNSTDEQILSLIECNNEEVKQENSNKDSTVNSVQRDYMAGEVSKDITRRFLLPEDIVEAHEQGIIHFHDADYFAQHMHNCDLVNLEDMLQNGTVISGTRIDKPHSFSTACNIATQIIAQVASSQYGGQSISLAHLVPFVQISREKIHAELVQTLKESDVELSEEKINSIVERRLHAEIERGVQVIQYQVVTLMTTNGQSPFVTVFMYLNEAKNEQEKKDLAMIIEEVLDQRYQGVKNEDGVWITPAFPKLIYVLEEDNIHEDSEYYYLTKKAAKCTAKRMVPDYISEKKMKELKDGNCYTCMGCRSFLTVYHDEDGKPKFYGRFNQGVVTLNLVDLACSSGGDFEKFWKLFDERLDLCYRALMARHNRLKGTPSDVAPILWQYGALARLKKGETIDKLLYGGYSTISLGYAGLCECTRYMTGKPHTDPAATPFALKVMQRLNDACKEWKEKENIDFSVYGTPLESTTYKFAKCLQKRFGVIPGVTDKNYITNSYHVHVTENIDAFTKLKFESQFQALSPGGAISYVEVPNMQDNLDAVLSVMKFIYENIMYAELNTKSDYCQVCGYDGEIQIVKDDDGKLVWECPHCHNRDQDKMNVARRTCGYIGSQFWNQGRTQEIKERVLHL

SEQ ID NO: 551 - protein, 720 aa, Unknown
  Description of Unknown: uncultivated organism sequence
  Category: MG55 effectors
  Description: MG55-126 effector
MKIIKRSGAEAVFDISKIIIAINKANHEVVEAERLTADQIKEIAQYIEDSCKDANHALNVEDIQDLVEDQLMDKRAFSVARKYITYRYKRALVRKSNSTDEQILSLIECNNEEVKQENSNKDSTVNSVQRDYMAGEVSKDITRRFLLPEDIVAAHEQGIIHFHDADYFAQHMHNCDLVNLEDMLQNGTVISGTRIDKPHSFSTACNIATQIIAQVASSQYGGQSISLAHLVPFVQISREKIHAELVQTLKESDVELSEEKINSIVERRLHAEIERGVQVIQYQVVTLMTTNGQSPFVTVFMYLNEAKNEQEKKDLAMIIEEVLDQRYQGVKNEDGVWITPAFPKLIYVLEEDNIHEDSEYYYLTKKAAKCTAKRMVPDYISEKKMKELKDGNCYTCMGCRSFLTVYHDEDGKPKFYGRFNQGVVTLNLVDLACSSGGDFEKFWKLFDERLDLCYRALMARHNRLKGTPSDVAPILWQYGALARLKKGETIDKLLYGGYSTISLGYAGLCECTRYMTGKPHTDPAATPFALKVMQRLNDACKEWKEKENIDFSVYGTPLESTTYKFAKCLQKRFGVIPGVTDKNYITNSYHVHVTENIDAFTKLKFESQFQALSPGGAISYVEVPNMQDNLDAVLSVMKFIYENIMYAELNTKSDYCQVCGYDGEIQIVKDDDGKLVWECPHCHNRDQDKMNVARRTCGYIGSQFWNQGRTQEIKERVLHL

SEQ ID NO: 552 - protein, 720 aa, Unknown
  Description of Unknown: uncultivated organism sequence
  Category: MG55 effectors
  Description: MG55-127 effector
MKIIKRSGAEAVFDISKIIIAINKANHEVVEAERLTADQIKEIAQYIEDSCKDANHALNVEDIQDLVEDQLMDKRAFSVARKYITYRYKRALVRKSNSTDEQILSLIECNNEEVKQENSNKDSTVNSVQRDYMAGEVSKDITRRFLLPEDIVAAHEQGIIHFHDADYFAQHMHNCDLVNLEDMLQNGTVISGTRIDKPHSFSTACNIATQIIAQVASSQYGGQSISLAHLVPFVQISREKIHAELVQTLKESDVELSEEKINSIVERRLHAEIERGVQVIQYQVVTLMTTNGQSPFVTVFMYLNEAKNEQEKKDLAMIIEEVLDQRYQGVKNEDGVWITPAFPKLIYVLEEDNIHEDSEYYYLTKKAAKCTAKRMVPDYISEKKMKELKEGNCYTCMGCRSFLTVYHDEDGKPKFYGRFNQGVVTLNLVDLACSSGGDFEKFWKLFDERLDLCYRALMARHNRLKGTPSDVAPILWQYGALARLKKGETIDKLLYGGYSTISLGYAGLCECTRYMTGKPHTDPAATPFALKVMQRLNDACKEWKEKENIDFSVYGTPLESTTYKFAKCLQKRFGVIPGVTDKNYITNSYHVHVTENIDAFTKLKFESQFQALSPGGAISYVEVPNMQDNLDAVLSVMKFIYENIMYAELNTKSDYCQVCGYDGEIQIVKDDDGKLVWECPHCHNRDQDKMNVARRTCGYIGSQFWNQGRTQEIKERVLHL

SEQ ID NO: 553 - protein, 720 aa, Unknown
  Description of Unknown: uncultivated organism sequence
  Category: MG55 effectors
  Description: MG55-128 effector
MKIIKRSGAEAVFDISKIIIAINKANHEVVEAERLTADQIKAIAQYIEDSCKDANHALNVEDIQDLVEDQLMDKRAFSVARKYITYRYKRALVRKSNSTDEQILSLIECNNEEVKQENSNKDSTVNSVQRDYMAGEVSKDITRRFLLPEDIVEAHEQGIIHFHDADYFAQHMHNCDLVNLEDMLQNGTVISGTRIDKPHSFSTACNIATQIIAQVASSQYGGQSISLAHLVPFVQISREKIHAELVQTLKESDVELSEEKINSIVERRLHAEIERGVQVIQYQVVTLMTTNGQSPFVTVFMYLNEAKNEQEKKDLAMIIEEVLDQRYQGVKNEDGVWITPAFPKLIYVLEEDNIHEDSEYYYLTKKAAKCTAKRMVPDYISEKKMKELKDGNCYTCMGCRSFLTVYHDEDGKPKFYGRFNQGVVTLNLVDLACSSGGDFEKFWKLFDERLDLCYRALMARHNRLKGTPSDVAPILWQYGALARLKKGETIDKLLYGGYSTISLGYAGLCECTRYMTGKPHTDPAATPFALKVMQRLNDACKEWKEKENIDFSVYGTPLESTTYKFAKCLQKRFGVIPGVTDKNYITNSYHVHVTENIDAFTKLKFESQFQALSPGGAISYVEVPNMQDNLDAVLSVMKFIYENIMYAELNTKSDYCQVCGYDGEIQIVKDDDGKLVWECPHCHNRDQDKMNVARRTCGYIGSQFWNQGRTQEIKERVLHL

SEQ ID NO: 554 - protein, 720 aa, Unknown
  Description of Unknown: uncultivated organism sequence
  Category: MG55 effectors
  Description: MG55-129 effector
MKIIKRSGTEAVFDISKIIIAINKANHEVVEAERLTADQIKEIAQYIEDSCKDANHALNVEDIQDLVEDQLMDKRAFSVARKYITYRYKRALVRKSNSTDEQILSLIECNNEEVKQENSNKDSTVNSVQRDYMAGEVSKDITRRFLLPEDIVEAHEQGIIHFHDADYFAQHMHNCDLVNLEDMLQNGTVISGTRIDKPHSFSTACNIATQIIAQVASSQYGGQSISLAHLVPFVQISREKIHAELVQTLKESDVELSEEKINSIVERRLHAEIERGVQVIQYQVVTLMTTNGQSPFVTVFMYLNEAKNEQEKKDLAMIIEEVLDQRYQGVKNEDGVWITPAFPKLIYVLEEDNIHEDSEYYYLTKKAAKCTAKRMVPDYISEKKMKELKDGNCYTCMGCRSFLTVYHDEDGKPKFYGRFNQGVVTLNLVDLACSSGGDFEKFWKLFDERLDLCYRALMARHNRLKGTPSDVAPILWQYGALARLKKGETIDKLLYGGYSTISLGYAGLCECTRYMTGKPHTDPAAAPFALKVMQRLNDACKEWKEKENIDFSVYGTPLESTTYKFAKCLQKRFGVIPGVTDKNYITNSYHVHVTENIDAFTKLKFESQFQALSPGGAISYVEVPNMQDNLEAVLSVMKFIYENIMYAELNTKSDYCQVCGYDGEIQIVKDDDGKLVWECPHCHNRDQDKMNVARRTCGYIGSQFWNQGRTQEIKERVLHL

SEQ ID NO: 555 - protein, 972 aa, Unknown
  Description of Unknown: uncultivated organism sequence
  Category: MG55 effectors
  Description: MG55-130 effector
MQIGLDIGSTTIKIAVLDDAGQLQFSKYERHYSQIAEKMQQLLAELHIKMPLLKTARLAISGSAGIGIADSCGLQFVQEVFAEKVCTERLNPGTEAVIELGGEDAKLLFLGRHFDARMNDSCAGGTGAFIDQMASLLSVPTEAMNELAQQASTRYTIASRCGVFAKSDIQPLLNQGAAKADLAASIFDAVASQAVTGLAKGRPITGKVLYLGGPLTFMSELRHSFDKILKIEGYCPENSLYYVAMGAAFCAENKVDLTELPAKLAAVGAQRDFDHLEPLFANPAEYDEFMERHSKERIEPGDISAATEAYIGMDAGSTTIKIAVISPSGQLLDSSYQGNKGNPVIAIKEYLQNFYIKYPHCRILGSAVTGYGEDLIRNGFSVDYGIVETMAHFIAAKTLQPDVDFILDIGGQDIKCLKIHNGCIDNIFLNEACSSGCGSFLQTFAEILGYSAEEFARIGLFADKPVDLGSRCTVFMNSSVKQAQKDGATVANISAGLSLSIVKNALYKVIRPGSKESIGKHIVVQGGTFLNDCVLRAFEKEMGLKVVRPNIAGLMGAYGAAIYARSRHQETGHVSTLADAAALENFVHEVKAVTCGLCSNHCHLTVNTFASGKRFISGNRCERPVTHCAPDDTFNLYRQKLQLLESLKGVPGKRGKIGLPMGLNMYELLPFWHAFFTRLGFEVITSPIYDKTIFQKGQNTIPSDTVCYPAKLMHGHIKWLLENGINTIFYPCMTYNVDENSAENCYNCPVVAYYPEVLHANMHDLDNATYIFDYLGLGHKKVLLKKLQQICKEHFPDIGSSELKAALQEAYAAYNKFEAQVKELGQTIINTARSQHKPIVVLAGRPYHIDPKVNHSIDRLITTMGAALVSEDAVSSHISMQELNEDLQVLNQWTYHSRLYAAAKYVSRSSDMYMVHLVSFGCGCDAITADECRRILEEHGQIYTQIKIDDIDNLGAAKIRLRSLFAAAGLES

SEQ ID NO: 556 - protein, 708 aa, Unknown
  Description of Unknown: uncultivated organism sequence
  Category: MG55 effectors
  Description: MG55-131 effector
MRVIKRDGRTVEYDRNKILIAIRKANAEVDTFERVNDDMIDGIVAGIENMKRDTMQVEDIQDIIEQKLMAAGKFDLAKKYIIYRYTRELVRKANTTDDSIMSLLQNSNKDVMEENSNKNAYVASTQRDLIAGEVSKDLTKRILLPEKITKAHEEGVLHFHDMDYFIQPIFNCCLINIGDMLDNGTVMNGKLIESPKSFQVACTVMTQIISAVASSQYGGQSVDTRHLGKYLRKSADKYRKHYTERYAGKIAPDVIEEFVKERVNDELRSGVQTIQYQINTLMTTNGQSPFVTLFLNLDPKDEYIKENAMIIEEILRQRLEGIKNEKGVYVTPAFPKLIYVLDEHNALKGGEYDYITKLAVRCSAKRMYPDYISAKKMRENYEGNVFSCMGCRSFLTPWKDENGNYKFEGRFNQGVVSLNLPQIGILAKGDMEYFWQLLEERLSLCFEALMCRHRALEGVTSDVSPIHWQYGAIARLQKGEKIDKLLHGGYSTISLGYIGLYEVTKLMTGESQTTEKGSQFAKALMNRLRRATDTWKEETGIHFGLYGTPAESLCYRFAEIDKKRFGEIEDVTDKGYYTNSYHVDVREKIDAFSKFEFEAQFQVISSGGAISYVEVPNMQNNLPALEEVVKYIYEHIQYAEFNTKSDYCHVCGYDGEIIINDNLEWECPNCGNKDHDKMNVTRRTCGYLGENFWNVGKTKEINARVLHL

SEQ ID NO: 557 - protein, 723 aa, Unknown
  Description of Unknown: uncultivated organism sequence
  Category: MG55 effectors
  Description: MG55-132 effector
MRIIKRNGSEEDFNIEKIINAVKKANGSGEHKFLTDEQIEDVADYVEYKCNKIRRAVSVEEIQDMVEDQLMAKGAFELARRYVRYRYNRSLVRKANTTDNRILSLIECNNEEVKQENSNKNPTVNSVQRDYMAGEVSRDLTRRMLLPADIVEADKEGIIHFHDSDYFAQHMHNCDLVNLEDMLQNGTVISDTLIERPHSFSTACNIATQIIAQVASNQYGGQSISLAHLAPFVQVSREKIRRETLAEIEELGVHPTEEKINDIVEQRLRKEVNRGVQTIQYQVVTLLTTNGQAPFVTVFMYLNEAKNEQEKHDLAMIIEETLKQRHKGVKNEKGVWITPAFPKLIYVLEEDNITEDSKYWYLTELAAKCTAKRMVPDYISEKVMLQSKIDKNGEGHCFTCMGCRSFLTPYVDENGKPKYYGRFNQGVVTVNLIDIGLSAGKDLDKFWKIFDERMELCHRALQCRHERLTGTLSDAAPILWQYGALARLKKGEKIDKLLHGGYSTLSLGYAGLWECVYSLIGKKLTEKEGKELGLEIMQKLNDYCAKWKKEEDIDYSIYGTPLESTTYKFAKCLQKRFGIIKGVTDKNYITNSYHVHVTENIDAFSKLKLESEFQALSPGGAISYVEVPNMQDNIPAVLQVIKFIYDNIMYAELNTKSDYCQVCGYDGEIKIVHDDGKLVWECPNCGNRDQDKMNVARRTCGYIGTQFWNQGRTQEIEERVLHL

SEQ ID NO: 558 - protein, 708 aa, Unknown
  Description of Unknown: uncultivated organism sequence
  Category: MG55 effectors
  Description: MG55-133 effector
MKVIKRDGSTADFDSSKIIVAIQKANQVVEPEDRIDQERIEAIAHYVESKNRMRLLVEDIQDMVEHQLMDEGKFNLAKSYIIYRYTRALVRKANTTDESILSLIRNSNKDVMEENSNKNAVMASTQRDLIAGEVSKDLTRRLILPEKISKAHDEGAIHFHDADYFVQPIFNCCLINVSDMLDNGTVMNGKLIESPKSFQVACTVMTQIIASVASSQYGGQSVDIRHLGKYLRRSYEKFKLTIKAEVGDSVADEVVERLTKRRLQDELRSGVQTIQYQINTLMTTNGQSPFVTIFLNLQADDEYLEENAMIVEEILRQRLEGIKNDKGVFVTPAFPKLVYVLDEHNCLKGGKYDYITKLAVKCSAKRLYPDYISAKKMRENYEGNVFAPMGCRSFLAAWKDDEGNYKFEGRFNQGVVSLNLPQVAILAHGDEEKFWPLLDERLQLCYEALMCRHNSLKGIRSDVSPVHWQYGAIARLEKGEVIDKYLEKGYSTISLGYIGLYEMTKLMKDVSHTTPEGEEFALRVMKYLRAACDKWKKETGLGFALYGTPAESLCYRFARIDKERFGTIADVTDKGYYTNSYHVDVREDIDAFSKFNFESQFQRISSGGAISYVEIPNMRHNLEAMEDVVRFIYDNIQYAEFNTKSDYCHVCGFDGEIIINDDLEWECPNCGNKNQTLMNVTRRTCGYLGENFWNVGKTKEIKSRVLHL

SEQ ID NO: 559 - protein, 1416 aa, Unknown
  Description of Unknown: uncultivated organism sequence
  Category: MG55 effectors
  Description: MG55-134 effector
MKLDFNTLGIDIGSTTVKIAILNKDGEIIFSDYQRHYANIQETLAKIIDEAYEEFGDIPVSPMITGSGGLTLSKHMEIPFVQEVVAVATSLKDYAPRTDVAIELGGEDAKIIYFTGGIDQRMNGICAGGTGSFIDQMATLLKTDAAGLNEYAKNYKAIYPIAARCGVFAKTDIQPLINEGATKEDLSASIFQAVVNQTISGLACGKPIKGNVAFLGGPLHFLTELKQAFIRTLGLEGDAIIAPEHSHLFAASGAAMNAHADVQSSLGELKEKLSHKIELEFEVTRMEPLFASEKEYEDFTERHNKHNVRKGDFASYKGDLFLGIDAGSTTTKVAVIGDDGSLLYSFYSSNNGSPLKTALKAMKDIYSKMPEGARIVRSCSTGYGEALLKSALLLDEGEVETVAHYTAAAFFDPNVDCILDIGGQDMKCIKIKNNSVDKVQLNEACSSGCGSFIETFAKSLNYEVADFAKIALFAENPIDLGSRCTVFMNSKVKQAQKEGASVADISAGLAYSVIKNALLKVIKLTDPKDLGKQVVVQGGTFYNDAVLRSFERISGCEAIRPDIAGIMGAFGAALIAKDRYTGQKSTMLSFKEINELRFKTSMTRCQGCINHCLLTVNEFTGDRKFISGNRCEKGLGLEKNKEQIPNLFEYKNERVFRHYKPLKKADAPRGVVGIPRVLNMYENYPFWFTFFTKLGYSVKLSPVSSRKIYELGIESIPSESECYPAKLAHGHVTWLIRQGLEYIFYPCIPYERVEVPDAGNHYNCPIVTSYGENIKNNIEELRDDKIKYQNPFISLESEEILTKRLVDFFRKENGIPAAEIKAAAHEGWLEMQAVREDMTKKGKEVLQYLKETGRHGIVLAGRPYHSDPEINHGIPDLITSYGVAVLTEDSISELSEVDRPTIVMDQWMYHSRLYKAASFVAKNDNLDLIQLNSFGCGLDAVTTDQVNDILTKQNKIYTVLKIDEVNNLGAARIRIRSLLAAVKDRERKKIEAKRVDTAHHRVIFTEQMRKDYTILVPDMSPIHFEILESALASCGYNVEVLKADSKCIDYGLKYVNNDACYPSLIVVGQFMQALLSGKYDLHKVALIITQTGGGCRATNYIGFIRRALEKAGMGYIPVISMSAGIEKNPGLKVNLEMANKALQALIYGDVFMRVLYKTRPYEKVKGSANALHEKWKKIAIESVKKANKKQFKKNIQNIVKEFDELELVDIKKPKVGIVGEILVKFMPLANNFIVELLEEEGAEAVCPDLIDFFMYSLYNANFKAEYLGKKKSSAKINNFLIWFIERYRKCANDALAASKRFHPTVPIQKLAEYASPIVSCGNQTGEGWFLTGEMIELIKSGVPNIVCTQPFGCLPNHVVGKGVIKELRHQYPDSNIVAVDYDPGASEVNQLNRIKLMLSTAGKNLIAESKDNEETA

SEQ ID NO: 560 - protein, 972 aa, Unknown
  Description of Unknown: uncultivated organism sequence
  Category: MG55 effectors
  Description: MG55-135 effector
MQIGLDIGSTTIKIAVLDDAGQLQFSKYERHYSQIAEKMQQLLAELHVKMPLLKTARLAISGSAGIGIADSCGLQFVQEVFAEKVCTERLNPGTEAVIELGGEDAKLLFLGRHFDARMNDSCAGGTGAFIDQMASLLSVPTEAMNELAQQASTRYTIASRCGVFAKSDIQPLLNQGAAKADLAASIFDAVASQAVTGLAKGRPITGKVLYLGGPLTFMSELRHSFDKILKIEGYCPENSLYYVAMGAAFCAENKVDLTELPAKLAAVGAQRDFDHLEPLFASTAEYDEFMERHSKERIEPGDISAATEAYIGMDAGSTTIKIAVISPSGQLLDSSYQSNKGNPVIAIKEYLQNFYIKYPHCRILGSAVTGYGEDLIRNGFSVDYGIVETMAHFIAAKTLQPDVDFILDIGGQDIKCLKIHNGCIDNIFLNEACSSGCGSFLQTFAEILGYSAEEFARIGLFADKPVDLGSRCTVFMNSSVKQAQKDGATVANISAGLSLSIVKNALYKVIRPGSKESIGKHIVVQGGTFLNDCVLRAFEKEMGLKVVRPNIAGLMGAYGAAIYARSRHQETGHASTLADAAALENFVHEVKAVTCGLCSNHCHLTVNTFASGKRFISGNRCERPVTHCAPDDTFNLYRQKLQLLESLKGVPGKRGKIGLPMGLNMYELLPFWHAFFTRLGFEVITSPIYDKTIFQKGQNTIPSDTVCYPAKLMHGHIKWLLENGINTIFYPCMTYNVDENSAENCYNCPVVAYYPEVLHANMHDLDNATYIFDYLGLGHKKVLLKKLQQICKEHFPDIGSSELKAALQEAYAAYNKFEAQVKELGQTIINTARSQHKPIVVLAGRPYHIDPKVNHSIDRLITTMGAALVSEDAVSSHISMQELNDDLQVLNQWTYHSRLYAAAKYVSRSSDMYMVHLVSFGCGCDAITADECRRILEDHGQIYTQIKIDDIDNLGAAKIRLRSLFAAAGLES

SEQ ID NO: 561 - protein, 978 aa, Unknown
  Description of Unknown: uncultivated organism sequence
  Category: MG55 effectors
  Description: MG55-136 effector
MRVGLDIGSTTIKCVVLDDADKIVYSTYERHYSHILEKGQELLRRVAEQYLPGGRALLAISGSAGMGLADSCQVPFVQEVFATRVAANRLAPGTDCIIELGGEDAKILFLTHGTEVRMNGSCAGGTGAFIDQMATLLKMSADEMDKAAQGAQRTYTIASRCGVFAKSDIQPLINQGAQAGDIAASIYQAVVNQTIAGLAQGRPIEGKVLYLGGPLTFSSVLRQSFDNTLHLKGTCPENSLLYVALGAAFYADQECDLNAVIDRLGRYSATATYVSLPPLFATKQEYEEFHARHMKAAVPCVPFGAECGPVHIGIDSGSTTIKLAVIDQNDNILFTSYQPNLGNPIPLVRKVLTDLYKNHPNLEIASVTTTGYGEELVKNAFHCDRGLVETVAHFTAAKHFMPNVDFIIDIGGQDMKCFKIEDGAISNIFLNEACSSGCGSFLQTFAQALGYDVKKFAALGLFADRPVDLGSRCTVFMNSSVKQAQKDGATIENISAGLSISVVKNALYKVIRASSPEELGRNIVVQGGTFYNEAVLRAFEKEMGVEVIRPDIAGLMGAYGAALFGKAHARPGARSTVLTLPELEAFTQKVNTVQCQGCGNHCQLTVNIFADGKRFISGNRCDKPVTGKATDEDLDLYAYKLGLLLDYKPQNLENSRGTIGLPLCLNMYELLPFWHTLFTRLGFTVKTSPVSSRALYQEGQATIPSDTACFPAKLAHGHIAELVKMGVDAVFYPCMSYNVDEHLGDNHYNCPVVAYYPEVLAGNCHELANTTFIYDYLNLARRKDFTRRFPAVLDKYFPGLPRKAVAAAIDAAYAEYARHMEQVRAKGAEIIARARAEGRHIIVLAGRPYHVDPEVNHGIDKLIVRQGAAVVTEDAVSHLVERFPTSVLNQWTYHSRLYAAAKYCTTQPDMDLVQLVSFGCGLDAITTDETREILQEGGKLYTQLKIDEITNLGAVNIRLRSLFAALEERREEAEKRRN

SEQ ID NO: 562 - protein, 723 aa, Unknown
  Description of Unknown: uncultivated organism sequence
  Category: MG55 effectors
  Description: MG55-137 effector
MRIIKRNGSEEDFNIEKIINAVKKANGSGEHKFLTDEQIEDVADYVEYKCNKIRRAVSVEEIQDMVEDQLMAKGAFELARRYVRYRYNRSLVRKANTTDNRILSLIECNNEEVKQENSNKNPTVNSVQRDYMAGEVSRDLTRRMLLPADIVEADKEGIIHFHDSDYFAQHMHNCDLVNLEDMLQNGTVISDTLIERPHSFSTACNIATQIIAQVASNQYGGQSISLAHLAPFVQVSREKIRRETLAEIEELGVHPTEEKINDIVEQRLRKEVNRGVQTIQYQVVTLLTTNGQAPFVTVFMYLNEAKNEQEKHDLAMIIEETLKQRHKGVKNEKGVWITPAFPKLIYVLEEDNITEDSKYWYLTELAAKCTAKRMVPDYISEKVMLQSKIDKNGEGHCFTCMGCRSFLTPYVDENGKPKYYGRFNQGVVTVNLIDIGLSAGKDLDKFWKIFDERMELCHRALQCRHERLTGTLSDAAPILWQYGALARLKKGEKIDKLLHGGYSTLSLGYAGLWECVYSLIGKKLTEKEGKELGLEIMQKLNDYCAKWKKAENIDYSLYGTPLESTTYKFAKCLQKRFGIIKGVTDKNYITNSYHVHVTENIDAFSKLKLESEFQALSPGGAISYVEVPNMQDNIPAVLQVIKFIYDNIMYAELNTKSDYCQVCGYDGEIKIVHDDGKLVWECPNCGNRDQDKMNVARRTCGYIGTQFWNQGRTQEIEERVLHL

SEQ ID NO: 563 - protein, 720 aa, Unknown
  Description of Unknown: uncultivated organism sequence
  Category: MG55 effectors
  Description: MG55-138 effector
MKIIKRSGTEAVFDISKIIIAINKANHEVVEAERLTADQIKEIAQYIEDSCKDANHALNVEDIQDLVEDQLMDKRAFSVARKYITYRYKRALVRKSNSTDEQILSLIECNNEEVKQENSNKDSTVNSVQRDYMAGEVSKDITRRFLLPEDIVAAHEQGIIHFHDADYFAQHMHNCDLVNLEDMLQNGTVISGTRIDKPHSFSTACNIATQIIAQVASSQYGGQSISLAHLVPFVQISREKIHAELVQTLKESDVELSEEKINSIVERRLHAEIERGVQVIQYQVVTLMTTNGQSPFVTVFMYLNEAKNEQEKKDLAMIIEEVLDQRYQGVKNEDGVWITPAFPKLIYVLEEDNIHEDSEYYYLTKKAAKCTAKRMVPDYISEKKMKELKDGNCYTCMGCRSFLTVYHDEDGKPKFYGRFNQGVVTLNLVDLACSSGGDFEKFWKLFDERLDLCYRALMARHNRLKGTPSDVAPILWQYGALARLKKGETIDKLLYGGYSTISLGYAGLCECTRYMTGKPHTDPAATPFALKVMQRLNDACKEWKEKENIDFSVYGTPLESTTYKFAKCLQKRFGVIPGVTDKNYITNSYHVHVTENIDAFTKLKFESQFQALSPGGAISYVEVPNMQDNLDAVLSVMKFIYENIMYAELNTKSDYCQVCGYDGEIQIVKDDDGKLVWECPHCHNRDQDKMNVARRTCGYIGSQFWNQGRTQEIKERVLHL

SEQ ID NO: 564 - protein, 1438 aa, Unknown
  Description of Unknown: uncultivated organism sequence
  Category: MG55 effectors
  Description: MG55-139 effector
MNKILHVGLDVGSTTVKIIVMDDNQNLIYENYQRHFSDTKNTVCQVLSDFANKYPDYVYTIALTGSGAMSATKFLDLPFIQEVVACKRAVEKYIPQTDVVIELGGEDAKIIYFGKSIEQRMNGTCAGGTGAFIDQMASLLNTDAAGLNELAKNYKMIYPIASRCGVFAKTDVQPLINEGANKEDIAASIFQAVVNQTISGLACGRPIRGNIAFLGGPLNYLSELRNRFIETLNLDDNSAIIPQDAHLLVAKGAALDSVNNSAISNEKLKAKIEVLKASHDTTSTPLAPLFVTNAEYEAFKERHDKDTVPKKDLKTYKGDCFIGIDAGSTTTKLVVTDCDDNLLYSLYQSNEGNPLKSVINMLKELYEIIPQTATIRYSGVTGYGEQLIQSALNVDLNEIETIAHYTAAKRFMPNVTSIVDIGGQDMKYIKIKNGTINNIMLNEACSSGCGSFIETFAKSLNISINDFVESALDSRSPVDLGSRCTVFMNSKIKQAQKEGATVGDISAGLSYSVIKNAIQKVMKVRDISTLGDHIVVQGGTFYNDAVLRAFELIVGKDVVRPDIAGLMGAYGVAILARKQYEANLDMEYISKLSTLDEIENLQIETSHVRCGGCENHCLLTINKFNNGQKHISGNRCEKGAGITSKSKDLPNIYKYKNERLFSYKPLSEKSAIRGTIGIPRVLNMYEDYPFWFTFLTNLGFRVIISEKSTRKTYEKGMESMPSESVCYPAKLAHGHIMSLINQGIKTIFYPCIPYSRKEYKQADNHYNCPIVISYSEVLKNNVEELKNVKFLNPFLPFEPKKLAEAILSLPEFDEYHFTKKELIKAAQEAEKEYQNFKTDIRNKGQEALNYMKENNLRGIVLAGRPYHVDPEINHGIDTLITSLGLCVLSEDSISNQVTLDKKLRVVNQWVYHSRLYAAADFVGRHANLELVQLNSFGCGVDAVTTDQVEEILSSYDKMYTLIKIDEVNNLGAVRIRIRSLLASMNKRIEKNSNNSDSLGNYELQRKIFTKEMRNDYTILIPQMAPIHFELLESAVQACGYNVHLLRECTPHTVEVGLKYVNNDACYPSILTTGQMIEALESGKYDLNKTALIMSQTGGGCRATNYIGFIRKALKDAGYSDIPVISFNVVGMEKMPGFKLSPKMAEGLLKSVVYGDLLQKMLTKNRAYEKNKGETQKKYEYWLEKCKKLVSKSSLKEFNQSIYDMVNDFEKIELDTTVEKPKVGIVGEVLIKYHPFGNNFVADKLEQEGAEVILPDFMGFIKFIATHKITFNQLIKTDSGKAKIFKFAIKLIDLLEKNEINALKNSKKGYLLPCNIFELEENVKDILSIGNQTGEGWFLTAEMVEYMQHDIPNIVCVQPFACLPNHVVGKGVIKTIRDKYPEANIAAIDYDPGASEANQTNRIKLLMAVAKDNLKIKNSKNKLLLKENNKINSKNKIYQ

SEQ ID NO: 565 - protein, 708 aa, Unknown
  Description of Unknown: uncultivated organism sequence
  Category: MG55 effectors
  Description: MG55-140 effector
MKVIKRDGSTADFDSSKIIVAIQKANQVVEPEDRIDQERIEAIAHYVESKNRMRLLVEDIQDMVEHQLMDEGKFNLAKSYIIYRYTRALVRKANTTDESILSLIRNSNKDVMEENSNKNAVMASTQRDLIAGEVSKDLTRRLILPEKISKAHDEGAIHFHDADYFVQPIFNCCLINVGDMLDNGTVMNGKLIESPKSFQVACTVMTQIIASVASSQYGGQSVDIRHLGKYLRRSYEKFKLTIKAEVGDSVADEVVERLTKRRLQDELRSGVQTIQYQINTLMTTNGQSPFVTIFLNLQADDEYLEENAMIVEEILRQRLEGIKNDKGVFVTPAFPKLVYVLDEHNCLKGGKYDYITKLAVKCSAKRLYPDYISAKKMRENYEGNVFAPMGCRSFLAAWKDDEGNYKFEGRFNQGVVSLNLPQVAILAHGDEEKFWPLLDERLHLCYEALMCRHNSLKGIRSDVSPVHWQYGAIARLEKGEVIDKYLEKGYSTISLGYIGLYEMTKLMKDVSHTTPEGEEFALRVMKYLRAACDKWKKETGLGFALYGTPAESLCYRFARIDKERFGTIADVTDKGYYTNSYHVDVREDIDAFSKFNFESQFQRISSGGAISYVEIPNMRHNLEAMEDVVRFIYDNIQYAEFNTKSDYCHVCGFDGEIIINDDLEWECPNCGNKNQTLMNVTRRTCGYLGENFWNVGKTKEIKSRVLHL

SEQ ID NO: 566 - protein, 724 aa, Unknown
  Description of Unknown: uncultivated organism sequence
  Category: MG55 effectors
  Description: MG55-141 effector
MKIIKRNGAEENFDISKIIMAVTKANAAVEESARMTPRQIQRIAESVELACQELGRSAAVEEIQDMVEKQIMAHGAFEVAKAYITYRYTRSLVRRANTTDDRILSLIECNNEEAKQENSNKNPIVNSTQRDYMAGEVSRDITNRILLPKDIVEAHEEGIIHFHDADYYAQHMHNCDLVNLEDMLQNGTVITGTLIERPHSFSTACNIATQIIAQVASNQYGGQSISLTHLAPFVQVSRERIRREVAAEMQAIDAHPGEEKLAELVENRVREEIRRGVQTIQYQVVTLLTTNGQAPFVTVFMYLGEAKNEQERHDLAMIIEETLRQRYQGVKNEKGVWVTPAFPKLIYVLEEDNIHEDSPYWYLTELAARCTAKRMVPDYISEKKMLELKVDKNGEGHCYTCMGCRSFLTPYVDENGKPKYYGRFNQGVVTINLPDVALSSGGNMEKFWQIFDERLELCHRALMCRHERLKGTLSDAAPILWQYGALARLKKGEPIDKLLYGGYSTISLGYAGLYECVKYMTGKSHTDPSATPFALEVMQHMNDACKHWKQMHNIDFSLYGTPLESTTYKFAKCLQQRFGIIPGVTDKGYITNSYHIHVTENIDAFSKLAFESKFQALSPGGAISYVEVPNMQNNIPAVLEVMKFIYDNIMYAELNTKSDYCQVCGFDGEIEIVEHDGKLIWRCPNCGNTDQDKMNVARRTCGYIGTQFWNQGRTQEIKERVLHL

SEQ ID NO: 567 - protein, 1005 aa, Unknown
  Description of Unknown: uncultivated organism sequence
  Category: MG55 effectors
  Description: MG55-142 effector
MSEIKLQQKAAYTLGIDVGSTTVKTVILDADHHVLHSTYQRHFSKVKEAVSEQLQAIIKEHPATLFSVHMTGSAGLGLATAAKIPFVQEVHAAFLAVKERYPEADAVIELGGEDAKIIFLTGGVEQRMNGSCAGGTGAFIDQMATLLDVTVDELDQMALQADRTYPIAARCGVFAKSDIQPLLNQGAKRENVAASIYQAVVDQTVSGLAQGRKIQGYVLFLGGPLSFLQGLRNAFMQTLHLDAEHAIFPVDGRTFVAYGCALAAENSADKPVTGEALLKQIESAETNHTVIADKPLFGYQEEYDRFRERHAQNDVVHGDLHTYQGNAYLGVDAGSTTTKVALIGEDNSLLYSFYETNKGQPLECVKRALETLYQKKNPNLKICGSAVTGYGEEMLKAGLGIDFGIVETVAHFRAAAFFCPDVDFIIDIGGQDIKCFQIKNGAIDSIMLNEACSSGCGSFIQAFANALGYDVAEFAKLGLFAERPVDLGSRCTVFMNSSVKQAQKDGATVADISAGLSGSIVKNAIYKVIRAKSPEDLGKHIVVQGGTFLNDAVLRCFEREMGRDVIRPAISGLMGAFGAAIYAKEHTSGSSTLLSLMDLHTLTYRTQNTTCNGCTAHCNLQILRFSNGKRFIAGNRCERGAGVSKKDQIPNLVDWKYETLRSLTDRQPEQPKATVGLPMALHYYDQLPLWHTFFTDLGFAVKLSEESTRKTYYKGQSTIPSDTVCYPAKLAHGHIESLLEQNVDFIFYPCMTYNLDEGDSDNHYNCPVVAYYPELLLANNEKLNEQNFLHPFLDLNRRKHLITVLYACLSDYATKKEIAAALEHGFAALEQYHNQIAQTAQEIVRQARAAGKTILVLAGRPYHIDPEINHGIHKLISSLGMAVITEDSIAGLAHTPELQALNQWTYHSRMYRAAQYVTTQPDFQLVQLVSFGCGIDAITTDEVRRILEQSGKLYTQLKIDEISNLGAAKIRLRSLKAAIGADVPPKPTAAPSEVAPKNEKEPVSV

SEQ ID NO: 568 - protein, 972 aa, Unknown
  Description of Unknown: uncultivated organism sequence
  Category: MG55 effectors
  Description: MG55-143 effector
MQIGLDIGSTTIKIAVLDDAGQLQFSKYERHYSQIAEKMQQLLAELHVKMPLLKTARLAISGSAGIGIADSCGLQFVQEVFAEKVCTERLNPGTEAVIELGGEDAKLLFLGRHFDARMNDSCAGGTGAFIDQMASLLSVPTEAMNELAQQASTRYTIASRCGVFAKSDIQPLLNQGAAKADLAASIFDAVASQAVTGLAKGRPITGKVLYLGGPLTFMSELRHSFDKILKIEGYCPENSLYYVAMGAAFCAENKVDLTELPAKLAAVGAQRDFDHLEPLFASTAEYDEFMERHSKERIEPGDISAATEAYIGMDAGSTTIKIAVISPSGQLLDSSYQSNKGNPVIAIKEYLQNFYIKYPHCRILGSAVTGYGEDLIRNGFSVDYGIVETMAHFIAAKTLQPDVDFILDIGGQDIKCLKIHNGCIDNIFLNEACSSGCGSFLQTFAEILGYSAEEFARIGLFADKPVDLGSRCTVFMNSSVKQAQKDGATVANISAGLSLSIVKNALYKVIRPGSKESIGKHIVVQGGTFLNDCVLRAFEKEMGLKVVRPNIAGLMGAYGAAIYARSRHQETGHASTLADAAALENFVHEVKAVTCGLCSNHCHLTVNTFASGKRFISGNRCERPVTHCAPDDTFNLYRQKLQLLENLKGVPGKRGKIGLPMGLNMYELLPFWHAFFTRLGFEVITSPIYDKTIFQKGQNTIPSDTVCYPAKLMHGHIKWLLENGINTIFYPCMTYNVDENSAENCYNCPVVAYYPEVLHANMHDLDNATYIFDYLGLGHKKVLLKKLQQICKEHFPDIGSSELKAALQEAYAAYNKFEAQVKELGQTIINTARSQHKPIVVLAGRPYHIDPKVNHSIDRLITTMGAALVSEDAVSSHVSMQELNDDLQVLNQWTYHSRLYAAAKYVSRSSDMYMVHLVSFGCGCDAITADECRRILEEHGQIYTQIKIDDIDNLGAAKIRLRSLFAAAGLES

SEQ ID NO: 569 - protein, 720 aa, Unknown
  Description of Unknown: uncultivated organism sequence
  Category: MG55 effectors
  Description: MG55-144 effector
MKIIKRSGTEAVFDISKIIIAINKANHEVVEAERLTADQIKEIAQYIEDSCKDANHALNVEDIQDLVEDQLMDKRAFSVARKYITYRYKRALVRKSNSTDEQILSLIECNNEEVKQENSNKDSTVNSVQRDYMAGEVSKDITRRFLLPEDIVEAHEQGIIHFHDADYFAQHMHNCDLVNLEDMLQNGTVISGTRIDKPHSFSTACNIATQIIAQVASSQYGGQSISLAHLVPFVQISREKIHAELVQTLKESDVELSEEKINSIVERRLHAEIERGVQVIQYQVVTLMTTNGQSPFVTVFMYLNEAKNEQEKKDLAMIIEEVLDQRYQGVKNEDGVWITPAFPKLIYVLEEDNIHEDSEYYYLTKKAAKCTAKRMVPDYISEKKMKELKDGNCYTCMGCRSFLTVYHDEDGKPKFYGRFNQGVVTLNLVDLACSSGGDFEKFWKLFDERLDLCYRALMARHNRLKGTPSDVAPILWQYGALARLKKGETIDKLLYGGYSTISLGYAGLCECTRYMTGKPHTDPAATPFALKVMQRLNDACKEWKEKENIDFSVYGTPLESTTYKFAKCLQKRFGVIPGVTDKNYITNSYHVHVTENIDAFTKLKFESQFQALSPGGAISYVEVPNMQDNLEAVLSVMKFIYENIMYAELNTKSDYCQVCGYDGEIQIVKDDDGKLVWECPHCHNRDQDKMNVARRTCGYIGSQFWNQGRTQEIKERVLHL

SEQ ID NO: 570 - protein, 1416 aa, Unknown
  Description of Unknown: uncultivated organism sequence
  Category: MG55 effectors
  Description: MG55-145 effector
MKLDFNTLGIDIGSTTVKIAILNKDGEIIFSDYQRHYANIQETLAKIIDEAYEEFGDIPVSPMITGSGGLTLSKHMEIPFVQEVVAVATSLKDYAPRTDVAIELGGEDAKIIYFTGGIDQRMNGICAGGTGSFIDQMATLLKTDAAGLNEYAKNYKAIYPIAARCGVFAKTDIQPLINEGATKEDLSASIFQAVVNQTISGLACGKPIKGNVAFLGGPLHFLTELKQAFIRTLGLEGDAIIAPEHSHLFAASGAAMNAHADVQSSLGELKEKLSHKIELEFEVTRMEPLFASEKEYEDFTERHNKHNVRKGDFASYKGDLFLGIDAGSTTTKVAVIGDDGSLLYSFYSSNNGSPLKTALKAMKDIYSKMPEGARIVRSCSTGYGEALLKSALLLDEGEVETVAHYTAAAFFDPNVDCILDIGGQDMKCIKIKNNSVDKVQLNEACSSGCGSFIETFAKSLNYEVADFAKIALFAENPIDLGSRCTVFMNSKVKQAQKEGASVADISAGLAYSVIKNALLKVIKLTDPKDLGKQVVVQGGTFYNDAVLRSFERISGCEAIRPDIAGIMGAFGAALIAKDRYTGQKSTMLSFKEINELRFKTSMTRCQGCINHCLLTVNEFTGDRKFISGNRCEKGLGLEKNKEQIPNLFEYKNERVFRHYKPLKKADAPRGVVGIPRVLNMYENYPFWFTFFTKLGYSVKLSPVSSRKIYELGIESIPSESECYPAKLAHGHVTWLIRQGLEYIFYPCIPYERVEVPDAGNHYNCPIVTSYGENIKNNIEELRDDKIKYQNPFISLESEEILTKRLVDFFRKENGIPAAEIKAAAHEGWLEMQAVREDMTKKGKEVLQYLKETGRHGIVLAGRPYHSDPEINHGIPDLITSYGVAVLTEDSISELSEVDRPTIVMDQWMYHSRLYKAASFVAKNDNLDLIQLNSFGCGLDAVTTDQVNDILTKQNKIYTVLKIDEVNNLGAARIRIRSLLAAVKDRERKKIEAKRVDTAHHRVIFTEQMRKDYTILVPDMSPIHFEILESALASCGYKVEVLKADSKCIDYGLKYVNNDACYPSLIVVGQFMQALLSGKYDLHKVALIITQTGGGCRATNYIGFIRRALEKAGMGYIPVISMSAGIEKNPGLKVNLEMANKALQALIYGDVFMRVLYKTRPYEKVKGSANALHEKWKKIAIESVKKANKKQFKKNIQNIVKEFDELELVDIKKPKVGIVGEILVKFMPLANNFIVELLEEEGAEAVCPDLIDFFMYSLYNANFKAEYLGKKKSSAKINNFLIWFIERYRKCANDALAASKRFHPTVPIQKLAEYASPIVSCGNQTGEGWFLTGEMIELIKSGVPNIVCTQPFGCLPNHVVGKGVIKELRHQYPDSNIVAVDYDPGASEVNQLNRIKLMLSTAGKNLIAESKDNEETA

SEQ ID NO: 571 - protein, 1439 aa, Unknown
  Description of Unknown: uncultivated organism sequence
  Category: MG55 effectors
  Description: MG55-146 effector
MIKTLHVGLDVGSTTVKIIVMDENLNTIYTDYKRHFSDTKNTICNVLENLIIMYPDTEFTIALTGSGAISAAKFLDLPFIQEVVSCKRAVEKYIPETDVVIELGGEDAKIIYFDKFIEQRMNGTCAGGTGAFIDQMASLLNTDPTGLNELAKSHKLIYPIASRCGVFAKTDIQPLLNEGAAKEDIAASIFQAVVNQTISGLACGRPIRGNVAFLGGPLNYLSELRNRFIETLNLKDNEIIVPNEAHLLVAKGAALDSLNSHTITIEKLKSKIEVLKSSHDDTSNPLNPLFSIDAEYDEFKKRHEKDKVKRADFKTFKGNCFLGIDAGSTTTKLVVISEDGTLLYSLYGSNEGNPLQSVINMLKKLYAEKPSEAIIRFSGVTGYGEKLIQTALNVDLNEIETIAHYTAAKEFMPNVTSIVDIGGQDMKYIKMKNGAIDNIMLNEACSSGCGSFIETFAKSLGLSIQDFVQSALEARRPVDLGSRCTVFMNSKIKQAQKEGYSVGDISAGLSYSVIKNAIQKVMKVRDVKKLGAHIVVQGGTFYNDAVLRAFELIVGRNVVRPDIAGLMGAYGVALLAKEQYENNLDMDYVSSISNINELDKLEINITHIRCQGCENHCLLTINKFSNGTKYISGNRCEKGAGIVDKTLDRPNLIKYKFERTFNYTPLEEKNAPRGTIGIPRVLNMYEDYPFWFTFLTNLGFRVILSEKSNRKTYEKGMESMPSESVCFPAKLSHGHIIGLINSGIKTIFYPCIPYSRKEYQKADNHYNCPIVISYSEVLKNNVEELKDKNIKFLNPFLPFEPDKLAEIIMNLPEFKEYNFTKKELLSAAKKAETEYQNYKSDIHNKGQETLKFMEENNLKGIVLAGRPYHVDPEVNHGIDTLITSLGLCVLTEDSISNLTEAKRPLRVVDQWVFHARLYAAADFVGKHDNLELVQLNSFGCGVDAVTTDQVEEILTSYEKMYTLIKIDEINNLGAIRIRIRSLLASMNKRIKDNNSSMCNGNYEVNKKIFTKEMRKDYTILMPQMAPIHFEFLESAMKNSGYKMELLKDCTQHTVETGLKYVNNDACYPSILVTGQMIEALESGKYDLNKTALIMSQTGGGCRATNYIGFIRKALKDAGFENVPVISFNVVGMEKMPGFKLTIPLIERLIKSCIYADLLQKMLTKNRAYEINKGKTKELFDYWMEKCKKLVNKSSIKEFKQSIFDIVSDFEKIEIDTSVIKPKVGIVGEVLIKYHPFGNNFVADKLEQEGAEVILPDFMGFIKFIATHKITFNKLIKTDAIKAKLFKTAIKLIDLLEKPVISALNNSKKGYLLPCNIWDLEEKVNDILSIGNQTGEGWFLTAEMIEYIEHDIPNIVCVQPFACLPNHVVGKGVIKTIRSKFPEANIAPIDYDPGASEANQTNRIKLMMTVAKDNLKNKNNINKAIKKENYIIDEKNKISN

SEQ ID NO: 572 - protein, 727 aa, Unknown
  Description of Unknown: uncultivated organism sequence
  Category: MG55 effectors
  Description: MG55-147 effector
MKVIKRDGHMVDYCPEKIEQAIMKANNEVEEEDQASSTQIKNIIKYIEKLGKKRILVEDIQDIIEMKLMSQGKYELAKHYITYRYTRELVRRSNTTDQSIKELIDGESEYWNTENSNKNAKVVTTQRDYLAGITSTDITRRFLLPEDIVEAHDAGIIHFHDADYFAQNALHNCDLVNLEDMLQNGTSINGVMIEKPHRFLTAMTIATQIITAVSSSQYGGVTITLTHLAPFVRESYNRYLDKYKKRKLSKEQCEKFAMEDTKKEIVDGVQTFQYQVNSMTTTNGQAPFLSVCMYLGETTEYKEELSWIIEEFLKQRILGMKNEQGVYITPAFPKLLYVLEEDNINKNGKYYYLTKLAAECTAKRMVPDYISEKIMKELKIDKNGNGNCYPCMGCRSFLTPYVDENGKPKYYGRFNQGVVTINLVDAALSSDKDMDTFWQIFEERLELCHKALQIRHKRLSKATSDVAPILWQHGALARLKKGESIHELLHNGYSTISLGYAGLYECVKYMTGHSHTDNGKGKEFALEVMEKMNAKCKEWKEVENIDYSVYGTPIESTTYKFAKCLKDRFGVVKGITDRDYITNSYHVPVFEEIDAFTKLKLESEFQKLSPGGAISYIETPNLCNNLDAVMEVITFIYNNIMYAELNTKSDYCQECGYTGEILIDDNMEWYCPNCGNRDHNKLNVARRTCGYIGTNFWNKGRTQEIKERVLHIDNKEEKDTKKDKEEK

SEQ ID NO: 573 - protein, 720 aa, Unknown
  Description of Unknown: uncultivated organism sequence
  Category: MG55 effectors
  Description: MG55-148 effector
MFFVKENGTIVVFDKNKIKKAIVSAMKDGGIYLPDIARLISIDTEKYFLKEGGDQNVVTREQVDKYIFDRLIHYGQSLTAKSYEDFKVLRKYQKQTMDSDESILSLIGGNNEELQMENSNKAPSLAPTQRDLIAGEISKSIARRKMIPAHLIHAHDEGLIHIHDLDYFIQSINNCCLINLKDMLDNGTVINETLIETPHSFRTAATITTQIVAQVASCQYGGQTFSTSHLAPYVRKSYDNYIKEVASELYDCSFGNIDSEIFKENVEKIARKRLKKEIADGVQTIQYQLNTLMTTNGQSPFLSIAMWINEDPEYEKENAMIIEEILKQRITGVKDKEGHYISPAFPKLLYFLDDNNAYEGSKYFYLTELAAKCSAKRLVPDYISVKAMKENIGEVFPCMGCRSFLSPWYDENGKNKAYGRFNMGVVSLNLVDVGLSANGDLDLFWDILDERLNLCYEALMLRINKLKGTTTETAPILWEHGAFARLPKGSKIDSLLENGYATVSLGYHGLYECVYSLIEESHTSEAGQELALEIMKKLKDTCDKWKKETGYGFGLYGTPAESLTYRFARTTKNRFGVIPHVTDKLYLTNSYHVHVTEPIDAFSKLKFESQFQKLSSGGCISYVEVPNMNDNIPAVIQLIQFIYENIQYAEINTKSDLCENCGYEGEILINPDTLDWYCPNCGCTDHSKLHVTRRVCGYIGSNFFNRGKTQEINERVVHLD

SEQ ID NO: 574 - protein, 727 aa, Unknown
  Description of Unknown: uncultivated organism sequence
  Category: MG55 effectors
  Description: MG55-149 effector
MKVIKRDGHMVDYCPEKIEQAIMKANNEVEEEDQASSTQIKNIIKYIEKLGKKRILVEDIQDIIEMKLMSQGKYELAKHYITYRYTRELVRRSNTTDQSIKELIDGESEYWNTENSNKNAKVVTTQRDYLAGITSTDITRRFLLPEDIVEAHDAGIIHFHDADYFAQNALHNCDLVNLEDMLQNGTSINGVMIEKPHRFLTAMTIATQIITAVSSSQYGGVTITLTHLAPFVRESYNRYLDKYKNRKLSKEQCEKFAMEDTKKEIVDGVQTFQYQVNSMTTTNGQAPFLSVCMYLGETTEYKEELSWIIEEFLKQRILGMKNEQGVYITPAFPKLLYVLEEDNINKNGKYYYLTKLAAECTAKRMVPDYISEKIMKELKIDKNGNGNCYPCMGCRSFLTPYVDENGKPKYYGRFNQGVVTINLVDAALSSDKDMDTFWQIFEERLELCHKALQIRHKRLSKATSDVAPILWQHGALARLKKGESIHELLHNGYSTISLGYAGLYECVKYMTGHSHTDNGKGKEFALEVMEKMNAKCKEWKEVENIDYSVYGTPIESTTYKFAKCLKDRFGVVKGITDRDYITNSYHVPVFEEIDAFTKLKLESEFQKLSPGGAISYIETPNLSNNLDAVLEVITFIYNNIMYAELNTKSDYCQECGYTGEILIDDNMEWYCPNCGNRDHNKLNVARRTCGYIGTNFWNKGRTQEIKERVLHIDNKEEKDTKKDKEEK

SEQ ID NO: 575 - protein, 983 aa, Unknown
  Description of Unknown: uncultivated organism sequence
  Category: MG55 effectors
  Description: MG55-150 effector
MALRIGIDIGSTTVKVVVLDAQNKLLFRSYERHYSKTRERTCETLRGLRGLLGGQQVQLLITGSAGLGVAKAAGLDFVQEVYATAAAVREFIPGTDAVIELGGEDAKIIFFGNTLEERMNGSCAGGTGAFIDQMATLLNVSVDELDELSLRHEKIYPIASRCGVFAKSDIQPILNQGGRKEDVAASIFQAVVDQTVAGLTQGRELKGTIVFLGGPLHFLAGLRQRFVETLHLDQDHAIFPEDGDCFAAIGAALCTEDSQPRPFEELLDLLEHAATVSTPVDTMDPLFTSQADYEAFSARHQAMAVPTVDLATYTGPAYLGIDAGSTTTKMVLIDPDCNLLYSFYHSNQGNPVSIVLPQLREIYAQCGDRVTIQGAAVTGYGEDLIKNAFSCDLGLVETVAHLNAARHFTPDVDFIIDIGGQDMKCFKIRNGAVDSILLNEACSSGCGSFIETFAKALGYTIADFSKMGLFARHPVNLGSRCTVFMNSSVKQAQKDGASVEDISAGLSISVVKNAIYKVIRAASADDLGQHIVVQGGTFLNDAVLRSFELEIGREVTRPTISGMMGAYGAALAAKDAGLTRSALLSAEALAAFTHEARPATCKLCTNHCSLTINRFDGGRKFISGNRCSRPLGQEKVDIPDLLKFKYQYLRSLQGKGEGDGSRGKIGIPFGLNMYENLPFWFTLFTTLNFEVVLSPESTRSLYLKGQQTIPSDTVCYPAKLLHGHIMALLEEGIDTIFYPCMSYNFDEHLSDNHYNCPVVAYYPDLLGVNIPALEDIKYLHPNLGLHRPKDFEKKGAQLLETEFGIPKRASVKAIRKAYAAYEDFRRLVQKKGEEYISFARETGRKILVVAGRPYHMDPEINHGINDLITSFGFVLITEDAVFQHMDKQPRRVLNQWTYHARMYNAARYVCTQPDMAFIQLVSFGCGVDAITTDELRSILEEAGELYTQLKIDDISNLGAVKIRIRSLMAALDARDARNQKGGQ

SEQ ID NO: 576 - protein, 972 aa, Unknown
  Description of Unknown: uncultivated organism sequence
  Category: MG55 effectors
  Description: MG55-151 effector
MQIGLDIGSTTIKIAVLDDAGKLQFAKYERHYSQIAEKMQQLLAELHAKMPLLRTARLAISGSAGIGIAENCGLQFVQEVFAEKICTERLNPGTEAVIELGGEDAKLLFLGRHFDARMNDSCAGGTGAFIDQMASLLNVATEDMNELARQASTRYTIASRCGVFAKSDIQPLLNQGAAKADLAASIFDAVASQAVTGLAKGRPITGSILYLGGPLTFMSELRHSFDKILKITGVCPENSLYYVAMGAAFCAENKVDLTELPAKLAAAGAHRDFDHLEPLFKNKAEYEEFIARHSRERIEPGDIAAAAEAYIGIDAGSTTIKIAVISPDGQLLDSFYQSNKGNPVIAVKEYLQSFYQKYPGCRLLGSAVTGYGEDLIRNGFGVDYGIVETMAHFIAAKTLQPDVDFILDIGGQDIKCLKIHNGCIDNIFLNEACSSGCGSFLQTFAEILGYSAEEFAHIGLSADKPVNLGSRCTVFMNSSVKQAQKDGASVANISAGLSLSIVKNALYKVIRPGSKEAIGKHIVVQGGTFLNDCVLRAFEKEMGLEVVRPNIAGLMGAYGAALYARQRQQETGRVSSLADAKALKDFFHEVKAVTCGLCSNHCHLTVNTFASGKRFISGNRCERPVTHCAPDDTFNLYRQKLQLLEKLRGVPGKRGKIGLPMGLNMYELLPFWHAFFTSLGFEVVTSPINDKTIYQKGQNTIPSDTVCYPAKLMHGHIKWLLEHDITTIFYPCMTYNVDENSAENCYNCPVVAYYPEVLHANMHDLDNATYIFDYLGLTHKKVLLKKLQQIFRDKFPDVRGSEIKSALEEAFTAYHQFENKVKELGQTIINSARAEHKPIVVLAGRPYHIDPKVNHSIDRLITTMGAALVSEDAVSSHISMKELNEDLQVLNQWTYHSRLYAAAKYVSQSSDLYMVQLVSFGCGCDAITADECRRILEENGHIYTQIKIDDIDNLGAAKIRLRSLFAAEGLES

SEQ ID NO: 577 - protein, 708 aa, Unknown
  Description of Unknown: uncultivated organism sequence
  Category: MG55 effectors
  Description: MG55-152 effector
MQVIKRDGRAVTYDRNKIMVAIRKANAEVEPCEKISDEKIEEIVEGIEAKHRKRMLVEDIQDIIEQKLMEDGKFVLAKTYIIYRYSRELIRKANTTDDSILSLIQNRNKDVMEENSNKNATVASTQRDLIAGEVSKDLTKRMLLPEKISKAHEEGAIHFHDADYFLQPIFNCCLINIGDMLDNGTVMNGKLIESPKSFQVACTIVTQIIASVASSQYGGQSVDIRHLGKYLRKSHDKYQKKISAAVGDTIDQETIDTLVRERVNDELRSGVQTIQYQINTLMTTNGQSPFVTLFLNLDENDEYVEENAMIIEEILRQRIEGIKNEVGVYVTPAFPKLIYVLDEHNCLKGGKYDYLTKLAIKCSAKRMYPDYISAKKMRENYEGNVFSCMGCRSFLSPWKDENGNYKWEGRFNQGVVSLNLPQIAILSKGNEDKFWSLLDERLQLCYDALMCRHRALEGVTSDVSPVHWQYGAIARLKKGEVIDPLLHNGYSTISLGYIGVYEMTKLMTGVSHTDPKGEEFALKVMKHLRAACDKWKADTGLGFGLYGTPAESLCYRFARIDKERFGTIKDVTDKGYYTNSYHVDVREKIDAFSKFRFESQFQNISSGGAISYVEIPNMRNNLDALAEVVRYIYDNIQYAEFNTKSDYCHVCGYDGEIIINNEGEWECPQCGNKDHAKMNVTRRTCGYLGENFWNVGKTKELGARVLHL

SEQ ID NO: 578 - protein, 803 aa, Unknown
  Description of Unknown: uncultivated organism sequence
  Category: MG55 effectors
  Description: MG55-153 effector
MENNNQQTEKNNMEETKMHEEEIVTIAFIPEEEGRHVIKRNGQEVDFSIEKPIACIQKANATVPAVKQLSEVQILAIAESVKNKVFAHKHATSVEEIQDWIELGLMEMRGYEVAQSYTHYRAAKAEKRKTNTIDDKVIALIGNQNEEDKQENANKDPEINSTQRDYIAGHVSKDLTFRTILPDFNSFKELSPKGKEIIKKGDGEKIVTANAEGLIHFHDADYFIQPMTNCCLINADDMLQNGTMISGVKIDKPRSFLTAANVLTQIIAQVASSQYGGQTFTLSHLAPFVDVSRKKLTKEVIAEREELGESLDEDIIKKIVERRLRKEIKQGIQTIQYQLITLMTTNGQSPFVTMFLYINEVPDGQIKDDLIMLIEEVFEQRIKGVKNSSGVYVSPTFPKLIYVLDEDNIEEGSKYYHVTELAAKTSAKRLVPDYISAKIMKEQRNGDVYPCMGCRSFLTVDDGTTNAGNKAKALNYEEGAHQYYGRFNQGVVTINLVDVACTSGGNLEEFWKVFDERLELCHKALRLRHERLLGTKSDVAPILWQHGAYARLERGEVIDPLLYGNYSTLSLGYAGLYECVFRMLEKSHTTEEGRELGLKIMQYMSDKCTAWKKDEDISYSLYGTPLESTTYKFAKALQKRFGIIPEVTDRNYITNSYHINVRENIDAFSKIEQESSFQHLSPGGSISYVEVPNMQNNISAVVAILQCIYDNITYAEINTKSDYCHVCHYEGEAVLVDNGSGKLVWECPNCKNQDARKMTVVRRVCGYLGEAARGMNQGRLGDIHDRVLHVSQRIDPMSKKTIS

SEQ ID NO: 579 - protein, 724 aa, Unknown
  Description of Unknown: uncultivated organism sequence
  Category: MG55 effectors
  Description: MG55-154 effector
MKIIKRNGAEVAFDIEKIINAIKKANDEVTESSNRLTDEQIVDIAEKVSALAGDLKRAVSVEEIQDFVENQLMDQKAFVVARKYITYRYTRALVRQSNTTDAQILTLIECNNEEVKQENSNKNPTVNSVQRDYMAGEVSKDLTRRVLLPHDIVEAHDEGIIHFHDADYFAQHMHNCDLVNLEDMLQNGTVISGTFIEKPHSFSTACNIATQIIAQVASNQYGGQSISLTHLAPFVDISRQKIRSEVAEELSQVGISDEEHIARIAEKRLRDEIKKGIQTIQYQVVTLLTTNGQAPFVTVFMYLGEARNERERDDLAMIIEETLNQRIQGVKNEAGVWVTPAFPKLIYVLEEDNIREGSRYWYLTELSARCTAKRMVPDYISEKKMLEFKVDKNGEGHCYTCMGCRSFLTPYVDENGKPKYYGRFNQGVVTINLVDVALSSHGDMEAFWKIFDERLELCHRALMERHKRLKGTLSDAAPILWQYGALARLKKGETIDKLLYGGYSTISLGYAGLYECTKYMTGKSHTDAQAKPFALSVMQHMNDMCKKWKQEHNIDFSLYGTPLESTTYKFAKCLQKRFGIIEGVTDKNYITNSYHVHVSEPIDAFTKLKFESEFQQLSPGGAISYVEVPNMQGNIPAVLAVMQYIYDNIMYAELNTKSDYCQVCGYDGEIAIVEEDGKLLWECPHCHNRDQSKMNVARRTCGYIGTQYWNQGRTQEIRDRVLHL

SEQ ID NO: 580 - protein, 971 aa, Unknown
  Description of Unknown: uncultivated organism sequence
  Category: MG55 effectors
  Description: MG55-155 effector
MRIGLDIGSTTVKCVVLDEKNELVYKTYERHYSQITQKIADILNTVRKEVPGSDSALVALSGSAGMGVADSCGLDFIQEVYATRVAANTFIPGTDVIIELGGEDAKILFLSGGMEVRMNGSCAGGTGAFIDQMATLLNVPLEEMNDLAAQHEKTYTIASRCGVFAKTDIQPLLNQGARKSDVAESIFAAVVNQTVAGLAQGREITGKVVYLGGPLTFMPRLRLRFDKVLHTEGVCPENSLYYVAAGAALCAEKVIDFNAVVKKVEHYSGSGNFAFNPPLFESKADYEQFKERHEMAYVPKKEIKDYKGRVYIGMDAGSTTVKSVVMGENGELLYSKYLPNSGNPVPIIKQFLEELYELCPEIDIASSAVTGYGEEIIKNAFCADFGIVETVAHFTAAKSFMPQVEFVIDIGGQDIKCFKIHNGTIDNIFLNEACSSGCGSFLQTFANALGYSIEDFSKLGLLAKQPVDLGSRCTVFMNSSVKQAQKDGATIEDISAGLSISVVKNALYKVIRASSPKELGSHIVVQGGTFLNDAVLRAFEREMGVEVVRPTIAGLMGAYGAALYAKSRCKGGKSTLLDREALKTFTHEIQVVNCGLCSNNCRLTVNKFSDGRRFIGGNRCERPITKKTPDKTLDIYDYKLELLQSYKPKPGPRGKIGIPMGLNMYELLPFWHSFFTALGFEVVYSPVSDKKLYARGQQTIPSDTVCYPAKLMHGHVQALIDDGVQTVFYPCLSYNLDEGLGDNHYNCPVVAYYPEVISANMKDVKNITFIKDYLGIHRHKDFPVKAHEMLCKYFDGITLKEVKAAAKAAYSEYGEYFKKVRARGETIMEQAEKEGREIIVLSGRPYHVDPEINKGIDKLITSFHCAIISEDVVSCRVKKFRTSVLNQWTYHSRLYAAAKYIAGRDDMNLVQLVSFGCGVDAITTDEVREILESEGKIYTQIKIDEITNLGAVKIRIRSLLAAIAEQREDRK

SEQ ID NO: 581 - protein, 716 aa, Unknown
  Description of Unknown: uncultivated organism sequence
  Category: MG55 effectors
  Description: MG55-156 effector
MICTVIKRDGSLVPYDRSKISNAIYMANREVVESNRATDIEISQIIEEVEEKYRKEGIVQVEEIQDIIERNLISMHYELGKRFMVYRHTHSMMRRATQTNESVLAICRNENEEVGRENSNKNAVLCSTQRDLIAGEISKELTFDLLLPGKIAKAHREGAIHFHDADYFIQSMFNCCLVDIGDMLRNGTVMNGKLIEPPKSFQVACTVTTQIIASVSSNQYGGQSINLRHLAPFVEVSRKKITEKLSSFGLNGKQLKDAVDYELKKEIAAGCQTIQYQVNTLMTTNGQSPFVTLFMELHEDIENGETIADEAMIYEEILSQRLQGIKNENGVYITPPFPKLIYVLDDCNCLKGGDYDYLTELAIKCTAKRMYPDYISAKKMRENYDGNVFSCMGCRSFLSPWKDENGKYKWEGRFNQGVVSLNLPQIAILSCQTGKPDFNTFWSILDERCSIAFEALLCRHKHLIGTNADVSPIHFRHGAIARLASGEKIDKLLKDGYSTLSLGYIGIYETVKLMTGFSHTKEGVPKEFAIQIMEYLRSKCDSWKKITGLGFGLYGTPAESLCYRFAKIDKERFGNIKDVTDKGYYTNSYHVDVREHISAFEKLSFESEFQKISSGGAISYVEIPNMEHNLDALAEVVKFGYENIQYFEFNTKSDNCLVCGYSGEILLDDKCEWYCPNCGNRDHNKMSVVRRTCGYLGERFWNRGKTAEIKDRVTHL

SEQ ID NO: 582 - protein, 971 aa, Unknown
  Description of Unknown: uncultivated organism sequence
  Category: MG55 effectors
  Description: MG55-157 effector
MRIGLDIGSTTVKCVVLDEKNELVYKTYERHYSQITQKIADILNTVRKEVPGSDSALVALSGSAGMGVADSCGLDFIQEVYATRVAANTFIPGTDVIIELGGEDAKILFLSGGMEVRMNGSCAGGTGAFIDQMATLLNVPLEEMNDLAAQHEKTYTIASRCGVFAKTDIQPLLNQGARKSDVAESIFAAVVNQTVAGLAQGREITGKVVYLGGPLTFMPRLRLRFDKVLHTEGVCPENSLYYVAAGAALCAEKVIDFNAVVKKVEHYSGSGNFAFNPPLFESKADYEQFKERHEMAYVPKKEIKDYKGRVYIGMDAGSTTVKSVVMGENGELLYSKYLPNSGNPVPIIKQFLEELYELCPEIDIASSAVTGYGEEIIKNAFCADFGIVETVAHFTAAKSFMPQVEFVIDIGGQDIKCFKIHNGTIDNIFLNEACSSGCGSFLQTFANALGYSIEDFSKLGLLAKQPVDLGSRCTVFMNSSVKQAQKDGATIEDISAGLSISVVKNALYKVIRASSPKELGSHIVVQGGTFLNDAVLRAFEREMGVEVVRPTIAGLMGAYGAALYAKSRCKGGKSTLLDREALKTFTHEIQVVNCGLCSNNCRLTVNKFSDGRRFIGGNRCERPITKKTPDKTLDIYDYKLELLQSYKPKPGPRGKIGIPMGLNMYELLPFWHSFFTALGFEVVYSPVSDKKLYARGQQTIPSDTVCYPAKLMHGHVQALIDDGVQTVFYPCLSYNLDEGLGDNHYNCPVVAYYPEVISANMKDVKNITFIKDYLGIHRHKDFPVKAHEMLCKYFDGITLKEVKAAAKAAYSEYGEYFKKVRTRGETIMEQAEKEGREIIVLSGRPYHVDPEINKGIDKLITSFHCAIISEDVVSCRVKKFRTSVLNQWTYHSRLYAAAKYIAGRDDMNLVQLVSFGCGVDAITTDEVREILESEGKIYTQIKIDEITNLGAVKIRIRSLLAAIAEQREDRK

SEQ ID NO: 583 - protein, 983 aa, Unknown
  Description of Unknown: uncultivated organism sequence
  Category: MG55 effectors
  Description: MG55-158 effector
MALRIGIDIGSTTVKVVVLDAQNKLLFRSYERHYSKTRERTCETLRGLRGLLGGQQVQLLITGSAGLGVAKAAGLDFVQEVYATAAAVREFIPGTDAVIELGGEDAKIIFFGNTLEERMNGSCAGGTGAFIDQMATLLNVSVDELDELSLRHEKIYPIASRCGVFAKSDIQPILNQGGRKEDVAASIFQAVVDQTVAGLTQGRELKGTIVFLGGPLHFLAGLRQRFVETLHLDQDHAIFPEDGDCFAAIGAALCTEDSQPRPFEELLDLLEHAATVSTPVDTMDPLFTSQADYEAFSARHQAMAVPTVDLATYTGPAYLGIDAGSTTTKMVLIDPDCNLLYSFYHSNQGNPVSIVLPQLREIYAQCGGRVTIQGAAVTGYGEDLIKNAFSCDLGLVETVAHLNAARHFTPDVDFIIDIGGQDMKCFKIRNGAVDSILLNEACSSGCGSFIETFAKALGYTIADFSKMGLFARHPVNLGSRCTVFMNSSVKQAQKDGASVEDISAGLSISVVKNAIYKVIRAASADDLGQHIVVQGGTFLNDAVLRSFELEIGREVTRPTISGMMGAYGAALAAKDAGLTQSTLLSAEALASFTHEARPATCKLCTNHCSLTINRFDGGRKFISGNRCSRPLGQEKVDIPDLLKFKYQYLRSLQGKGEGDGSRGKIGIPFGLNMYENLPFWFTLFTTLNFEVVLSPESTRSLYLKGQQTIPSDTVCYPAKLLHGHIMALLEEGIDTIFYPCMSYNFDEHLSDNHYNCPVVAYYPDLLGVNIPALEDIKYLHPNLGLHRPKDFEKKGAQLLETEFGIPKRASVKAIRKAYAAYEDFRRLVQKKGEEYISFARETGRKILVVAGRPYHMDPEINHGINDLITSFGFVLITEDAVFQHMDKQPRRVLNQWTYHARMYNAARYVCTQPDMAFIQLVSFGCGVDAITTDELRSILEEAGELYTQLKIDDISNLGAVKIRIRSLMAALDARDAQNQKGGQ

SEQ ID NO: 584 - protein, 1409 aa, Unknown
  Description of Unknown: uncultivated organism sequence
  Category: MG55 effectors
  Description: MG55-159 effector
MREFHIGMDVGSTTIKIVCLDEKDNIIYSIYQRHLSNVRETTKKMFDDFLEHMKNNFGEDIKYKISITGSSGMGISSWIGIDFVQEVIACIKSIETLIPETDVAIELGGEDAKITFLKNDMDQRMNGSCAGGTGAFIDQIATLLDTDASGLNELAKGFDSIYPIAARCGVFAKTDIQPLINEGVRKENIAVSVFQAVVNQTITGLACGKKITGKVAFLGGPLFFLSELRNRFIDTLKLAPEDVVFPENSQLFVAQGAAFLSKENDAVFSYEDLKTKVERLNEKDTSDTSRLQPLFETEDELNEFLERHEKEKIETRDLNTYEGNAYLGIDAGSTTIKVVLISEEKEILFSHYSHNKGNPLDNIIATLKELYSKMNKNIIIKGSCVTGYGETLIKAALRVDIGIVETMAHYKGSQFFQPDVDFILDIGGQDMKCLKIQDGIITSILLNEACSSGCGSFLETFAHSLGMDILEFSRLGMESKSPADLGTRCTVFMNSKVKQAQKDGVEVADISAGLSYSVVKNTLFKVIKIKNKDELGKNIVVQGGTFLNNSVLRAFELVSERSVIRPNVAGLMGAFGAALIAMEQAGESSSIMTLDELNNFSCTTNLTRCKLCNNHCLLTIHKFKNGENFISGNRCDNPLGKMKKNTAPNMFDYKYNRLFNYTPLEPSKAVRGEIGIPRVLNFYDSYPFWFTLLTNLGFRVIISDDSSKKLYEKGIDTISSDSICYPAKLVHGHIVDLIEKGVKRIFYPCVIFEEKEDEKSSNQFNCPIVMSYPEVINNNMDILKEKHIDLILPFFSFESKEILYKTVFEEFERFGISKSEAKIAVDAAWEEKYNFRKDMRNKALEIIADLEKTGKTGVVLCGRPYHCDKEIHHGIPNIINSFGIAVLTGDAVASLASLDEELRVIDQWTYHSRLYRAAAYVGKSKCLELIELNSFSCGIDAVTTDQVEEILANYGKVHTLLKIDEISNLGAVKIRIRSLLAALDYKKNALRSSIKKKIEYKRAQFTKKMKKEYTILAPQMAPMHFKLLKTAFKAEGYNLEVLDETQEALDCGLQYVNNDACYPSILVIGELIAALKSGKYDLDKTAVMISQTGGSCRATNYLGFLKKAIKDSGFEKIPILSLNASGFEKQEGFSITLPFAHKCLIAVSYGDILMKLLYHVRPYEKIKGSAFELYEKWNEKVKENIYNGKFSQFKNNINAIVNDFSKIEVSDEKKIRVGIVGEILVKFSPFANNNLADFIEAEGGEVYTSSLMSFVKYCIYSDIFITERFKGKIAAMKLKAALWIIDQYTKVLNNALQKNPRFGHEDSIQDLAKKTSQYISIGNQSGEGWFLMGEMIEFIEKDVPNIVCVQPFGCLPNHITGKGMIKKLRSEYSNVNIAPIDYDPAYSEVNQLNRIKLMLSVARKNLKNS

SEQ ID NO: 585 - protein, 983 aa, Unknown
  Description of Unknown: uncultivated organism sequence
  Category: MG55 effectors
  Description: MG55-160 effector
MALRIGIDIGSTTVKVVVLDAQNKLLFRSYERHYSKTRERTCETLRGLRGLLGGQQVQLLITGSAGLGVAKAAGLDFVQEVYATAAAVREFIPGTDAVIELGGEDAKIIFFGNTLEERMNGSCAGGTGAFIDQMATLLNVSVDELDELSLRHEKIYPIASRCGVFAKSDIQPILNQGGRKEDVAASIFQAVVDQTVAGLTQGRELKGTIVFLGGPLHFLAGLRQRFVETLHLDQDHAIFPEDGDCFAAIGAALCTEDSQPRPFEELLDLLEHAATVSTPVDTMDPLFTSQADYEAFSARHQAMAVPTVDLATYTGPAYLGIDAGSTTTKMVLIDPDCNLLYSFYHSNQGNPVSIVLPQLREIYAQCGGRVTIQGAAVTGYGEDLIKNAFSCDLGLVETVAHLNAARHFTPDVDFIIDIGGQDMKCFKIRNGAVDSILLNEACSSGCGSFIETFAKALGYTIADFSKMGLFARHPVNLGSRCTVFMNSSVKQAQKDGASVEDISAGLSISVVKNAIYKVIRAASADDLGQHIVVQGGTFLNDAVLRSFELEIGREVTRPTISGMMGAYGAALAAKDAGLTQSTLLSAEALASFTHEARPATCKLCTNHCSLTINRFDGGRKFISGNRCSRPLGQEKVDIPDLLKFKYQYLRSLQGKGEGDGSRGKIGIPFGLNMYENLPFWFTLFTTLNFEVVLSPESTRSLYLKGQQTIPSDTVCYPAKLLHGHIMALLEEGIDTIFYPCMSYNFDEHLSDNHYNCPVVAYYPDLLGVNIPALEDIKYLHPNLGLHRPKDFEKKGAQLLETEFGIPKRASVKAIRKAYAAYEDFRRLVQKKGEEYISFARETGRKILVVAGRPYHMDPEINHGINDLITSFGFVLITEDAVFQHMDKQPRRVLNQWTYHARMYNAARYVCTQPDMAFIQLVSFGCGVDAITTDELRSILEEAGELYTQLKIDDISNLGAVKIRIRSLMAALDARDARNQKGGQ

SEQ ID NO: 586 - protein, 731 aa, Unknown
  Description of Unknown: uncultivated organism sequence
  Category: MG55 effectors
  Description: MG55-161 effector
MAAAIEVNTRVIKRNGQEVTFDITKIINAIKKANVEVSGIYQLNEYQINAIADKIARKVSDAPHAVNVEDIQDMVEKGIMEMRGYEVAQKYVRYRYKRELSRKSNTTDNGILALINQENEEVKQENSNKNPVINSTQRDYMAGEVSKDLTKRILLPEDIVKAHEEGIIHFHDSDYYAQKEHNCDLINLEDMLQNGTVISQTMIEKPHSFFTACNVTTQIVAQVASNQYGGQSFTLSHLAPFVDVSRQKIRKSVIEERKECGEALDDAIIDKIVASRLQEEIRSGIQTIQYQLITLMTCNGQAPFVTMFMYLDEVPEGRTRDDLAMVIEEALKQRMQGVKNEKGVWITPAFPKIIYVLDEDNIYPDSKYYYLTELAAKCTAKRMVPDYISAKKMKEYKNGDVYPCMGCRSFLTPDTEGLGPNGQHKYYGRFNQGVVTINLVDVACSAHGDMDQFWKIFDERLELCHRALRCRHERLLGTPSDVAPILWQYGALARLKKGEKIDKLLYNNYSTISLGYAGLYEMCMRMLGVSHTDPKGKEFALKVMQHMDDKCAEWRKAENISYSLYGTPMESTTYKFAKCLQKRFGIIKNVTDHNYITNSYHVNVREKIDAFTKLKFEADFQKLSPGGAISYVEVPNMQQNIPAVLAVMRYIYDNIMYAELNTKSDYCEVCGYDGEIKIVEDKSGKLVWECPNCGNRDQSKMSVARRTCGYIGTQFWNQGRTQEIKDRVLHL

SEQ ID NO: 587 - protein, 1416 aa, Unknown
  Description of Unknown: uncultivated organism sequence
  Category: MG55 effectors
  Description: MG55-162 effector
MKLDFNTLGIDIGSTTVKIAILNKDGEIIFSDYQRHYANIQETLAKIIDEAYEEFGDIPVSPMITGSGGLTLSKHMEIPFVQEVVAVATSLKDYAPRTDVAIELGGEDAKIIYFTGGIDQRMNGICAGGTGSFIDQMATLLKTDAAGLNEYAKNYKAIYPIAARCGVFAKTDIQPLINEGATKEDLSASIFQAVVNQTISGLACGKPIKGNVAFLGGPLHFLTELKQAFIRTLGLEGDAIIAPEHSHLFAASGAAMNAHADVQSSLGELKEKLSHKIELEFEVTRMEPLFASEKEYEDFTERHNKHNVRKGDFASYKGDLFLGIDAGSTTTKVAVIGDDGSLLYSFYSSNNGSPLKTALKAMKDIYSKMPEGARIVRSCSTGYGEALLKSALLLDEGEVETVAHYTAAAFFDPNVDCILDIGGQDMKCIKIKNNSVDKVQLNEACSSGCGSFIETFAKSLNYEVADFAKIALFAENPIDLGSRCTVFMNSKVKQAQKEGASVADISAGLAYSVIKNALLKVIKLTDPKDLGKQVVVQGGTFYNDAVLRSFERISGCEAIRPDIAGIMGAFGAALIAKDRYTGQKSTMLSFKEINELRFKTSMTRCQGCINHCLLTVNEFTGDRRFISGNRCEKGLGLEKNKEQIPNLFEYKNERVFRHYKPLKKADAPRGVVGIPRVLNMYENYPFWFTFFTKLGYSVKLSPVSSRKIYELGIESIPSESECYPAKLAHGHVTWLIRQGLEYIFYPCIPYERVEVPDAGNHYNCPIVTSYGENIKNNIEELRDDKIKYQNPFISLESEEILTKRLVDFFRKENGIPAAEIKAAAHEGWLEMQAVREDMNKKGKEVLQYLKETGRHGIVLAGRPYHSDPEINHGIPDLITSYGVAVLTEDSISELSEVDRPTIVMDQWMYHSRLYKAASFVAKNDNLDLIQLNSFGCGLDAVTTDQVSDILTKQNKIYTVLKIDEVNNLGAARIRIRSLLAAVKDRERKKIEAKRVDTAHHRVIFTEQMRKDYTILVPDMSPIHFEILESALASCGYNVEVLKADSKCIDYGLKYVNNDACYPSLIVVGQFMQALLSGKYDLHKVALIITQTGGGCRATNYIGFIRRALEKAGMGYIPVISMSAGIEKNPGLKVNLEMANKALQALIYGDVFMRVLYKTRPYEKVKGSANALHEKWKKIAIESVKKANKKQFKKNIQNIVKEFDELELVDIKKPKVGIVGEILVKFMPLANNFIVELLEEEGAEAVCPDLIDFFMYSLYNANFKAEYLGKKKSSAKINNFLIWFIERYRKCANDALAASKRFHPTVPIQKLAEYASPIVSCGNQTGEGWFLTGEMIELIKSGVPNIVCTQPFGCLPNHVVGKGVIKELRHQYPDSNIVAVDYDPGASEVNQLNRIKLMLSTAGKNLIAESKDNEETA

SEQ ID NO: 588 - protein, 1416 aa, Unknown
  Description of Unknown: uncultivated organism sequence
  Category: MG55 effectors
  Description: MG55-163 effector
MKLDFNTLGIDIGSTTVKIAILNKDGEIIFSDYQRHYANIQETLAKIIDEAYEEFGDIPVSPMITGSGGLTLSKHMEIPFVQEVVAVATSLKDYAPRTDVAIELGGEDAKIIYFTGGIDQRMNGICAGGTGSFIDQMATLLKTDAAGLNEYAKNYKAIYPIAARCGVFAKTDIQPLINEGATKEDLSASIFQAVVNQTISGLACGKPIKGNVAFLGGPLHFLTELKQAFIRTLGLEGDAIIAPEHSHLFAASGAAMNAHADVQSSLGELKEKLSHKIELEFEVTRMEPLFASEKEYEDFTERHNKHNVKKGDFASYKGDLFLGIDAGSTTTKVAVIGDDGSLLYSFYSSNNGSPLKTALKAMKDIYSKMPEGARIVRSCSTGYGEALLKSALLLDEGEVETVAHYTAAAFFDPNVDCILDIGGQDMKCIKIKNNSVDKVQLNEACSSGCGSFIETFAKSLNYEVADFAKIALFAENPIDLGSRCTVFMNSKVKQAQKEGASVADISAGLAYSVIKNALLKVIKLTDPKDLGKQVVVQGGTFYNDAVLRSFERISGCEAIRPDIAGIMGAFGAALIAKDRYTGQKSTMLSFKEINELRFKTSMTRCQGCINHCLLTVNEFTGDRKFISGNRCEKGLGLEKNKEHIPNLFEYKNERVFKHYKPLKKADAPRGVVGIPRVLNMYENYPFWFTFFTKLGYSVKLSPVSSRKIYELGIESIPSESECYPAKLAHGHVTWLIRQGLEYIFYPCIPYERVEVPDAGNHYNCPIVTSYGENIKNNIEELRDDKIKYQNPFISLESEEILTKRLVDFFRKENGIPAAEIKAAAHEGWLEMQAVREDMNKKGKEVLQYLKETGRHGIVLAGRPYHSDPEINHGIPDLITSYGVAVLTEDSISELSEVDRPTIVMDQWMYHSRLYKAASFVAKNDNLDLIQLNSFGCGLDAVTTDQVSDILTKQNKIYTVLKIDEVNNLGAARIRIRSLLAAVKDRERKKIEAKRVDTAHHRVIFTEQMRKDYTILVPDMSPIHFEILESALASCGYNVEVLKADSKCIDYGLKYVNNDACYPSLIVVGQFMQALLSGKYDLHKVALIITQTGGGCRATNYIGFIRRALEKAGMGYIPVISMSAGIEKNPGLKVNLEMANKALQALIYGDVFMRVLYKTRPYEKVKGSANALHEKWKKIAIESVKKANKKQFKKNIQNIVKEFDELELVDIKKPKVGIVGEILVKFMPLANNFIVELLEEEGAEAVCPDLIDFFMYSLYNANFKAEYLGKKKSSAKINNFLIWFIERYRKCANDALAASKRFHPTVPIQKLAEYASPIVSCGNQTGEGWFLTGEMIELIKSGVPNIVCTQPFGCLPNHVVGKGVIKELRHQYPDSNIVAVDYDPGASEVNQLNRIKLMLSTAGKNLIAESKDNEETA

SEQ ID NO: 589 - protein, 979 aa, Unknown
  Description of Unknown: uncultivated organism sequence
  Category: MG55 effectors
  Description: MG55-164 effector
MSLRIGIDIGSTTVKVVVLDEQNKLLFRSYERHYSKTRERACETLRSISDMLAGRQVKMVITGSAGLGVANASGIDFVQEVYATAAAVNTYIPGTDAVIELGGEDAKIIFFGGALEERMNGSCAGGTGAFIDQMATLMNVSVDELDALSLKHEKIYPIASRCGVFAKSDIQPILNQGGRKEDVAASIFQAVVDQTVAGLTQGRELKGKIVFLGGPLHFLMGLRERFVETLKLDEEHAIFPEDGDCFAAMGAALCSSDYDTILFEDALKKLEESVDTTTLVDTMPPLFQDVAEYGAFCARHNAKRPPEVDIKTYEGPAWLGIDAGSTTTKLALITGDGGLLYTYYHSNLGNPVAIVLEQLREIYAQCGDRIEIRGVAVTGYGEDLIKNAFSCDLGLVETMAHYKAAAHFEPDVDFIIDIGGQDMKCFKIRNGAVDSIMLNEACSSGCGSFIETFAKALGYTIADFAKLGLFAQKPVNLGSRCTVFMNSSVKQAQKDGASVEEISAGLSISIVKNAIYKVIRAASADDLGKHIVVQGGTFLNDAVLRAFEQELGRDVTRPTISGIMGAFGAALAARDLHLEKSAVLTAQALEKFTHTAKPATCGLCTNHCALTVNTFDGGRRFVSGNRCSRPLGEEPTHLPDLMRYKYAKLRALQGKGQGDGSRGRIGIPFGLNMYENLPFWFELFTRLNFEVVLSPESSRKLYVKGQRTIPSDTVCYPAKLLHGHMEALVEQGVDAIFYPCMPYNFNEGVSDNNYNCPVVAYYPELLAANVPELKKTRYLYPYFGLHRPKDFEKHAAKWFEEEFGVPRKETVAAARAAYGAYDAYKNDLRATAQQYIAQARAEGRPILVVAGRPYHMDPEINHGINDLITNYGFILITEDAVAYLEDKAPRHVLNQWTYHARMYNAARYVCTQPDMELIQLVSFGCGIDAITGDEMRSILEEGGKLYTQLKIDDISNLGAVKIRIRSLMAAIEARKQSEE

SEQ ID NO: 590 - protein, 1439 aa, Unknown
  Description of Unknown: uncultivated organism sequence
  Category: MG55 effectors
  Description: MG55-165 effector
MIKTLHVGLDVGSTTVKIIVMDENLNTIYTDYKRHFSDTKNTICNVLENLIIMYPNTEFTIALTGSGAISAAKFLDLPFIQEVVSCKRAVEKYIPETDVVIELGGEDAKIIYFDKFIEQRMNGTCAGGTGAFIDQMASLLNTDPTGLNELAKSHKLIYPIASRCGVFAKTDIQPLLNEGAAKEDIAASIFQAVVNQTISGLACGRPIRGNVAFLGGPLNYLSELRNRFIETLNLKDNEIIVPNEAHLLVAKGAALDSLNSHTITIEKLKSKIEVLKSSHDDTSNPLNPLFSIDAEYDEFKKRHEKDKVKRADFKTFKGNCFLGIDAGSTTTKLVVISEDGTLLYSLYGSNEGNPLQSVINMLKKLYAEKPSEAVIRFSGVTGYGEKLIQTALNVDLNEIETIAHYTAAKEFMPNVTSIVDIGGQDMKYIKMKNGAIDNIMLNEACSSGCGSFIETFAKSLGLSIQDFVQSALEARRPVDLGSRCTVFMNSKIKQAQKEGYSVGDISAGLSYSVIKNAIQKVMKVRDVKKLGAHIVVQGGTFYNDAVLRAFELIVGRNVVRPDIAGLMGAYGVALLAKEQYENNLDMDYVSSISNINELDKLEINITHIRCQGCENHCLLTINKFSNGAKYISGNRCEKGAGIVDKTLDRPNLIKYKFERTFNYTPLEEKNAPRGTIGIPRVLNMYEDYPFWFTFLTNLGFRVILSEKSNRKTYEKGMESMPSESVCFPAKLSHGHIIGLINSGIKTIFYPCIPYSRKEYQKADNHYNCPIVISYSEVLKNNVEELKDKNIKFLNPFLPFEPDKLAEIIMNLPEFKEYNFTKKELLSAAKKAETEYQNYKSDIHNKGQETLKFMEENNLKGIVLAGRPYHVDPEVNHGIDTLITSLGLCVLTEDSISNLTEAKRPLRVVDQWVFHARLYAAADFVGKHDNLELVQLNSFGCGVDAVTTDQVEEILTSYEKMYTLIKIDEINNLGAIRIRIRSLLASMNKRIKDNNSSMCNGNYEVNKKIFTKEMRKDYTILMPQMAPIHFEFLESAMKNSGYKMELLKDCTQHTVETGLKYVNNDACYPSILVTGQMIEALESGKYDLNKTALIMSQTGGGCRATNYIGFIRKALKDAGFENVPVISFNVVGMEKMPGFKLTIPLIERLIKSCIYADLLQKMLTKNRAYEINKGKTKELFDYWMEKCKKLVNKSSIKEFKQSIFDIVSDFEKIEIDTSVIKPKVGIVGEVLIKYHPFGNNFVADKLEQEGAEVILPDFMGFIKFIATHKITFNKLIKTDAIKAKLFKTAIKLIDLLEKPVISALNNSKKGYLLPCNIWDLEEKVNDILSIGNQTGEGWFLTAEMIEYIEHDIPNIVCVQPFACLPNHVVGKGVIKTIRSKFPEANIAPIDYDPGASEANQTNRIKLMMTVAKDNLKNKNNINKAIKKENYIIDEKNKISN

SEQ ID NO: 591 - protein, 983 aa, Unknown
  Description of Unknown: uncultivated organism sequence
  Category: MG55 effectors
  Description: MG55-166 effector
MALRIGIDIGSTTVKVVVLDAQNKLLFRSYERHYSKTRERTCETLRGLRGLLGGQQVQLLITGSAGLGVAKAAGLDFVQEVYATAAAVREFIPGTDAVIELGGEDAKIIFFGNTLEERMNGSCAGGTGSFIDQMATLLNVSVDELDELSLRHEKIYPIASRCGVFAKSDIQPILNQGGRKEDVAASIFQAVVDQTVAGLTQGRELKGTIVFLGGPLHFLAGLRQRFVETLHLDQDHAIFPEDGDCFAAIGAALCTEDSQPRPFEELLDLLEHAATVSTPVDTMDPLFTSQADYEAFSARHQAMAVPTVDLATYTGPAYLGIDAGSTTTKMVLIDPDCNLLYSFYHSNQGNPVSIVLPQLREIYAQCGGRVTIQGAAVTGYGEDLIKNAFSCDLGLVETVAHLNAARHFTPDVDFIIDIGGQDMKCFKIRNGAVDSILLNEACSSGCGSFIETFAKALGYTIADFSKMGLFARHPVNLGSRCTVFMNSSVKQAQKDGASVEDISAGLSISVVKNAIYKVIRAASADDLGQHIVVQGGTFLNDAVLRSFELEIGREVTRPTISGMMGAYGAALAAKDAGLTQSTLLSAEALASFTHEARPATCKLCTNHCSLTINRFDGGRKFISGNRCSRPLGQEKVDIPDLLKFKYQYLRSLQGKGEGDGSRGKIGIPFGLNMYENLPFWFTLFTTLNFEVVLSPESTRSLYLKGQQTIPSDTVCYPAKLLHGHIMALLEEGIDTIFYPCMSYNFDEHLSDNHYNCPVVAYYPDLLGVNIPALEDIKYLHPNLGLHRPKDFEKKGAQLLETEFGIPKRASVKAIRKAYAAYEDFRRLVQKKGEEYISFARETGRKILVVAGRPYHMDPEINHGINDLITSFGFVLITEDAVFQHMDKQPRRVLNQWTYHARMYNAARYVCTQPDMAFIQLVSFGCGVDAITTDELRSILEEAGELYTQLKIDDISNLGAVKIRIRSLMAALDARDARNQKGGQ

SEQ ID NO: 592 - protein, 747 aa, Unknown
  Description of Unknown: uncultivated organism sequence
  Category: MG55 effectors
  Description: MG55-167 effector
MEEKENVSVKINVIKRNGQEVDFDISKIVNAIRKANAEVSGIYQMNDYQINAVADNIAKKVQNSSHAVNVEDIQDMVETGIMEMRGYEVAQKYVRYRYKREISRKSNTTDNGILALINQQNEEVKQENSNKNPVINSTQRDYMAGEVSKDLTKRVLLPEDIVKAHEEGIIHFHDSDYYAQKEHNCDLINLEDMLQNGTVISETLIEKPHSFFTACNVTTQIVAQVASNQYGGQSFTLSHLAPFVDVSRKKLTKQVLEERRLTGETQDADIISKIVENRLDEEIKSGIQTIQYQLITLMTCNGQAPFVTMFMYLDEVPEGQTRDDLARIIREVLLQRMQGVKNEKGVWITPAFPKLIYVLDEDNIRPDSKYYSLTELAAKCTSRRMVPDYISAKKMKEYKNGDVYPCMGCRSFLTPDTEGLDPNGKHKYYGRFNQGVVTINLVDVACSSYGDMEAFWKIFDERLELCHRALRCRHERLLGTISDVAPILWQYGALARLGKGEKIDRLLYNNYSTISLGYAGLYEMCMRMLGVSHTDPKGKEFALQVMQHLNDKCAEWRKAENISYSLYGTPMESTTYKFAKCLQKRFGIIKDVTDHNYITNSYHVNVRENIDAFTKLRFEADFQKLSPGGAISYVEVPNMQNNIPAVLSVMQYIYDNIMYAELNTKSDYCEVCGYDGEIRIVEDENGKLVWECPNCGNRDQSKMSVARRTCGYIGTQFWNQGRTQEIKDRVLHLSNKSFGSEVSGVQS

SEQ ID NO: 593 - protein, 720 aa, Unknown
  Description of Unknown: uncultivated organism sequence
  Category: MG55 effectors
  Description: MG55-168 effector
MKIIKRSGAEAVFDISKIIIAINKANHEVVEAERLTADQIKEIAQYIEDSCKDANHALNVEDIQDLVEDQLMDKRAFSVARKYITYRYKRALVRKSNSTDEQILSLIECNNEEVKQENSNKDSTVNSVQRDYMAGEVSKDITRRFLLPEDIVEAHEQGIIHFHDADYFAQHMHNCDLVNLEDMLQNGTVISGTRIDKPHSFSTACNIATQIIAQVASSQYGGQSISLAHLVPFVQISREKIHAELVQTLKESDVELSEEKINSIVERRLHAEIERGVQVIQYQVVTLMTTNGQSPFVTVFMYLNEAKNEQEKKDLAMIIEEVLDQRYQGVKNEDGVWITPAFPKLIYVLEEDNIHEDSEYYYLTKKAAKCTAKRMVPDYISEKKMKELKDGNCYTCMGCRSFLTVYHDEAGKPKFYGRFNQGVVTLNLVDLACSSGGDFEKFWKLFDERLDLCYRALMARHNRLKGTPSDVAPILWQYGALARLKKGETIDKLLYGGYSTISLGYAGLCECTRYMTGKPHTDPAATPFALKVMQRLNDACKEWKEKENIDFSVYGTPLESTTYKFAKCLQKRFGVIPGVTDKNYITNSYHVHVTENIDAFTKLKFESQFQALSPGGAISYVEVPNMQDNLDAVLSVMKFIYENIMYAELNTKSDYCQVCGYDGEIQIVKDDDGKLVWECPHCHNRDQDKMNVARRTCGYIGSQFWNQGRTQEIKERVLHL

SEQ ID NO: 594 - protein, 1416 aa, Unknown
  Description of Unknown: uncultivated organism sequence
  Category: MG55 effectors
  Description: MG55-169 effector
MKLDFNTLGIDIGSTTVKIAILNKDGEIIFSDYQRHYANIQETLAKIIDEAYEEFGDIPVSPMITGSGGLTLSKHMEIPFVQEVVAVATSLKDYAPRTDVAIELGGEDAKIIYFTGGIDQRMNGICAGGTGSFIDQMATLLKTDAAGLNEYAKNYKAIYPIAARCGVFAKTDIQPLINEGATKEDLSASIFQAVVNQTISGLACGKPIKGNVAFLGGPLHFLTELKQAFIRTLGLEGDAIIAPEHSHLFAASGAAMNAHADVQSSLGELKEKLSHKIELEFEVTRMEPLFASEKEYEDFTERHNKHNVRKGDFSSYKGDLFLGIDAGSTTTKVAVIGDDGSLLYSFYSSNNGSPLKTALKAMKDIYSKMPEGARIVRSCSTGYGEALLKSALLLDEGEVETVAHYTAAAFFDPNVDCILDIGGQDMKCIKIKNNSVDKVQLNEACSSGCGSFIETFAKSLNYEVADFAKIALFAENPIDLGSRCTVFMNSKVKQAQKEGASVADISAGLAYSVIKNALLKVIKLTDPKDLGKQVVVQGGTFYNDAVLRSFERISGCEAIRPDIAGIMGAFGAALIAKDRYTGQKSTMLSFKEINELRFKTSMTRCQGCINHCLLTVNEFTGDRKFISGNRCEKGLGLEKNKEQIPNLFEYKNERVFRHYKPLKKADAPRGVVGIPRVLNMYENYPFWFTFFTKLGYSVKLSPVSSRKIYELGIESIPSESECYPAKLAHGHVTWLIRQGLEYIFYPCIPYERVEVPDAGNHYNCPIVTSYGENIKNNIEELRDDKIKYQNPFISLESEEILTKRLVDFFRKENGIPAAEIKAAAHEGWLEMQAVREDMTKKGKEVLQYLKETGRHGIVLAGRPYHSDPEINHGIPDLITSYGVAVLTEDSISELSEVDRPTIVMDQWMYHSRLYKAASFVAKNDNLDLIQLNSFGCGLDAVTTDQVSDILTKQNKIYTVLKIDEVNNLGAARIRIRSLLAAVKDRERKKIEAKRVDTAHHRVIFTEQMRKDYTILVPDMSPIHFEILESALASCGYNVEVLKADSKCIDYGLKYVNNDACYPSLIVVGQFMQALLSGKYDLHKVALIITQTGGGCRATNYIGFIRRALEKAGMGYIPVISMSAGIEKNPGLKVNLEMANKALQALIYGDVFMRVLYKTRPYEKVKGSANALHEKWKKIAIESVKKANKKQFKKNIQNIVKEFDELELVDIKKPKVGIVGEILVKFMPLANNFIVELLEEEGAEAVCPDLIDFFMYSLYNANFKAEYLGKKKSSAKINNFLIWFIERYRKCANDALAASKRFHPTVPIQKLAEYASPIVSCGNQTGEGWFLTGEMIELIKSGVPNIVCTQPFGCLPNHVVGKGVIKELRHQYPDSNIVAVDYDPGASEVNQLNRIKLMLSTAGKNLIAESKDNEETA

SEQ ID NO: 595 - protein, 708 aa, Unknown
  Description of Unknown: uncultivated organism sequence
  Category: MG55 effectors
  Description: MG55-170 effector
MKVIKRDGSTADFDSSKIIVAIQKANQVVEPEDRIDQERIEAIAHYVESKNRMRLLVEDIQDMVEHQLMDEGKFNLAKSYIIYRYTRALVRKANTTDESILSLIRNSNKDVMEENSNKNAVMASTQRDLIAGEVSKDLTRRLILPEKISKAHDEGAIHFHDADYFVQPIFNCCLINVGDMLDNGTVMNGKLIESPKSFQVACTVMTQIIASVASSQYGGQSVDIRHLGKYLRRSYEKFKLTIKAEVGDSVADEVVERLTKRRLQDELRSGVQTIQYQINTLMTTNGQSPFVTIFLNLQADDEYLEENAMIVEEVLRQRLEGIKNDKGVFVTPAFPKLVYVLDEHNCLKGGKYDYITKLAVKCSAKRLYPDYISAKKMRENYEGNVFAPMGCRSFLAAWKDDEGNYKFEGRFNQGVVSLNLPQVAILAHGDEEKFWPLLDERLQLCYEALMCRHNSLKGIRSDVSPVHWQYGAIARLEKGEVIDKYLEKGYSTISLGYIGLYEMTKLMKDVSHTTPEGEEFALRVMKYLRAACDKWKKETGLGFALYGTPAESLCYRFARIDKERFGTIADVTDKGYYTNSYHVDVREDIDAFSKFNFESQFQRISSGGAISYVEIPNMRHNLEAMEDVVRFIYDNIQYAEFNTKSDYCHVCGFDGEIIINDDLEWECPNCGNKNQTLMNVTRRTCGYLGENFWNVGKTKEIKSRVLHL

SEQ ID NO: 596 - protein, 722 aa, Unknown
  Description of Unknown: uncultivated organism sequence
  Category: MG55 effectors
  Description: MG55-171 effector
MKIIKRNGAEVSFDVEKILNAVRKANNEVSEDNRLSEEQIEEIAKRVTALAGDLNRAVNVEEVQDFVENQIMDQKAFAVARKYITYRYTRALIRRANTTDAQILTLIECNNEEVKQENSNKNPTVNSVQRDYMAGEVSKDLTRRLLLPRDIVEAHDEGLIHFHDADYFAQHMHNCDLVNLEDMLQNGTVISGTFIEKPHSFSTACKIATQIIAQVASNQYGGQSISLTHLAPFVDISRQKIRAEVKEELADVGVMEDTIARIAEKRLREEIKKGIQTIQYQVVTLLTTNGQAPFVTVFMYLGEARNERERADLAMIIEETLNQRIQGVKNESGVWVTPAFPKLIYVLEEDNIREGSKYWYLTELAARCTAKRMVPDYISEKKMLEYKIDKNGEGHCYTCMGCRSFLTPYVDAEGKPKYYGRFNQGVVTINLVDVALSSGGDMDEFWKIFDERLELCHRALLERHNRLKGTLSDAAPILWQYGALARLKKGETIDKLLYGGYSTISLGYAGLYECTKYMTGKSHTDAAAKPFALSVMQHMNDKCKEWKGMHNIDFSLYGTPLESTTYKFAKALQKRFGINEGVTDKNYITNSYHGHVTEPIDAFTKLKFESEFQQLSPGGAISYVEVPNMQDNIPAVLSVMQYIYDNIMYAELNTKSDYCQVCGYDGEIGIVEEDGKLLWECPYCHNRDQSKMNVARRTCGYIGTQFWNQGRTQEIKDRVLHL

SEQ ID NO: 597 - protein, 1410 aa, Unknown
  Description of Unknown: uncultivated organism sequence
  Category: MG55 effectors
  Description: MG55-172 effector
MKLDFNTLGIDIGSTTVKIAILNKDGEIIFSDYQRHYANIQETLAKIIDEAYEEFGDIPVSPMITGSGGLTLSKHMEIPFVQEVVAVATSLKDYAPRTDVAIELGGEDAKIIYFTGGIDQRMNGICAGGTGSFIDQMATLLKTDAAGLNEYAKNYKAIYPIAARCGVFAKTDIQPLINEGATKEDLSASIFQAVVNQTISGLACGKPIKGNVAFLGGPLHFLTELKQAFIRTLGLEGDAIIAPEHSHLFAASGAAMNAHADVQSSLGELKEKLSHKIELEFEVTRMEPLFASEKEYEDFTERHNKHNVRKGDFSSYKGDLFLGIDAGSTTTKVAVIGDDGSLLYSFYSSNNGSPLKTALKAMKDIYSKMPEGARIVRSCSTGYGEALLKSALLLDEGEVETVAHYTAAAFFDPNVDCILDIGGQDMKCIKIKNNSVDKVQLNEACSSGCGSFIETFAKSLNYEVADFAKIALFAENPIDLGSRCTVFMNSKVKQAQKEGASVADISAGLAYSVIKNALLKVIKLTDPKDLGKQVVVQGGTFYNDAVLRSFERISGCEAIRPDIAGIMGAFGAALIAKDRYTGQKSTMLSFKEINELRFKTSMTRCQGCINHCLLTVNEFTGDRKFISGNRCEKGLGLEKNKEQIPNLFEYKNERVFRHYKPLKKADAPRGVVGIPRVLNMYENYPFWFTFFTKLGYSVKLSPVSSRKIYELGIESIPSESECYPAKLAHGHVTWLIRQGLEYIFYPCIPYERVEVPDAGNHYNCPIVTSYGENIKNNIEELRDDKIKYQNPFISLESEEILTKRLVDFFRKENGIPAAEIKAAAHEGWLEMQAVREDMTKKGKEVLQYLKETGRHGIVLAGRPYHSDPEINHGIPDLITSYGVAVLTEDSISELSEVDRPTIVMDQWMYHSRLYKAASFVAKNDNLDLIQLNSFGCGLDAVTTDQVSDILTKQNKIYTVLKIDEVNNLGAARIRIRSLLAAVKDRERKKIEAKRVDTAHHRVIFTEQMRKDYTILVPDMSPIHFEILESALASCGYNVEVLKADSKCIDYGLKYVNNDACYPSLIVVGQFMQALLSGKYDLHKVALIITQTGGGCRATNYIGFIRRALEKAGMGYIPVISMSAGIEKNPGLKVNLEMANKALQALIYGDVFMRVLYKTRPYEKVKGSANALHEKWKKIAIESVKKANKKQFKKNIQNIVKEFDELELVDIKKPKVGIVGEILVKFMPLANNFIVELLEEEGAEAVCPDLIDFFMYSLYNANFKAEYLGKKKSSAKINNFLIWFIERYRKCANDALAASKRFHPTVPIQKLAEYASPIVSCGNQTGEGWFLTGEMIELIKSGVPNIVCTQPFGCLPNHVVGKGVIKELRHQYPDSNIVAVDYDPGASEVNQLNRIKLMLSTAGKNLQIENL

SEQ ID NO: 598 - protein, 708 aa, Unknown
  Description of Unknown: uncultivated organism sequence
  Category: MG55 effectors
  Description: MG55-173 effector
MKIQKRDGRIVPYEEEKIIDAIHKANQEVEEKDRADDTLIEQILEAVKAEGKKQQTVEHVQDVIEQHLVEANKYVLSKKYMVYRYQRSLLRKSNTTDESILKLIRNENKELAEENSNKNTRLASTQRDYIAGEVSRDVTRRMLLPEHISMAHDNGVLHFHDADYFIQPIFNCCLINIQDMLDNGTSINGKMIESPKSFQVACTVTTQIIAAVASNQYGGQSVNIKHLGKYLRKSKEKFTKQLEDEFGDSLDAAMKEKIVQMRLKDELKSGVQTIQYQINTLMTTNGQSPFVTLFLHIDENDEYVEETVQIIGEILRQRIEGTKNEKGVYVTPAFPKLVYVLDENNCLKGGKYDYVTRLAAKCSAKRMYPDYISAKKMRENYEGNVFSCMGCRSFLSPWKDENGNYKWEGRFNQGVVSLNLPQIGIIADGNEEVFWKLLDERLELCYEALMCRHKALLGTVSDVSPIHWQYGAIARLKKGEKIDRLLLNGYSTMSLGYIGLYELTYLMKGCSHTAPKGKEFALRVMDHLREAAARWKEETGIGFSLYGTPAETLCYRFARIDREKYGDIPNVTDKGYYTNSYHVDVREKMDAFTKFTFESEFQNKSLGGAISYVEIPNLNNNLEAIEELIRFIYDNIQYGEFNTKSDYCHVCGYDGEIIVNDDNEWECPQCHNKDHAKMNVTRRTCGYLGENFWNTGKTKEIKARVLHL

SEQ ID NO: 599 - protein, 973 aa, Unknown
  Description of Unknown: uncultivated organism sequence
  Category: MG55 effectors
  Description: MG55-174 effector
MRIGMDIGSTTIKCVVLDENDQIIYSAYERHYSHILEKTRELLTSLNDTYLKGKKAYFAISGSAGMGLADSCGVSFVQEVFADRVAANRLNPGTDCIIELGGEDAKILFLTNGTEVRMNGSCAGGTGAFIDQMATLLKMSADEMDKTAQQATRKYTIAARCGVFAKSDVQPLINQGALSSDIAASIYQAVVNQTIAGLAQGRPISGKILYLGGPLTFSKCLRDSFNETLKIEGICPENSLLYVALGAAYYADKEVVFDDVVKGLANYGKTATYASLPPLFNNVEEYNEFKKRHAKASVPRVDFDENTGPVHIGIDSGSTTIKVAVIDDHANLLFTDYQSNSGNPLPIVIDVLKGLYEQHPNLKIQSVTTTGYGEALMTHALHTDFGLVETVAHFTAAKHFMPDVDFIIDIGGQDMKCFKIENGAISDIFLNEACSSGCGSFLQTFSAALGYSVKNFAQEALFAKQPVDLGSRCTVFMNSSVKQAQKDGADFDCISAGLSISVVKNALYKVIRTSSPEQLGKKIVVQGGTFYNEAVLRAFEKEMGVDVVRPDIAGLMGAYGAALHGKEHSKPGTISSILTLEELNNFTQKVQNVQCGLCGNHCQMTVSVFQDGKRFITGNRCDRPITGKSNDDTLNLYAYKQQQLSQLMKNPGNGTRGKIGIPMVLNMYELLPFWHAFFTSLGFQVIVSPFSNRKLYQAGQGSIPSDTVCFPAKLTHGHIMALLKKDVDAIFYPCMSYNIDEGLGDNHYNCPVVAYYPEVLAGNIRELEDTKFIYEYLNLEQRKDFVRLMPKIMQKYFPDLKTADIHNAIEVAYTAYRKHMEDTRNEAQRMMTEARNEGKRIIVLAGRPYHVDPEVNHGIDKLIVQHGACVITEDSISNLVQKFDTSVLNQWSYHSRLYAAAKYCVNHADMDLVQLVSFGCGLDAVTSDETKEILQEGNKLYTQLKIDEITNLGAINIRIRSLFAALDERKEQA

SEQ ID NO: 600 - protein, 708 aa, Unknown
  Description of Unknown: uncultivated organism sequence
  Category: MG55 effectors
  Description: MG55-175 effector
MKVIKRDGSTADFDSSKIIVAIQKANQVVEPEDRIDQERIEAIAHYVESKNRMRLLVEDIQDMVEHQLMDEGKFNLAKSYIIYRYTRALVRKANTTDESILSLIRNSNKDVMEENSNKNAVMASTQRDLIAGEVSKDLTRRLILPEKISKAHDEGAIHFHDADYFVQPIFNCCLINVGDMLDNGTVMNGKLIESPKSFQVACTVMTQIIASVASSQYGGQSVDIRHLGKYLRRSYEKFKLTIKAEVGDSVADEVVERLTKRRLQDELRSGVQTIQYQINTLMTTNGQSPFVTIFLNLQADDEYLEENAMIVEEILRQRLEGIKNDKGVFVTPAFPKLVYVLDEHNCLKGGKYDYITKLAVKCSAKRLYPDYISAKKMRENYEGNVFAPMGCRSFLAAWKDDEGNYKFEGRFNQGVVSLNLPQVAILAHGDEEKFWPLLDERLQLCYEALMCRHNSLKGIRSDVSPVHWQYGAIARLEKGEVIDKYLEKGYSTISLGYIGLYEMTKLMKDVSHTTPEGEEFALRVMKYLRAACDKWKKETGLGFALYGTPAESLCYRFARIDKERFGTIANVTDKGYYTNSYHVDVREDIDAFSKFNFESQFQRISSGGAISYVEIPNMRHNLEAMEDVVRFIYDNIQYAEFNTKSDYCHVCGFDGEIIINDDLEWECPNCGNKNQTLMNVTRRTCGYLGENFWNVGKTKEIKSRVLHL

SEQ ID NO: 601 - protein, 1410 aa, Unknown
  Description of Unknown: uncultivated organism sequence
  Category: MG55 effectors
  Description: MG55-176 effector
MKKFLVGIDVGSTTVKIVCLDDKFNIVYSIYQRHLSNVRETTKLLFNNFLKYMEEHYGKNVSIKLNITGSSGMGIASCIEIDFIQEVIACIKAIETVIPQTDVAIELGGEDAKITFLKNDMDQRMNGSCAGGTGAFIDQIAALLNTDATGLNEMAKNYDTIYPIAARCGVFAKTDIQPLINEGAKKGNIAVSVFQAVVNQTITGLACGKKISGKIAFLGGPLFFLSELRKRFIETLNIKDEDVIFPDNSQIFVAQGAAFAAQENKTSYILEELATKFENLTKKGNDETSRLDSLFKDKIEYDEFINRHANEKIDTVDINEYEGDAFLGIDAGSTTIKLVLISDDNKILYSFYSHNKGNPLDNIIENLKTLYKKMGDKIKIKGSCVTGYGENLIKAALQVDNGIVETIAHYKGALFFQPKVDFILDIGGQDMKCLKINDGVISSILLNEACSSGCGSFLETFANSLGMDIKEFAKLGLNSKSPADLGTRCTVFMNSKVKQAQKDGVDVGDISAGLSYSVVKNTLFKVIKIKNKEELGKYIVVQGGTFLNDCVLRAFEKIANRNVIRPNIAGLMGAFGAAIVAKERSGAKSTLLSLKELEDFSCSTNLTRCGMCTNRCLLTIHKFKSGENFISGNRCDNPINKVKKEQAPNMFEYKYNRLFNYTPLELSKAYRGEIGIPRVLNFYDSYPFWFTLLTNLGFRVVISDDSSKKLYESGIDTITSDSICYPAKLVHGHITNLVNKGIKRIFYPCVIFEEKEDKNSQNQYNCPIVMSYPEVIKNNMDILKDNNIDMMIPVFSFENTEVLYKRVSEIFARFGVSKNEAKIAVDKALEEKYRFRKDMQNKAKEIITNLETTGNIGVVLCGRPYHCDKEIHHGIPNIINSFGIAVLTGDAVASLGSLDDELRVIDQWTYHSRLYRAATVVGKHPNLELVELNSFSCGIDAVTTDQVNEILTNYGKVHTLLKIDEISNLGAIKIRIRSLLAALEYKKSSITNKIKHTIKYKKAEFTKSMKSEYTILAPQMAPMHFDLIKHAFRAQGYNLVVLPETKEALDCGLKYVNNDACYPSILVIGELISALQSGKYDLDKTAVIISQTGGSCRATNYLGFLRKAIRDAGFEKIPIISLNTAGFEKQPGFSLSLPFIHKALIAVSYGDLLMKLLYRTRPYEVNYGESDKIYKKWNQLVIPNIYNGKISQFKKNIKSIINDFSNIEITNEEKIKVGIVGEILVKFSPFANNNLAAFIEQEGGEVYTSSLMNFIKYCIYSDIYLNEKFKGKLSSIFLRSALWVLDKYTNIVNSALSENSRFSKETSIQKTAEKTSRFISIGHQSGEGWFLMGEMIEFIEEGIPNIVCVQPFGCLPNHITGKGMIKRLKEEYENVNITPIDYDPAYSEVNQLNRIKLMLSVAKKNLKKSS

SEQ ID NO: 602 - protein, 708 aa, Unknown
  Description of Unknown: uncultivated organism sequence
  Category: MG55 effectors
  Description: MG55-177 effector
MKVTKRDGRVVDYDRNKIIVAIQKANAEVDRYEQVSEEKIDAIVAGIENKHVDNLQVEDIQDMIEQKLMSEHKYALAKKYIIYRYTREMVRRANTTDDSIMSLIQNSNKDVMEENSNKNAYIASTQRDLIAGEVSKDLTKRVLLPEKIVKAHEDGVLHFHDMDYYLQSIFNCCLINIGDMFEHGTVMNGKLIESPKSFQVACTVMTQIISAVASSQYGGQSVDVRHLGKYLRMTREKYERHYEEKYGDKVPAEVRKAFADDRIADELRSGVQTIQYQINTLMTTNGQSPFVTLFLNLDKDDPYIEENAMIIEEILNQRIEGIKNEKGVYVTPAFPKLIYVLDEHNCLRGGKYDYLTRLAVKCSAKRMYPDYISAKKMRENYEGNVFSCMGCRSFLTPWKDENGNYKFEGRFNQGVVSLNLPQIGILAEGDEEKFWSLLEERLALCFEALMCRHHALEGTMSNVSPIHWQYGAIARLKPGETIDKLLHNGYSTISLGYIGLYEVTKLMTGVSHTDPKGTDFALRLMKRLRLACDTWKLETGIGFGLYGTPAESLCYRFAEIDKKRFGVIPDVTDKGYYTNSYHVDVREKIDAFEKFTFESQFQNISSGGAISYVEIPNMRHNLEALEDVVRFIYDNIQYAEFNTKSDYCHVCGFDGEIIINDDLEWECPQCHNKDRNRMNVTRRTCGYLGENFWNVGKTKEINARVLHL

SEQ ID NO: 603 - protein, 731 aa, Unknown
  Description of Unknown: uncultivated organism sequence
  Category: MG55 effectors
  Description: MG55-178 effector
MDKELLIMTNVIKRNGKEVKFDIYKIIHAMEKANKEVAPVYQMNEYQIQAAAETVAKKIQASSHAVNVEDIQDMVETAIMEMRAYEVAQKYVRYRYKREMARKANSTDEDILALIDQANEELKQENSNKNPVINSTQRDYMAGEVSKDLTRRLLLPEDIVKAHEEGVIHFHDSDYYAQKEHNCDLINLEDMLQNGTVISETMIEKPHSFFTACNVTTQIVAQVASNQYGGQSFTLSHLAPFVDISRQKIREAVIAERKETGESMDEDIIAKIVNRRLKEEIKSGIQTIQYQLITLMTCNGQAPFVTMFMYLDEVPEGKTREDLALIIEEVLHQRMQGVKNEKGVWITPAFPKLIYVLDEDNITEDAPYYHLTKLAAQCTAKRMVPDYISAKIMREYKGGDVYPCMGCRSFLTEDKEGLGENGAHKYYGRFNQGVVTINLVDVACSSEGNMDSFWQILEERLELCHKALRLRHERLLGTVSDVAPILWQHGALARLKKGEKIDKLLYNNYSTISLGYAGLYEMCVRMLGKSHTTEEGRAFSLKVMEKLNDSCKKWREEEKISYSVYGTPMESTTYKFAKALKKRFGTIPGVTDKNYITNSYHVHVSEKIDAFSKLAFEADFQKLSPGGAISYVEVPNMQNNIPAVLSLMHFIYENIMYAELNTKSDYCCACGYDGEIQIVEDSYGKLQWRCPNCGNENQDQLSVARRTCGYIGTQFWNQGRTQEIKDRVLHL

SEQ ID NO: 604 - protein, 977 aa, Unknown
  Description of Unknown: uncultivated organism sequence
  Category: MG55 effectors
  Description: MG55-179 effector
MSLRIGIDIGSTTVKVVVLDEQNKLLFRSYERHYSKTRERACETLRSISDMLAGRQVKMVITGSAGLGVANASGIDFVQEVYATAAAVNTYIPGTDAVIELGGEDAKIIFFGGALEERMNGSCAGGTGAFIDQMATLMNVSVNELDALSLKHEKIYPIASRCGVFAKSDIQPILNQGGRKEDVAASIFQAVVDQTVAGLTQGRELKGKIVFLGGPLHFLMGLRERFVETLKLDEEHAIFPEDGDCFAAMGAALCSSDYDTILFEDALKKLEESVDTTTLVDTMPPLFQDVAEYGAFCARHNAKRPPQVDIKTYEGPAWLGIDAGSTTTKLALITEDGGLLYTYYHSNLGNPVAIVLEQLREIYAQCGDRIEIRGVAVTGYGEDLIKNAFSCDLGLVETMAHYKAAAHFEPDVDFIIDIGGQDMKCFKIRNGAVDSIMLNEACSSGCGSFIETFAKALGYTIADFAKLGLFAQKPVNLGSRCTVFMNSSVKQAQKDGASVEEISAGLSISIVKNAIYKVIRAASADDLGKHIVVQGGTFLNDAVLRAFEQELGRDVTRPTISGIMGAFGAALAARDLHLEKSSLLSAQALEKFTHTAKPATCGLCTNHCALTVNTFDGGRRFVSGNRCSRPLGEEPTHLPDLMRYKYAKLRALQGKGQGDGSRGRIGIPFGLNMYENLPFWFELFTRLNFEVVLSPESSRKLYVKGQRTIPSDTVCYPAKLLHGHMEALVEQGVDAIFYPCMPYNFNEGVSDNNYNCPVVAYYPELLAANVPELKKTRYLYPYFGLHRPKDFEKHAAKWFEEEFNVPKKETVAAARAAYGAYDAYKEDLRATAQQYIAQARAEGRPILVVAGRPYHMDPEINHGINDLITNYGFILITEDAVAYLEDRAPRHVLNQWTYHARMYNAARYVCTQPDMELIQLVSFGCGIDAITGDEMRSILEEGGKLYTQLKIDDISNLGAVKIRIRSLMAAIEARKAN

SEQ ID NO: 605 - protein, 1008 aa, Unknown
  Description of Unknown: uncultivated organism sequence
  Category: MG55 effectors
  Description: MG55-180 effector
MHNEIILFAPQNNIAAGCGRRARALNTAGTMAKLMGIDVGSTTVKVTVVDGGEVLYKSYERHYAQVRETVLSELEKIKEQFGGDFCASITGSAGLGLSQRSGINFVQEVQAAFVAIRNFYPDADAAVELGGEDAKIIFITGGTEQRMNGSCAGGTGAFIDQMATLLNISVQEMDELALKAEKIYPIASRCGVFAKSDIQPLINQGAKKEDISASIFQAVVDQTVSGLAQGRRIKGKVLFLGGPLYFLKGLRRAFVRTLKLSEENAVFPENAPCFMSIGAALHSAGVKPMPIDDIISAIEHAEGTDEVVTGEPLFKDRDEYAAFVKRHRATDLTFADIATYEGDAYLGIDSGSTTTKLILITPDCRIIYSHYQSNNGQPVDIIVEKLKEIYKLAGGRIHIRGSAVTGYGEDLIKAAIKADFGIVETVAHFKAALHFNPNVDFIIDIGGQDIKCFKIKNRAIDSIMLNEACSSGCGSFIQTFARAMGMEIDKFSQLGLFAPHPVELGSRCTVFMNSAVKQAQKEGSSVEDISAGLSISIVKNAIYKVIRAASADELGDNIVVQGGTFLNDAVLRAFERETGKNVIRPGIAGLMGAFGAALYAKEMSTGESTTMGGEELKNFSYKSASTVCRGCTSKCNVNIVTFADGSRYISGNKCERGAGRKPASADLDIYSYKQERLPQVITGANAGKVRVGLPLQLGMYEQLPIWAGFFESLGFEVVLSDKSSRELYFLGQHTVASDTACYPAKLIHGHIESLLDKGVDFIFMPCESYNLDEHDSVNHYNCPIVAYYPELLKANNERLNDDNFIMPYIDLNERENAVKRLCAALKKYNIKKKVAAAALKEGFARFDKYHADVRAKGAEIIKKAREQGKQIIILAGRPYHVDNEINHGINKLLTSLNLAVLSEDAVFDEADLVKVNVLNQWTYHARLYRAAEYACRHSDVNLVQLVSFGCGLDAITTDEVRSIMEKNGRLYTQIKIDEINNLGVVKIRLRSMLAAIEESKKNKPQSAN

SEQ ID NO: 606 - protein, 739 aa, Unknown
  Description of Unknown: uncultivated organism sequence
  Category: MG55 effectors
  Description: MG55-181 effector
MNIIKRDGSVVEYDADKIRTAIGKANAEVHKNEKASKEEIEEIIKYIQELNKKRMLVEDIQDIIEEKLMAYNHYQLAKAYITYRYTRSLVRQANTTDQSIKELIDGTSEYWNTENSNKNARVVTTQRDYLAGITSTDISRRFLIPKDVIEAHDEGLIHFHDMDYFAQNALHNCDLIDLEDMLQNGTCINGVMIEKPHRFITAMTIATQIITAVNSSQYGGVTITLTHLAPFVRDSYLRYVKKYEDRGFSKEDVEKYAKEDLQKEVVDGVQTFQYQINSMTTTNGQAPFLSVCMYLGETEEYKPELAMIIEEVLKQRTEGMKNEKGIYVTPAFPKLLYVLEEDNAKEGSKYFYLTKLAAKCTAKRLVPDYISEKKMKEYKIDSNGNGQCFPCMGCRSFLTPYVDPKTKKPKYYGRFNQGVVTINLPDVALSSGKDEEKFWKILDERLELCHKGLQTRYERLSHATSDVAPILWQNGALARLPKGASIKPLLHGGYSTISLGYAGLYECVKYMTGDSHTDEGKGEEFGLKVMKYLNDKCNQWKEAEDIDYSVYGTPLESTTYKFSKCLQKRFGKIEGITDRGYITNSYHVPVFEKIDAFKKLSIESKFQRLSPGGAISYIETPNLQNNLDAVMQVIQYIYDNIVYAELNTKSDYCQKCGFDGEILLDENLEWYCPNCGNKDHNTLNVARRTCGYIGTNFWNKGRTQEIKERVLHLENTDDENDKTKITKEEKKVRIANQQQ

SEQ ID NO: 607 - protein, 341 aa, Unknown
  Description of Unknown: uncultivated organism sequence
  Category: MG55 effectors
  Description: MG55-182 effector
MAATMKDIARRTGLGLATISSYFNGGNVREKNRIKIEEAIQELHYEVNEVARGLKTNATKTIGVVIPELNNTFCAEIITGMEDVLRSHGYATIVCDCRTDKRLERDAVEFLSRKRVDGIISMPVDAEGNHLKKFQKTGKPIVLIDRRIRELSCDSVLVDNEKAAEDAMRVFFQAGHRKIGIIGGPEEISTAQERLQGYRNAYEKENIPVRESLIYHGDYTIQGGVQGIEKLVADNPDMTAVFVTNYEMTMGAVIGMNELGLKIPEKLSMIGFDNLQFARACNPKLTIVAQPTQGIAGEVAGIMLKRLEGAASEETEPITEKLGAEIIMGKSVRVLDEKENL

SEQ ID NO: 608 - protein, 990 aa, Unknown
  Description of Unknown: uncultivated organism sequence
  Category: MG55 effectors
  Description: MG55-183 effector
MNVNVGIDIGSTTVKIVVVRDGEIIHKHYERHFSKVREKAVELVQNAREAIGPDATIRCAITGSAGLGVAKAADIDFVQEVFATRKAVGVHVPQADVVIELGGEDAKIVFLSGQLEERMNGSCAGGTGAFIDQMAVLLDVTPGELDELAQHAEQIYTIASRCGVFAKSDIQPLLNDGARKEDVAASIFQAVVNQTVAGLAQGREIKGDVLFLGGPLFFFKGLQKRFQETLKLDDMHAHFPALAPYAIAAGAAEYAKDTQKTYSVDSLLDALEHAAGAPVVANYLPPLFESEQQYEEFKRRHGVHDVMTQNVTMYEGDAYLGIDCGSTTTKLVLIGEDHQILFHHYQSNKGNPADVIREQLTKLYELCGDRVHIVSSAVTGYGEALIQHAFGVDFGLVETVAHFRAARHFCPDVDFIIDIGGQDIKCFKIRNKCIDNISLNEACSSGCGSFIETFARSMGYSIEEFCKLGLFAKHPIDLGSRCTVFMNSSVKQAQKDGAGIDAISAGLSVSVVKNALYKVIRAHSPDDLGQHIVVQGGTFLNDAILRSFEQEIGRDVTRPAIAGLMGAYGAALHAKDNRPAQTSLVGMDVLASFRHTVKSARCGLCENHCSLTINDFGGGRRFISGNRCERPLGGTKKADLPNLYQWKLEKLRSYGESSGKPMPNGRIGLPFGLNYYELLPFWTTFLRSLGFETVLSDVSTRDIYMQGQHSIPSDTVCYPAKLMHGHIENLLEKGVDAIFYPCMTYNLDEGRATNCYNCPVVAYYPELLHANVAALADFDFMMPYFELTDHKRFIQQAAKYFCGKYPQIKKKQVAAAAEAAFQELDNYYAEIRLEGQKAIAYADTHGLDIAVIAGRPYHVDPEINHGIDQLIASFGLVIVSEDAVWQLAEEPKVHVLNQWTYHSRMYGAAKYVTRKENAQLIQLVSFGCGIDAITTDEVRAICENGGKIYTQLKIDEISNLGAAKIRIRSMLAAVEEGRKLAEQQSNQHVG

SEQ ID NO: 609 - protein, 730 aa, Unknown
  Description of Unknown: uncultivated organism sequence
  Category: MG55 effectors
  Description: MG55-184 effector
MQVVKRDGRIVDFDKQKILAAIEKANAEVKPRERANKENIKEIVEYITGLDKKRILVEDIQDIIEEKLMEYGKYFLAKKYITYRYTRELVRKANTTDQSIKELIDGESEYWNNENSNKNARVVTTQRDYLAGITSTDITRRFLLPKDVVEAHDEGIIHFHDADYFAQNALTNCELINLDDMLQNGTIMNGVMIEKPHRFLTAMTIATQIILAVTSSTYGGATVSLTHLAPFVKSSYDRYYKKYQDRGLSEKQCKEYAEQDTKKEVSDGVQTFNYQVNSMTNTNGQAPFLSVCMYLGETKEYKKELAMIIEEFLKQRIEGFKNEKGVYITPAFPKLLYVLEEDNIVEGRPYYYLTELAAKCTAKRMVPDYISEKKMLELKIDKNGNGNCYPCMGCRSFLTPYVDEKTNKPKYYGRFNQGVVTINLVDVALSSEKDMDKFWKIFDERLELCHKALQVRHERLSKVTSDVAPILWQNGALARLKKGESIHSLLHGGYSTISLGYAGLYECVKYMTDHSHTDNGEGKDFGVQVMQKLNDKCKEWKAVEDIDYSVYGTPIESTTYKFSKCLKKRFGVIEGITDRDYITNSYHIPVFEEIDAFSKLSIESQFQQLSPGGAISYVETPNLQNNIEAVLQIIRFIYDNIMYAELNTKSDYCQECGFDGEILIDDNLEWYCPNCGNRNHDTLNVARRTCGYIGSQFWNKGRTQEIKERVLHIDNKDAEMPKREKTKAAV

SEQ ID NO: 610 - protein, 736 aa, Unknown
  Description of Unknown: uncultivated organism sequence
  Category: MG55 effectors
  Description: MG55-185 effector
MEVRTKVIKRNGSEVEFHIDKIVNAISKANHEVDEIHQMNSHQIAAIADNIAKEVSTAPHAVNVEDIQDMVETGIMEMRCYEVAQKYVRYRYKREISRKSNTTDDGILSLIDQANEEVKQENSNKNPVINSTQRDYMAGEVSKDLTKRVLLPEDIVRAHEEGIIHFHDSDYFAQREHNCDLINLEDMLQNGTVISETMIEAPHSFFTACNVTTQIVAQVASNQYGGQSFTLSHLAPFVDVSRQKIREQVIEERKECGESVDDEIVAKLVETRLDREIQNGIQTIQYQLITLMTCNGQAPFVTMFMYLDEVPEGQTRNDLAKIIREVLKQRIKGVKNEKGVWITPAFPKIIYVLDEDNVTPDSPFYDLTVLAAECTAKRMVPDYISAKIMKRDKGDVYPCMGCRSFLTPDDGTCNKENIANVGGYVAGKHKYYGRFNQGVVTINLVDVACSSDGNMERFWEILEERLELCHRALRCRHERLMGTSSDVAPILWQYGALARLKKGEPIDKLLFGNYSTISLGYAGLYEMTMRMLGVSHTDPNGEEFALKVMQKLNDKCAEWRAAENISYSLYGTPMESTTYKFAKCLQKRFGIIPNVTDHNYITNSYHINVREKIDAFSKLKFESKFQKLSPGGAISYVEVPNMQQNIPAVISVMKFIYDNIMYAELNTKSDYCEVCGYDGEIKIVEEESGKLVWECPKCGNRDQDKMSVARRTCGYIGTQFWNQGRTQEIRDRVLHL

SEQ ID NO: 611 - protein, 983 aa, Unknown
  Description of Unknown: uncultivated organism sequence
  Category: MG55 effectors
  Description: MG55-186 effector
MALRIGIDIGSTTVKVVVLDAQNKLLFRSYERHYSKTRERTCETLRGLRGLLGGQQVQLLITGSAGLGVAKAAGLDFVQEVYATAAAVREFIPGTDAVIELGGEDAKIIFFGNTLEERMNGSCAGGTGAFIDQMATLLNVSVDELDELSLRHEKIYPIASRCGVFAKSDIQPILNQGGRKEDVAASIFQAVVDQTVAGLTQGRELKGTIVFLGGPLHFLAGLRQRFVETLHLDQDHAIFPEDGDCFAAIGAALCTEDSQPRPFEELLDLLEHAATVSTPVDTMDPLFTSQADYEAFSARHQAMAVPTVDLATYTGPAYLGIDAGSTTTKMVLIDPDCNLLYSFYHSNQGNPVSIVLPQLREIYAQCGDRVTIQGAAVTGYGEDLIKNAFSCDLGLVETVAHLNAARHFTPDVDFIIDIGGQDMKCFKIRNGAVDSILLNEACSSGCGSFIETFAKALGYTIADFSKMGLFARHPVNLGSRCTVFMNSSVKQAQKDGASVEDISAGLSISVVKNAIYKVIRAASADDLGQHIVVQGGTFLNDAVLRSFELEIGREVTRPTISGMMGAYGAALAAKDAGLTQSTLLSAEALASFTHEARPATCKLCTNHCSLTINRFDGGRKFISGNRCSRPLGQEKVDIPDLLKFKYQYLRSLQGKGEGDGSRGKIGIPFGLNMYENLPFWFTLFTTLNFEVVLSPESTRSLYLKGQQTIPSDTVCYPAKLLHGHIMALLEEGVDTIFYPCMSYNFDEHLSDNHYNCPVVAYYPDLLGVNIPALEDIKYLHPNLGLHRPKDFEKKGAQLLETEFGIPKRASVKAIRKAYAAYEDFRRLVQKKGEEYISFARETGRKILVVAGRPYHMDPEINHGINDLITSFGFVLITEDAVFQHMDKQPRRVLNQWTYHARMYNAARYVCTQPDMAFIQLVSFGCGVDAITTDELRSILEEAGELYTQLKIDDISNLGAVKIRIRSLMAALDARDAQNQKGGQ

SEQ ID NO: 612 - protein, 730 aa, Unknown
  Description of Unknown: uncultivated organism sequence
  Category: MG55 effectors
  Description: MG55-187 effector
MQVVKRDGRIVDFDKQKILAAIEKANAEVKPRERANKENIKEIVEYITGLDKKRILVEDIQDIIEEKLMEYGKYFLAKKYITYRYTRELVRKANTTDQSIKELIDGESEYWNNENSNKNARVVTTQRDYLAGITSTDITRRFLLPKDVVEAHDEGIIHFHDADYFAQNALTNCELINLDDMLQNGTIMNGVMIEKPHRFLTAMTIATQIILAVTSSTYGGATVSLTHLAPFVKSSYDRYYKKYQDRGLSEKQCKEYAEQDTKKEVSDGVQTFNYQVNSMTNTNGQAPFLSVCMYLGETKEYKKELAMIIEEFLKQRMEGFKNEKGVYITPAFPKLLYVLEEDNIVEGRPYYYLTELAAKCTAKRMVPDYISEKKMLELKIDKNGNGNCYPCMGCRSFLTPYVDEKTNKPKYYGRFNQGVVTINLVDVALSSEKDMDKFWKIFDERLELCHKALQVRHERLSKVTSDVAPILWQNGALARLKKGESIHSLLHGGYSTISLGYAGLYECVKYMTDHSHTDNGEGKDFGVQVMQKLNDKCKEWKAVEDIDYSVYGTPIESTTYKFSKCLKKRFGVIEGITDRDYITNSYHIPVFEEIDAFSKLSIESQFQQLSPGGAISYVETPNLQNNIEAVLQIIRFIYDNIMYAELNTKSDYCQECGFDGEILIDDNLEWYCPNCGNRNHDTLNVARRTCGYIGSQFWNKGRTQEIKERVLHIDNKDAEMPKREKTKAAV

SEQ ID NO: 613 - protein, 1438 aa, Unknown
  Description of Unknown: uncultivated organism sequence
  Category: MG55 effectors
  Description: MG55-188 effector
MNKILHVGLDVGSTTVKIIVMDDSQNLIYENYQRHFSDTKNTVCQVLSDFANKYPDYVYTIALTGSGAMSAAKFLDLPFIQEVVACKRAVEKYIPQTDVVIELGGEDAKIIYFGKSIEQRMNGTCAGGTGAFIDQMASLLNTDAAGLNELAKNYKMIYPIASRCGVFAKTDVQPLINEGANKEDIAASIFQAVVNQTISGLACGRPIRGNIAFLGGPLNYLSELRNRFIETLNLDDNSAIIPQDAHLLVAKGAALDSVNNSAISNEKLKAKIEVLKASHDTTSTPLAPLFVTNAEYEAFKERHDKDTVPKKDLKTYKGDCFIGIDAGSTTTKLVVTDCDDNLLYSLYQSNEGNPLKSVINMLKELYKIIPQTATIRYSGVTGYGEQLIQSALNVDLNEIETIAHYTAAKRFMPNVTSIVDIGGQDMKYIKIKNGTINNIMLNEACSSGCGSFIETFAKSLNISINDFVESALDSRSPVDLGSRCTVFMNSKIKQAQKEGATVGDISAGLSYSVIKNAIQKVMKVRDISTLGDHIVVQGGTFYNNAVLRAFELIVGKDVVRPDIAGLMGAYGVAILARKQYEANLDMEYISKLSTLDEIENLQIETSHVRCGGCENHCLLTINKFNNGQKHISGNRCEKGAGITSKSKDLPNIYKYKNERLFSYKPLSEKSAIRGTIGIPRVLNMYEDYPFWFTFLTNLGFRVIISEKSTRKTYEKGMESMPSESVCYPAKLAHGHIMSLINQGIKTIFYPCIPYSRKEYKQADNHYNCPIVISYSEVLKNNVEELKNVKFLNPFLPFEPKKLAEAILSLPEFDEYHFTKKELIKAAQEAEKEYQNFKTDIRNKGQEALNYMKENNIRGIVLAGRPYHVDPEINHGIDTLITSLGLCVLSEDSISNQVTLDKKLRVVNQWVYHSRLYAAADFVGHHANLELVQLNSFGCGVDAVTTDQVEEILSSYDKMYTLIKIDEVNNLGAVRIRIRSLLASMNKRIEKNSNNSDSLGNYELQRKIFTKEMRNDYTILIPQMAPIHFELLESAVQACGYNVHLLRECTPHTVEVGLKYVNNDACYPSILTTGQMIEALESGKYDLNKTALIMSQTGGGCRATNYIGFIRKALKDAGYSDIPVISFNVVGMEKMPGFKLSPKMAEGLLKSVVYGDLLQKMLTKNRAYEKNKGVTQKKYEYWLEKCKKLVSKSSLKEFNHSIYDMVNDFEKIELDTTVEKPKVGIVGEVLIKYHPFGNNFVADKLEQEGAEVILPDFMGFIKFIATHKITFNQLIKTDSGKAKIFKFAIKLIDLLEKNEINALKNSKKGYLLPCNIFELEENVKDILSIGNQTGEGWFLTAEMVEYMQHDIPNIVCVQPFACLPNHVVGKGVIKTIRDKYPEANIAAIDYDPGASEANQTNRIKLLMAVAKDNLKIKNSKNKLLLKENNKINSKNKIYQ

SEQ ID NO: 614 - protein, 726 aa, Unknown
  Description of Unknown: uncultivated organism sequence
  Category: MG55 effectors
  Description: MG55-189 effector
MKIIKRSGSEVTFDISKIMDAVSKANMEVVHSERLSEEQIETISNNVESICKEMNRSLSVEEIQDLVENQIMNFRAFSVARKYITYRYKRALVRKSNSTDKQILSLLECNNEEVKQENSNKNPTVNSVQRDYMAGEVSKDITKRFLLPPDIVDAHEQGLIHFHDADYFAQHMHNCCLVNLEDMLQNGTVISETMIEKPHSFSTACNIATQAIAQIASSQYGGQSISLAHLAPFVQVSREKFIGQVRDEFEKTGIDASEEKIREVAELRVKDEIKRGVQMIQYQVITLMTTNGQAPFVTVFMYLDEVPEGQTRDDLALVTEEVLRQRMQGVKNEQGVYITPAFPKLIYVLEEDNIHEDSKYWYLTEIAAQCTAKRMVPDYISEKKMKELKVDANGNGQCFPCMGCRSFLTPYIDPETGKPKYYGRFNQGVVTLNLVDVACSSGKDMDKFWSILNERLDLCKRALMCRHYRLKGTPSDVAPILWQNGALARLKKGETIDKLLYGGYSTISLGYAGLCECTYYMKGVTHTNPEGTEFALKVMQYLNDTCKRWAAETNIDFSLYGTPLESTTYKFSKCLQKRFGKIAGVTDKNYITNSYHVHVTEQINAFEKLKFESQFQKLSPGGAISYVEVPDMQNNIPAVLKVMQYIYDNIMYAELNTKSDYCQECGYTGQIQIITDDDGKLIWECPNCGNRNQDKMNVARRTCGYIGTQFWNQGRTQEIKERVLHL

SEQ ID NO: 615 - protein, 708 aa, Unknown
  Description of Unknown: uncultivated organism sequence
  Category: MG55 effectors
  Description: MG55-190 effector
MKVIKRDGSTADFDSSKIIVAIQKANQVVEPEDRIDQERIEAIAHYVESKNRMRLLVEDIQDMVEHQLMDEGKFNLAKSYIIYRYTRALVRKANTTDESILSLIRNSNKDVMEENSNKNAVMASTQRDLIAGEVSKDLTRRLILPEKISKAHDEGAIHFHDADYFVQPIFNCCLINVGDMLDNGTVMNGKLIESPKSFQVACTVMTQIIASVASSQYGGQSVDIRHLGKYLRRSYEKFKLTIKAEVGDSVADEVVERLTKRRLQDELRSGVQTIQYQINTLMTTNGQSPFVTIFLNLQADDEYLEENAMIVEEILRQRLEGIKNDKGVFVTPAFPKLVYVLDEHNCLKGGKYDYITKLAVKCSAKRLYPDYISAKKMRENYEGNVFAPMGCRSFLAAWKDDEGNYKFEGRFNQGVVSLNLPQVAILAHGDEEKFWPLLDERLQLCYEALMCRHNSLKGIRSDVSPVHWQYGAIARLEKGEVIDKYLEKGYSTISLGYIGLYEMTKLMKDVSHTTPEGEEFALRVMKYLRAACDKWKKETGLGFALYGTPAESLCYRFARIDKERFGTIVDVTDKGYYTNSYHVDVREDIDAFSKFNFESQFQRISSGGAISYVEIPNMRHNLEAMEDVVRFIYDNIQYAEFNTKSDYCHVCGFDGEIIINDDLEWECPNCGNKNQTLMNVTRRTCGYLGENFWNVGKTKEIKSRVLHL

SEQ ID NO: 616 - protein, 754 aa, Unknown
  Description of Unknown: uncultivated organism sequence
  Category: MG55 effectors
  Description: MG55-191 effector
MKVIKRDGTIVDYDREKIRVAIQKANNEVSKKYRATDEEINEIIAYIEELKKSRILVEDIQDIIEEKLMSLDKYQLAKEYITYRYTRALVRKANTTDQSIKELIEGESEYWNNENSNKNAKVVTTQRDYLAGITSTDITRRFLLPEDVVKAHDEGIIHFHDADYFAQNALHNCDLINLEDMLQNGTNINGVMIEKPHKFLTAMTIATQIITAVTSSQYGGATVTMTHLAPFVRDSYNIYLKKYRDRKLPEDQVVKFAKEDLAKEISDGVQTFQYQINSMTTTNGQSPFLSVCLYLGETDEYKEELAMIIEEVLKQRILGMKNEKGVYITPAFPKLLYVLEEDNIHEDSKYWYLTKLAAKCTAKRMVPDYISEKKMLELKIDKNGNGNCYPCMGCRSFLTPYVDPKTNKPKYYGRFNQGVVTINLVDVALSSGGDFKKFWKIYDERLELCHKALQIRHERLAKATSDVAPILWQYGALARLKKGESIHQLLHGGYSTISLGYAGLYECVKYMTGHSHTDNGKGKDFGLEVMKKLNDKCKEWKAAEDIDYSVYGTPIESTTYKFAKCLQKRFGKIKGITDKNYITNSYHVPVFEEIDAFSKLKLESQFQQLSPGGAISYVETPNLQENLEVVLQLIKFIYDNIMYAELNTKSDYCQKCGYDGEILIDDNLEWYCPNCGNRDHSTLNVARRTCGYIGSNFWNKGRTQEIKERVLHIDNKDDVDDDCDCDDCKHQHEEENKEENVENKVQKNELVLTR

SEQ ID NO: 617 - protein, 978 aa, Unknown
  Description of Unknown: uncultivated organism sequence
  Category: MG55 effectors
  Description: MG55-192 effector
MAKFMGIDVGSTTVKVCVLSESLEILYTSYERHFARVKECVLGQLSVVKEKFGGDFRVCITGSAGLGLAERSGIPFVQEVQAAFTAIRQYYPDADAAVELGGEDAKIIFITGGTEQRMNGSCAGGTGAFIDQMATLLDISVSEMDALSLRAERVYPIASRCGVFAKSDIQPLLNQGARREDIAASIFQAVVDQTVAGLAQGRRIKGKVLFLGGPLYFLQGLRRAFRQTLGLDEEHAVFPENAPSFMAIGAALYAAGTDAMPLAEIVRRIRDARGSDDIVTGEPLFTDRAEYDAFVARHKAHDLAFEDIRTYRGDAYLGIDSGSTTTKLVLITPDCKLLYQHYQSNNGQPLDIVVERLREIYALSEGRVRIAGAATTGYGEDLIKAAIRADFGIVETVAHFKAALHFDPKVDFIIDIGGQDIKCFKIKNGAIDNIMLNEACSSGCGSFIQTFARAMGMEIDEFSKLGLFAKHPVELGSRCTVFMNSSVKQAQKEGAGIEDISAGLSASIVKNAIYKVIRAKTPDELGSNILVQGGTFLNDAVLRCFELETGKQVVRPGIAGLMGAFGAALYAKENVRGESTVLDAQALRTFAYTTRSHVCKGCTSHCNVNVIGFSDGRKFISGNKCEKGAGLKPHSDELDIYHYKYERLLQCAEGARGTRGKVGLPVVLGFYEQLPLWAGFFEACGFEVLFSERSSRSLYFRGQHTVASDTVCYPAKLAHGHIESLLDAGADFIFYPCESYNLDEHDSTNHYNCPVVAYYPELLKANNERLTQDNFIMPYLDLNDERTTVRALHRALKKFGLTPRLIRKGLAEGFRRLALFHADVERKGEEIAAAARAERRPIVVLAGRPYHVDPEINHGIGKLLTSLGVAVLSEDAVFRKGRQVLVNVLNQWTYHARLYRAAEYVAENEDMELVQLVSFGCGIDAITTDEVRALLESRGKLYTQIKIDEINNLGVVKIRLRSMIAAVEEQKRRNHEDR

SEQ ID NO: 618 - protein, 723 aa, Unknown
  Description of Unknown: uncultivated organism sequence
  Category: MG55 effectors
  Description: MG55-193 effector
MKIIKRSGQEVKFDINKIVEAIKKANLDANEKNQLSEEVIFKCAKNVEKECKNKGRILTVEEVQDLVEDQLMSVDAFDVARKYITYRYRRALARKANTTDQQILTLLECNNQNVKEENSNKNPTVNSVQRDYMAGEVSKDITKRILLPKDIVDAHEQGIIHFHDADYFAQHMHNCDLVNLEDMLQNGTVISGTLIEKPKSFSTACNIATQIIAQVASNQYGGQSISITHLAPFVEISRQKITKDVKEELKDLDISEEKIQEIIHKRLLDEIKKGVQTIQYQIVTLLTTNGQAPFVTIFMYLNEARSEQEKKDIALITEEILKQRYQGVKNEKGVWITPAFPKLIYCLEDDNVEPGSPYYYLTELAAKCTAKRMVPDYISEKIMLQLKVDSKGQGHCYTCMGCRSFLTPYINDKGEPQYYGRFNQGVVTINLVDVALSSNKDVKQFWKIFDERLDLCYRALMERHKRLLGTKSDVAPILWQYGALARLNKGETIDKLLFNGYSTISLGYAGLYECVYYMTGKSHTDPEATPFALEIMQHMNDACKKWKEKEHIDFSLYGTPLESTTYKFAKCLQKRFGIIKGVTDKNYITNSYHIVVSEHIDAFSKLAFESQFQKLSPGGAISYVEVPNMENNIPAVMNVIKFIYDHIMYAELNTKSDYCQCCGYTGEIQIKEDEDGKLFWECPQCGNRDQNKMNVARRTCGYIGSQFWNQGRTQEIRDRVLHL

SEQ ID NO: 619 - protein, 720 aa, Unknown
  Description of Unknown: uncultivated organism sequence
  Category: MG55 effectors
  Description: MG55-194 effector
MKIIKRSGAEAVFDISKIIIAINKANHEVVEAERLTADQIKEIAQYIEDSCKDANHALNVEDIQDLVEDQLMDKRAFSVARKYITYRYKRALVRKSNSTDEQILSLIECNNEEVKQENSNKDSTVNSVQRDYMAGEVSKDITRRFLLPEDIVEAHEQGIIHFHDADYFAQHMHNCDLVNLEDMLQNGTVISGTRIDKPHSFSTACNIATQIIAQVASSQYGGQSISLAHLVPFVQISREKIHAELVQTLKESDVELSEEKINSIVERRLHAEIERGVQVIQYQVVTLMTTNGQSPFVTVFMYLNEAKNEQEKKDLAMIIEEVLDQRYQGVKNEDGVWITPAFPKLIYVLEEDNIHEDSEYYYLTKKAAKCTAKRMVPDYISEKKMKELKDGNCYTCMGCRSFLTVYHDEDGKPKFYGRFNQGVVTLNLVDLACSSGGDFEKFWKLFDERLDLCYRALMARHNRLKGTPSDVAPILWQYGALARLKKGETIDKLLYGGYSTISLGYAGLCECTRYMTGKPHTDPAATPFALKVMQRLNDACKEWKEKENIDFSVYGTPLESTTYKFAKCLQKRFGVIPGVTDKNYITNSYHVHVTENIDAFTKLKFESQFQALSPGGAISYVEVPNMQDNLEAVLSVMKFIYENIMYAELNTKSDYCQVCGYDGEIQIVKDDDGKLVWECPHCHNRDQDKMNVARRTCGYIGSQFWNQGRTQEIKERVLHL

SEQ ID NO: 620 - protein, 720 aa, Unknown
  Description of Unknown: uncultivated organism sequence
  Category: MG55 effectors
  Description: MG55-195 effector
MKIIKRSGAEAVFDISKIIIAINKANHEVVEAERLTADQIKAIAQYIEDSCKDANHALNVEDIQDLVEDQLMDKRAFSVARKYITYRYKRALVRKSNSTDEQILSLIECNNEEVKQENSNKDSTVNSVQRDYMAGEVSKDITRRFLLPEDIVEAHEQGIIHFHDADYFAQHMHNCDLVNLEDMLQNGTVISGTRIDKPHSFSTACNIATQIIAQVASSQYGGQRISLAHLVPFVQISREKIHAELVQTLKESDVELSEEKINSIVERRLHAEIERGVQVIQYQVVTLMTTNGQSPFVTVFMYLNEAKNEQEKKDLAMIIEEVLDQRYQGVKNEDGVWITPAFPKLIYVLEEDNIHEDSEYYYLTKKAAKCTAKRMVPDYISEKKMKELKDGNCYTCMGCRSFLTVYHDEDGKPKFYGRFNQGVVTLNLVDLACSSGGDFEKFWKLFDERLDLCYRALMARHNRLKGTPSDVAPILWQYGALARLKKGETIDKLLYGGYSTISLGYAGLCECTRYMTGKPHTDPAATPFALKVMQRLNDACKEWKEKENIDFSVYGTPLESTTYKFAKCLQKRFGVIPGVTDKNYITNSYHVHVTENIDAFTKLKFESQFQALSPGGAISYVEVPNMQDNLDAVLSVMKFIYENIMYAELNTKSDYCQVCGYDGEIQIVKDDDGKLVWECPHCHNRDQDKMNVARRTCGYIGSQFWNQGRTQEIKERVLHL

SEQ ID NO: 621 - protein, 720 aa, Unknown
  Description of Unknown: uncultivated organism sequence
  Category: MG55 effectors
  Description: MG55-196 effector
MKIIKRSGAEAVFDISKIIIAINKANHEVVEAERLTADQIKAIAQYIEDSCKDANHALNVEDIQDLVEDQLMDKRAFSVARKYITYRYKRALVRKSNSTDEQILSLIECNNEEVKQENSNKDSTVNSVQRDYMAGEVSKDITRRFLLPEDIVEAHEQGIIHFHDADYFAQHMHNCDLVNLEDMLQNGTVISGTRIEKPHSFSTACNIATQIIAQVASSQYGGQSISLAHLVPFVQISREKIHAELVQTLKESDVELSEEKINSIVERRLHAEIERGVQVIQYQVVTLMTTNGQSPFVTVFMYLNEAKNEQEKKDLAMIIEEVLDQRYQGVKNEDGVWITPAFPKLIYVLEEDNIHEDSEYYYLTKKAAKCTAKRMVPDYISEKKMKELKDGNCYTCMGCRSFLTVYHDEDGKPKFYGRFNQGVVTLNLVDLACSSGGDFEKFWKLFDERLDLCYRALMARHNRLKGTPSDVAPILWQYGALARLKKGETIDKLLYGGYSTISLGYAGLCECTRYMTGKPHTDPAATPFALKVMQRLNDACKEWKEKENIDFSVYGTPLESTTYKFAKCLQKRFGVIPGVTDKNYITNSYHVHVTENIDAFTKLKFESQFQALSPGGAISYVEVPNMQDNLDAVLSVMKFIYENIMYAELNTKSDYCQVCGYDGEIQIVKDDDGKLVWECPHCHNRDQDKMNVARRTCGYIGSQFWNQGRTQEIKERVLHL

SEQ ID NO: 622 - protein, 720 aa, Unknown
  Description of Unknown: uncultivated organism sequence
  Category: MG55 effectors
  Description: MG55-197 effector
MKIIKRSGAEAVFDISKIIIAINKANHEVVEAERLTADQIKAIAQYIEDSCKDANHALNVEDIQDLVEEQLMDKRAFSVARKYITYRYKRALVRKSNSTDEQILSLIECNNEEVKQENSNKDSTVNSVQRDYMAGEVSKDITRRFLLPEDIVEAHEQGIIHFHDADYFAQHMHNCDLVNLEDMLQNGTVISGTRIDKPHSFSTACNIATQIIAQVASSQYGGQSISLAHLVPFVQISREKIHAELVQTLKESDVELSEEKINSIVERRLHAEIERGVQVIQYQVVTLMTTNGQSPFVTVFMYLNEAKNEQEKKDLAMIIEEVLDQRYQGVKNEDGVWITPAFPKLIYVLEEDNIHEDSEYYYLTKKAAKCTAKRMVPDYISEKKMKELKDGNCYTCMGCRSFLTVYHDEDGKPKFYGRFNQGVVTLNLVDLACSSGGDFEKFWKLFDERLDLCYRALMARHNRLKGTPSDVAPILWQYGALARLKKGETIDKLLYGGYSTISLGYAGLCECTRYMTGKPHTDPAATPFALKVMQRLNDACKEWKEKENIDFSVYGTPLESTTYKFAKCLQKRFGVIPGVTDKNYITNSYHVHVTENIDAFTKLKFESQFQALSPGGAISYVEVPNMQDNLDAVLSVMKFIYENIMYAELNTKSDYCQVCGYDGEIQIVKDDDGKLVWECPHCHNRDQDKMNVARRTCGYIGSQFWNQGRTQEIKERVLHL

SEQ ID NO: 623 - protein, 610 aa, Unknown
  Description of Unknown: uncultivated organism sequence
  Category: MG55 effectors
  Description: MG55-198 effector
MEENSNKNATIASTQRDLIAGEVSKDFAKRDLLPKKIVEAHENAVLHFHDMDYFLQPIFNCCLLNISDMLDNGTVINGKMIESPKSFQVACTVMTQIIAAVASGEYGGQSVKISHLAKYLANDYKKSLKKVREADGTLTAEQVEKIAKAETQEHLKSGIQTIQYQINTLMTTNGQTPFVTLFLQLDESLGYMDEQAAVIEEILKQRIVGMKNEAGVYVTPPFPKLIYVLDECNCLKGGKYDWLTKLAVKCSAKRMYPDYISAKKMRENYEGEVFSCMGCRSFLSPWKDENGNYKWEGRFNQGVVSLNLPQIGILSQSENGPDMYKFWQLMEERTSLCFEALMCRHKALLGTKSDISPIHWQYGGIARLKKGEVIDPLLKDGYSTISLGYIGLYEVTKLMTGKSHTTKEGEEFALKVMRYLKNKCNMWKDMTGIGFGLYGTPAESLCYRFARIDKEKFGEIKDITDKGYYTNSYHVDVREKINAFDKLSFESQFQQISSGGAISYIEIPNMENNLEVLEKVVKFIYENIQYAEFNTKSDYCMNCGFDGEIILNDENEWECPQCGNKDHSKMSVTRRTCGYLGSQFWNKGKTLEIKQRVVHFDIPVVENGGN

SEQ ID NO: 624 - protein, 1005 aa, Unknown
  Description of Unknown: uncultivated organism sequence
  Category: MG55 effectors
  Description: MG55-199 effector
MSEIKLQQKAAYTLGIDVGSTTVKTVILDADHHVLHSTYQRHFSKVKEAVSEQLQAIIKEHPATLFSVHMTGSAGLGLATAAKIPFVQEVHAAFLAVKERYPKADAVIELGGEDAKIIFLTGGVEQRMNGSCAGGTGAFIDQMATLLDVTVDELDQMALQADRTYPIAARCGVFAKSDIQPLLNQGAKRENVAASIYQAVVDQTVSGLAQGRKIQGHVLFLGGPLSFLQGLRNAFMQTLHLDAEHAIFPVDGRTFVAYGCALAAENSADKPVTGEALLKQIESAETNHTVIADKPLFGYQEEYDRFRERHAQNDVVHGDLHTYQGNAYLGVDAGSTTTKVALIGEDNSLLYSFYETNKGQPLECVKRALETLYQKKNPNLKICGSAVTGYGEEMLKAGLGIDFGIVETVAHFRAAEFFCPDVDFIIDIGGQDIKCFQIKNGAIDSIMLNEACSSGCGSFIQAFANALGYDVAEFAKLGLFAERPVDLGSRCTVFMNSSVKQAQKDGATVADISAGLSGSIVKNAIYKVIRAKSPEDLGKHIVVQGGTFLNDAVLRCFEREMGRDVIRPAISGLMGAFGAAIYAKEHTSGSSTLLSLMDLHTLTYRTQNTTCNGCTAHCNLQILRFSNGKRFIAGNRCERGAGVSKKDQIPNLVDWKYETLRSLTDRQPEQPKATVGLPMALHYYDQLPLWYTFFTDLGFAVKLSEESTRKTYYKGQSTIPSDTVCYPAKLAHGHIESLLEQNVDFIFYPCMTYNLDEGDSDNHYNCPVVAYYPELLLANNEKLNEQNFLHPFLDLNRRKHLITVLYACLSDYATKKEIAAALEHGFAALEQYRNQIAQTAQEIVRQARAAGKTILVLAGRPYHIDPEINHGIHKLISSLGMAVITEDSIAGLAHTPELQALNQWTYHSRMYRAAQYVTTQPDFQLVQLVSFGCGIDAITTDEVRRILEQSGKLYTQLKIDEISNLGAAKIRLRSLKAAIGADVPPKPAAAPSETAPKNEKEPVSV

SEQ ID NO: 625 - protein, 709 aa, Unknown
  Description of Unknown: uncultivated organism sequence
  Category: MG55 effectors
  Description: MG55-200 effector
MIKVQKRDGRIVNYDREKIVRAIQKANAEVDAAERAGEALIDGILDDVEKECEDVVHVESIQDMIESRLVKQNKYTLSKKYMIYRYQRALLRKANTTDESILKLIRNENKELAEENSNKNTILASTQRDYIAGEVSRDLTKRMLLPERISMAHEQGAIHFHDADYFVQPIFNCCLINIADMLDNGTVMNEKMIESPKSFQVACTVMTQIIAAVASNQYGGQSVDMRHLGKYLRKSSNKFHRQIREEFGDSLDNEAVEKMARIRLRDELKSGVQTIQYQINTLMTTNGQAPFVTLFLRLDDEDEYIDENALIVEEILRQRLEGIKNEAGVYVTPAFPKLIYVLDENNCLKGGKYDYITKLAVRCSSKRMYPDYISAKKMKENYEGNVFSCMGCRSFLSPWKDENGEYKFEGRFNQGVVSLNLPQIGILAKGDEEVFWKLLDERLAICFEALMCRHKALEGTLSDVSPIHWQYGAIARLPKGAKIDPLLHDGYSTISLGYIGIYEMTKLMKGVSHTDPAGEEFALRVMNRMKEAVECWKEETGLGFGLYGTPAESLCYRFARIDRERFGLIENVTDKGYYTNSYHVDVREKIDAFSKFTFESQFQKISSGGAISYVEVPNMAKNLEAMEEVVKFIYDNIQYAEFNTKSDYCQECGFDGEIIINEDMEWECPQCHNKNKDKMNVTRRTCGYLGENFWNAGKTKEIKSRVLHL

SEQ ID NO: 626 - protein, 972 aa, Unknown
  Description of Unknown: uncultivated organism sequence
  Category: MG55 effectors
  Description: MG55-201 effector
MQIGLDIGSTTIKIAVLDDAGQLQFSKYERHYSQIAEKMQQLLAELHVRMPLLKTARLAISGSAGIGIAESCGLQFAQEVFAEKICTERLNPGTEAVIELGGEDAKLLFLGRHFDARMNDSCAGGTGAFIDQMASLLDVATEDMNALAQQSSTRYTIASRCGVFAKSDIQPLLNQGAAKADLAASIFDAVASQAVTGLAKGRPITGKVLYLGGPLTFMSELRHSFDKILQIEGSCPENSLYYVAMGAAFCAENKVDLTELPAKLAAVGAQRDFDHLEPLFAGQAEYDEFMERHSKERIESGDISAADAAYIGIDAGSTTIKIAVISPSGQLLDSFYQSNKGNPVIAIKEYLQNFYIKYPHCRILGSAVTGYGEDLIRNGFSVDYGIVETMAHFIAAKTLQPDVDFILDIGGQDIKCLKIHNGCIDNIFLNEACSSGCGSFLQTFAEILGYSAEEFARIGLFADKPVNLGSRCTVFMNSSVKQAQKDGATVANISAGLSLSIVKNALYKVIRPGSKESIGKHIVVQGGTFLNDCVLRAFEKEMGLKVVRPNIAGLMGAYGAAIYARSRHQETGHVSTLADAAALKDFFHEVKAVTCGLCSNHCHLTVNTFASGKRFISGNRCERPVTHCAPDDTFNLYRQKLQLLEGLKGVPGKRGRIGLPMGLNMYELLPFWHAFFTRLGFEVITSPIYDKTIYQKGQNTIPSDTVCYPAKLMHGHIKWLLEHGINTIFYPCMTYNVDENSAENCYNCPVVAYYPEVLHANMHDLDNATYIFDYLGLGHKKVLLKKLQQICKEHFPDIGSSELKAALQEAYAAYNKFEAQVKELGQTIINTARSQHKPIVVLAGRPYHIDPKVNHSIDRLITTMGAALVSEDAVSSHISMQELNDDLQVLNQWTYHSRLYAAAKYVSRSSDMYMVHLVSFGCGCDAITADECRRILEEHGQIYTQIKIDDIDNLGAAKIRLRSLFAAAGLES

SEQ ID NO: 627 - protein, 988 aa, Unknown
  Description of Unknown: uncultivated organism sequence
  Category: MG55 effectors
  Description: MG55-202 effector
MSLRIGIDIGSTTVKVVVLDEQNKLLFRSYERHYSKTRERACETLRSISDMLAGRQVKMVITGSAGLGVANASGIDFVQEVYATAAAVNTYIPGTDAVIELGGEDAKIIFFGGALEERMNGSCAGGTGAFIDQMATLMNVSVDELDALSLKHEKIYPIASRCGVFAKSDIQPILNQGGRKEDVAASIFQAVVDQTVAGLTQGRELKGKIVFLGGPLHFLMGLRERFVETLKLDEEHAIFPEDGDCFAAMGAALCSSDYDTILFEDALKKLEESVDTTTLVDTMPPLFQDVAEYGAFCARHNAKRPPEVDIKTYEGPAWLGIDAGSTTTKLALITGDGGLLYTYYHSNLGNPVAIVLEQLREIYAQCGDRIEIRGVAVTGYGEDLIKNAFSCDLGLVETMAHYKAAAHFEPDVDFIIDIGGQDMKCFKIRNGAVDSIMLNEACSSGCGSFIETFAKALGYTIADFAKLGLFAQKPVNLGSRCTVFMNSSVKQAQKDGASVEEISAGLSISIVKNAIYKVIRAASADDLGKHIVVQGGTFHNDAVLRAFEQELGRNVTRPTIAGIMGAFGAALAARDLRLNASGLLSEAALQSFTHSAKPVTCGLCTNHCALTVNQFDGGRKFISGNRCSRPLGKEKVELPDLMNYKYKKLRAMEGKGEGTGVRGRMGIPFGLNMYENLPFWFTFFTKLNFEVVLSPESSRKLYIKGQHTIPSDTVCYPAKLLHGHVEALVEEGVDAIWYPCMSYNNDEGIGDNHFNCPVVAYYPELLAANVPALKQTKFLNPYVGLWRHKDFTKRIAKMMEEEFSIPKKESVAAAKAAYAAYDDYVHDVRATGKKYIEYARAMNMPILVVCGRPYHIDPEINHGINDLITSFGFVLITEDALSYLEGYAPRKVLNQWTFQSRMYNAARYVCTQPDMQVVQLVSFGCGTDAITTDELRSILEEGGKLYTQLKIDDISNLGAVRIRIRSLIAAIDARKQQRPQNGQSAANA

SEQ ID NO: 628 - protein, 733 aa, Unknown
  Description of Unknown: uncultivated organism sequence
  Category: MG55 effectors
  Description: MG55-203 effector
MKIIKRNGQEADFDLDRIVKAVTAANNEVPEYQRMTEMEILCVADNSKRQIDEFHYAVSVEEIQDIVERQIMKFAPVVAQTYIRYRHKRELARQANTTDAAILSLLDYENEEVKQENSNKNPVVASVQRDYMAGEVSKDLSRRVILPKDVVEAHDKGIIHFHDMDYFSQHIFNCCLINLEDMLQNGTVISGVQIDKPKSFQTACTVATQIISTVASNQYGGQSVSLSHLAPFVEVSRQKWQERVRETLDGVAPEAMINELAENLLYKECEAGMQTIQYQVITLMTTNGQAPFITVEMYLGEVKDPQTKKDLAMLIEIMLKQRILGVKNEKGIYITPAFPKIVYVLEEDNASEGSPYWYLTELAAKCTAKRMVPDYVSEKIMLQYKVDQNGEGHCYPPMGCRSFLTPYVDKDGKPKYFGRFNQGVVTINLPDVALSSGGDMEKFWNIFEERLELCHRALQARHERLKGTLSDVSPIHWQHGAIARIEKGKPIDEFLYGGYSTISLGYAGLFECVKYMTGESHTSEAGKPFALEVMQKLNDKCAEWKAAENIAYSVYGTPLESTTYKFAKALQRRFGIIKDVTDHNYITNSYHVNVREEIDAFSKLSFESEFQRLSPGGAISYIEVPDMQDNIPAVLDIIKFIYDNIMYAELNTKSDYCQECGWDGQIEIVSDESGKLIWKCPNCGNTDQSKMNVARRTCGYIGTQFWNQGRTQEIKDRVVHVGVQDYYAGEENG

SEQ ID NO: 629 - protein, 720 aa, Unknown
  Description of Unknown: uncultivated organism sequence
  Category: MG55 effectors
  Description: MG55-204 effector
MKIIKRSGAEAVFDISKIIIAINKANHEVVEAERLTADQIKEIAQYIEDSCKDANHALNVEDIQDLVEDQLMDKRAFSVARKYITYRYKRALVRKSNSTDEQILSLIECNNEEVKQENSNKDSTVNSVQRDYMAGEVSKDITRRFLLPEDIVEAHEQGIIHFHDADYFAQHMHNCDLVNLEDMLQNGTVISGTRIDKPHSFSTACNIATQIIAQVASSQYGGQSISLAHLVPFVQISREKIHAELVQTLKESDVELSEEKINNIVERRLHAEIERGVQVIQYQVVTLMTTNGQSPFVTVFMYLNEAKNEQEKKDLAMIIEEVLDQRYQGVKNEDGVWITPAFPKLIYVLEEDNIHEDSEYYYLTKKAAKCTAKRMVPDYISEKKMKELKDGNCYTCMGCRSFLTVYHDEDGKPKFYGRFNQGVVTLNLVDLACSSGGDFEKFWKLFDERLDLCYRALMARHNRLKGTPSDVAPILWQYGALARLKKGETIDKLLYGGYSTISLGYAGLCECTRYMTGKPHTDPAATPFALKVMQRLNDACKEWKEKENIDFSVYGTPLESTTYKFAKCLQKRFGVIPGVTDKNYITNSYHVHVTENIDAFTKLKFESQFQALSPGGAISYVEVPNMQDNLDAVLSVMKFIYENIMYAELNTKSDYCQVCGYDGEIQIVKDDDGKLVWECPHCHNRDQDKMNVARRTCGYIGSQFWNQGRTQEIKERVLHL

SEQ ID NO: 630 - protein, 979 aa, Unknown
  Description of Unknown: uncultivated organism sequence
  Category: MG55 effectors
  Description: MG55-205 effector
MQIGLDIGSTTIKIAVMDDAGNLLFHKYERHYSQIAEKILALHKELMTKFPTLHSARLAISGSGGIGIADSCGLQFIQEVFAEKICAEKLNPGTDAVIELGGEDAKILFLGRHFDARMNDSCAGGTGAFIDQMASLLNVETPQMNELAQQAQNTYTIASRCGVFAKSDIQPLLNQGAEKSDLAASIFHAVASQAITGLAKGRHISGNVLYLGGPLTFMSCLRDAFDSVLNIKGVCPENSLLYVAMGAAFCAEHEVDLTTLPEKLQAAAAQHSFEHLPPLFKNEGEYTVFKKRHSKESVAIGTPAEASEAFIGIDSGSTTIKIAVMSPDGKLLDSFYQSNKGNPVVAVRNYLTDFYTKYPHCRLLAGAVTGYGEELIRHGFGVDYGIVETMAHFYAAQYLEPEVDFILDIGGQDMKCLKIHNGAIDNIFLNEACSSGCGSFLQTFAEILGYTAEQFAQIGLKADMPVDLGSRCTVFMNSSVKQAQKDGASVANISAGLSISIVKNALYKVIRPASKEAIGKHIVVQGGTFLNDCVLRAFEQEMDLNVIRPNIAGLMGAYGAALYAQRRYKDAPHQTTLLNLQQLGEFVHTVKGMTCGLCNNHCHLTVNTFAGGKRFISGNRCERPITHMAPKDELNLYRQKLQLLKELPVNETPKRGIMGIPMGLNMYELLPFWNALLSSLGFKVVHSPIEDKTIYRLGQGTIPSDTVCYPAKLMHGHIKWLLQQGITNIFYPCMTYNIDEQGTENCYNCPVVAYYPEVLHANIRDLNKPEIHFFYDYLGLLHKKKLVKKLQEMFSKAYPDITKDEIRKAVDAAFNAFYDYEAQVKAKGQQIINKAREEHKPIVVLAGRPYHIDPKVNHSIDRLITNMGAALVSEDAVSSHIKTKELNRDLQVLNQWTYHGRLYAAAEYVAQNPDMHLIQLVSFGCGCDAITADECRRLLEERGRIYTQIKIDDIDNLGAAKIRIRSLFSAAQLFDIDNN

SEQ ID NO: 631 - protein, 708 aa, Unknown
  Description of Unknown: uncultivated organism sequence
  Category: MG55 effectors
  Description: MG55-206 effector
MKVIKRDGSTADFDSSKIIVAIQKANQVVEPEDRIDQERIEAIAHYVESKNRMRLLVEDIQDMVEHQLMDEGKFNLAKSYIIYRYTRALVRKANTTDESILSLIRNSNKDVMEENSNKNAVMASTQRDLIAGEVSKDLTRRLILPEKISKAHDEGAIHFHDADYFVQPIFNCCLINVGDMLDNGTVMNGKLIESPKSFQVACTVMTQIIASVASSQYGGQSVDIRHLGKYLRRSYEKFKLTIKAEVGDSVADEVVERLTKRRLQDELRSGVQTIQYQINTLMTTNGQSPFVTIFLNLQADDEYLEENAMIVEEILRQRLEGIKNDKGVFVTPAFPKLVYVLDEHNCLKGGKYDYITKLAVKCSAKRLYPDYISAKKMRENYEGNVFAPMGCRSFLAAWKDDEGNYKFEGRFNQGVVSLNLPQVAILAHGDEEKFWPLLDERLQLCYEALVCRHNSLKGIRSDVSPVHWQYGAIARLEKGEVIDKYLEKGYSTISLGYIGLYEMTKLMKDVSHTTPEGEEFALRVMKYLRAACDKWKKETGLGFALYGTPAESLCYRFARIDKERFGTIADVTDKGYYTNSYHVDVREDIDAFSKFNFESQFQRISSGGAISYVEIPNMRHNLEAMEDVVRFIYDNIQYAEFNTKSDYCHVCGFDGEIIINDDLEWECPNCGNKNQTLMNVTRRTCGYLGENFWNVGKTKEIKSRVLHL

SEQ ID NO: 632 - protein, 723 aa, Unknown
  Description of Unknown: uncultivated organism sequence
  Category: MG55 effectors
  Description: MG55-207 effector
MKVIKRDKKEVEFDSTKIEAAIKKARNACTSSNLSDENIADIADYITYKCKKLDHSVSVEDIQDMVEDQLMAHGEFALAKEYVKYRYNRQLVRKSNTTDEKILSLIELQNEEVKQENSNKNPTINSTQRDYMAGEVSRDLTNRILLPKDIVEAHEKGIIHFHDSDYFAQHMHNCDLVNLEDMLQNGTVISGTLIEKPHSFHTACNVATQIVAQVASAQYGGQSISLAHLAPFVDISRKKIYNKFRKNFEELGINVTEDKLSELVEKEVKEEINRGVQTIQYQVVTLMTTNGQTPFVTVFMYLGEAKNEREKADLALIIEEVLRQRIQGVKNEKGAWITPAFPKLIYVLEEQNITEDAPYFYLTELAAKCTAKRMVPDYISEKIMLELKKDKNGEGHCYTCMGCRSFLTPYLDKNGKPKYYGRFNQGVVTINLVDVACSSHKDINKFWEIFDERLELCHRALMCRHKRLKGTPSDVAPILWQHGALARLKKGETIDKLLYGGYSTISLGYAGLCECTRYMTGKSHTDPSATPFALEVMKHMNDACAKWKEEENIDFSLYGTPLESTTYKFAKCLQKRFGIIKGVTDKAYITNSYHVHVTEEIDAFTKLAFESQFQKLSPGGAISYVEVPNMQNNIPAVIQVIQFIYDNIMYAELNTKCDYCQKCGYDGEIKVVKKGGKYIWQCPNCGNTDQRFMNVVRRTCGYLGSNYWSHGRTEEIAERKLHL

SEQ ID NO: 633 - protein, 720 aa, Unknown
  Description of Unknown: uncultivated organism sequence
  Category: MG55 effectors
  Description: MG55-208 effector
MKIIKRSGAEAVFDISKIIIAINKANHEVVEAERLTADQIKEIAQYIEDSCKDANHALNVEDIQDLVEDQLMDKRAFSVARKYITYRYKRALVRKSNSTDEQILSLIECNNEEVKQENSNKDSTVNSVQRDYMAGEVSKDITRRFLLPEDIVEAHEQGIIHFHDADYFAQHMHNCDLVNLEDMLQNGTVISGTRIDKPHSFSTACNIATQIIAQVASSQYGGQSISLAHLVPFVQISREKIHAELLQTLKESGVELSEEKINSIVERRLHAEIERGVQVIQYQVVTLMTTNGQSPFVTVFMYLNEAKNEQEKKDLAMIIEEVLDQRYQGVKNEDGVWITPAFPKLIYVLEEDNIHEDSEYYYLTKKAAKCTAKRMVPDYISEKKMKELKDGNCYTCMGCRSFLTVYHDEDGKPKFYGRFNQGVVTLNLVDLACSSGGDFEKFWKLFDERLDLCYRALMARHNRLKGTPSDVAPILWQYGALARLKKGETIDKLLYGGYSTISLGYAGLCECTRYMTGKPHTDPAATPFALKVMQRLNDACKEWKEKENIDFSVYGTPLESTTYKFAKCLQKRFGVIPGVTDKNYITNSYHVHVTENIDAFTKLKFESQFQALSPGGAISYVEVPNMQDNLDAVLSVMKFIYENIMYAELNTKSDYCQVCGYDGEIQIVKDDDGKLVWECPHCHNRDQDKMNVARRTCGYIGSQFWNQGRTQEIKERVLHL

SEQ ID NO: 634 - protein, 720 aa, Unknown
  Description of Unknown: uncultivated organism sequence
  Category: MG55 effectors
  Description: MG55-209 effector
MKIIKRSGAEAVFDISKIIIAINKANHEVVEAERLTADQIKEIAQYIEDSCKDANHALNVEDIQDLVEDQLMDKRAFSVARKYITYRYKRALVRKSNSTDEQILSLIECNNEEVKQENSNKDSTVNSVQRDYMAGEVSKDITRRFLLPEDIVEAHEQGIIHFHDADYFAQHMHNCDLVNLEDMLQNGTVISGTRIDKPHSFSTACNIATQIIAQVASSQYGGQSISLAHLVPFVQISREKIHAELLQTLKESGVELSEEKINSIVERRLHAEIERGVQVIQYQVVTLMTTNGQSPFVTVFMYLNEAKNEQEKKDLAMIIEEVLDQRYQGVKNEDGVWITPAFPKLIYVLEEDNIHEDSEYYYLTKKAAKCTAKRMVPDYISEKKMKELKDGNCYTCMGCRSFLTVYHDEDGKPKFYGRFNQGVVTLNLVDLACSSGGDFEKFWKLFDERLNLCYRALMARHNRLKGTPSDVAPILWQYGALARLKKGETIDKLLYGGYSTISLGYAGLCECTRYMTGKPHTDPAATPFALKVMQRLNDACKEWKEKENIDFSVYGTPLESTTYKFAKCLQKRFGVIPGVTDKNYITNSYHVHVTENIDAFTKLKFESQFQALSPGGAISYVEVPNMQDNLDAVLSVMKFIYENIMYAELNTKSDYCQVCGYDGEIQIVKDDDGKLVWECPHCHNRDQDKMNVARRTCGYIGSQFWNQGRTQEIKERVLHL

SEQ ID NO: 635 - protein, 735 aa, Unknown
  Description of Unknown: uncultivated organism sequence
  Category: MG55 effectors
  Description: MG55-210 effector
MGDKMDKELLIMTNVIKRNGKEVKFDIYKIIHAMEKANKEVAPVYQMNEYQIQAAAETVAKKIQASSHAVNVEDIQDMVETAIMEMRAYEVAQKYVRYRYKREMARKANSTDEDILALIDQANEELKQENSNKNPVINSTQRDYMAGEVSKDLTKRLLLPEDIVKAHEEGVIHFHDSDYYAQKEHNCDLINLEDMLQNGTVISETMIEKPHSFFTACNVTTQIVAQVASNQYGGQSFTLSHLAPFVDISRQKIREAVIGERKETGESMDEDIIAKIVNRRLKEEIKSGIQTIQYQLITLMTCNGQAPFVTMFMYLDEVPEGKTREDLALIIEEVLRQRMQGVKNEKGVWITPAFPKLIYVLDEDNITEDAPYYHLTKLAAQCTAKRMVPDYISAKIMREYKGGDVYPCMGCRSFLTEDKEGLGENGAHKYYGRFNQGVVTINLVDVACSSQGNMDSFWQILEERLELCHKALRLRHERLLGTVSDVAPILWQHGALARLKKGEKIDKLLYNNYSTISLGYAGLYEMCVRMLGKSHTTEEGREFSLKVMEKLNDSCKKWREAENISYSVYGTPMESTTYKFAKALKKRFGTIPGVTDKNYITNSYHVHVSEKIDAFSKLAFEADFQKLSPGGAISYVEVPNMQNNIPAVLSLMHFIYENIMYAELNTKSDYCCACGYDGEIQIIEDQYGKLQWRCPNCGNENQEQLSVARRTCGYIGTQFWNQGRTQEIKDRVLHL

SEQ ID NO: 636 - protein, 982 aa, Unknown
  Description of Unknown: uncultivated organism sequence
  Category: MG55 effectors
  Description: MG55-211 effector
MSLRIGIDIGSTTVKVVVLDEQNKLLFRSYERHYSKTRERACETLRSISDMLAGRQVKMVITGSAGLGVANASGIDFVQEVYATAAAVNTYIPGTDAVIELGGEDAKIIFFGGALEERMNGSCAGGTGAFIDQMATLMNVSVDELDALSLKHEKIYPIASRCGVFAKSDIQPILNQGGRKEDVAASIFQAVVDQTVAGLTQGRELKGKIVFLGGPLHFLMGLRERFVETLKLDEEHAIFPEDGDCFAAMGAALCSSDYDTILFEDALKKLEESVDTTTLVDTMPPLFQDVAEYGAFCARHNAKRPPEVDIKTYEGPAWLGIDAGSTTTKLALITGDGGLLYTYYHSNLGNPVAIVLEQLREIYAQCGDRIEIRGVAVTGYGEDLIKNAFSCDLGLVETMAHYKAAAHFEPDVDFIIDIGGQDMKCFKIRNGAVDSIMLNEACSSGCGSFIETFAKALGYEIADFAKMGLFAQHPVNLGSRCTVFMNSSVKQAQKDGASVEDISAGLSISIVKNAVYKVIRAANADDLGQHIVVQGGTFLNDAVLRAFEQELGRNVTRPTIAGIMGAFGAALAAKDLGLEKSSILGPEALERFTHSAKPVTCNLCTNHCSLTVNQFDGGRRFISGNRCSRPLGKEKVTQPDLMTYKYKKLRAMQGKGEGTGVRGRIGIPFGLNMYENLPFWFTFFTKLNFEVVLSPESSRKLYLKGQHTIPSDTVCYPAKLLHGHVEALVEEGVDAIWYPCMSYNNDEGIGDNHFNCPVVAYYPELLAANVPALKETRFLDPYVGLWRHKDFEKRIAKLMEEEFSIPQRETRAAAQAAYAAYEAYVHDLRQTGQEYIAYAREHGLNIAVVCGRPYHIDPEINHGINDLITSFGFVLITEDALSYLEGYAPRKVLNQWTFQSRMYNAARYVCTQPDMQVIQLVSFGCGTDAITTDEMRSILEEGGKLYTQLKIDDINNLGAVKIRIRSLMAAMDARKHQAAPAR

SEQ ID NO: 637 - protein, 979 aa, Unknown
  Description of Unknown: uncultivated organism sequence
  Category: MG55 effectors
  Description: MG55-212 effector
MQIGLDIGSTTIKIAVMDDAGNLLFHKYERHYSQIAEKILALHKELMTKFPTLHSARLAISGSGGIGIADSCGLQFVQEVFAEKICAEKLNPGTDAVIELGGEDAKILFLGRHFDARMNDSCAGGTGAFIDQMASLLNVETPQMNELAQQAQNTYTIASRCGVFAKSDIQPLLNQGAEKSDLAASIFHAVASQAITGLAKGRPISGNVLYLGGPLTFMSCLRDAFDSVLNIKGVCPENSLLYVAMGAAFCAEHEVDLTTLPEKLQAAAAQHSFEHLPPLFKNEGEYTVFKKRHSKESVAIGTPAEASEAFIGIDSGSTTIKIAVMSPDAKLLDSFYQSNKGNPVVAVRNYLTDFYTKYPNCHLLAGAVTGYGEDLIRHGFGVDYGIVETMAHFYAAQYLEPEVDFILDIGGQDMKCLKIHNGAIDNIFLNEACSSGCGSFLQTFAEILGYTAEQFAQIGLKADMPVDLGSRCTVFMNSSVKQAQKDGASVANISAGLSISIVKNALYKVIRPASKEAIGKHIVVQGGTFLNDCVLRAFEQEMDLNVIRPNIAGLMGAYGAALYAQRRYKDAPHQTTLLNLQQLGEFVHTVKGMTCGLCNNHCHLTVNTFAGGKRFISGNRCERPITHMAPKDELNLYRQKLQLLKELPVNETPKRGIMGIPMGLNMYELLPFWNALLSSLGFKVVHSPIEDKNIYRLGQGTIPSDTVCYPAKLMHGHIKWLLQQGITNIFYPCMTYNIDEQGTENCYNCPVVAYYPEVLHANIRDLNKPEIHFFYDYLGLLHKKKLVKKLQEMFAKVYPDITKEEIRKAVDAAFTAFYDYEAQVKAKGQEIISKAREEHKPIVVLAGRPYHIDPKVNHSIDRLITNMGAALVSEDAVSSHIKTKELNRDLQVLNQWTYHGRLYAAAEYVAQNPDMHLIQLVSFGCGCDAITADECRRLLEERGRIYTQIKIDDIDNLGAAKIRIRSLFSAVQLFDIDNN

SEQ ID NO: 638 - protein, 979 aa, Unknown
  Description of Unknown: uncultivated organism sequence
  Category: MG55 effectors
  Description: MG55-213 effector
MQIGLDIGSTTIKIAVMDDAGNLLFHKYERHYSQIAEKILALHKELMTKFPTLHSARLAISGSGGIGVADSCGLQFVQEVFAEKICAEKLNPGTDAVIELGGEDAKILFLGRHFDARMNDSCAGGTGAFIDQMASLLNVETPQMNELAQQAKNTYTIASRCGVFAKSDIQPLLNQGAEKSDLAASIFHAVASQAITGLAKGRPISGNVLYLGGPLTFMSCLCDAFDSVLNIKGVCPENSLLYVAMGAAFCAEHEVDLTTLPEKLQTAAAQHSFEHLPPLFKNEGEYTVFKKRHSKESVAIGTPEEASEAFIGIDSGSTTIKIAVMSPDGKLLDSFYQSNKGNPVVAVRNYLTDFYTKYPHCHLLAGAVTGYGEELIRHGFCVDYGIVETMAHFYAAQYLEPEVDFILDIGGQDMKCLKIHNGAIDNIFLNEACSSGCGSFLQTFAEILGYTAEQFAHIGLKADMPVDLGSRCTVFMNSSVKQAQKDGASVANISAGLSISIVKNALYKVIRPASKEAIGKHIVVQGGTFLNDCVLRAFEQEMDLNVIRPNIAGLMGAYGAALYAQRRYKDAPHQTTLLNLQQLGEFVHTVKGMTCGLCNNHCHLTVNTFAGGKRFISGNRCERPITHMAPKDELNLYRQKLQLLKELPVNETPKRGIMGIPMGLNMYELLPFWNALLSSLGFKVVHSPIEDKTIYRLGQGTIPSDTVCYPAKLMHGHIKWLLQQGITNIFYPCMTYNIDEQGTENCYNCPVVAYYPEVLHANIRDLNKPEIHFFYDYLGLLHKKKLVKKLQEMFSKAYPNITKDEIRKAVDAAFNAFYDYEAQVKAKGQQIISKAREEHKPIVVLAGRPYHIDPKVNHSIDRLITNMGAALVSEDAVSSHIKTKELNRDLQVLNQWTYHGRLYAAAEYVAQNPDMHLIQLVSFGCGCDAITADECRRLLEERGRIYTQIKIDDIDNLGAAKIRIRSLFSAAQLFDIDNN

SEQ ID NO: 639 - protein, 724 aa, Unknown
  Description of Unknown: uncultivated organism sequence
  Category: MG55 effectors
  Description: MG55-214 effector
MKIIKRNGAEVGFDITKIIIAITKANESVEEVDRMTPVQIQRIAESVDLQCQKMNRAPTVEEIQDMVEHYIMAHGAFEVAKHYITYRYTRSLVRKSNTTDDKILSLIECNNEEAKQENSNKNPVVNSTQRDYMAGEVSRDITNRILLPKDIVEAHNEGIIHFHDTDYYAQHMHNCDLVNLEDMLQNGTVITGTLIEKPHSFATACNIATQIVAQVASNQYGGQSISLTHLAPFVQISREKIRASVRDEFDAVGVAVTEDKINSIAEKRLREEIRRGVQTIQYQVVTLLTTNGQAPFVTVFMYLGEAKNQQEKDDLALIIEETLLQRYQGVKNEKGVWVTPAFPKLIYVLEEDNIREGSKYWELTKLAAKCTAKRMVPDYISEKKMLELKVDKNGNGHCYPCMGCRSFLTPYVDEDGNPKYYGRFNQGVVTVNLPDIALSSGGNIEKFWRIFDERMELCHRALLCRHERLKGTLSDAAPILWQYGACARLKKGEPIDKLLYGGYSTISLGYAGLYECVKYMTGKSHTDPSATPFALEIMHKLNAACKTWKAQHNIDFSLYGTPLESTTYKFAKCLQKRFGVIEGITDKGYITNSYHVHVTEPIDAFKKLEFEAQFQHLSPGGAISYVEVPDMQNNLDAVLEVMKFIYDHIIYAELNTKSDYCQVCGWDGEIEVVEEDGKLIWKCPQCGNTDQDKMNVARRTCGYIGTQFWNQGRTQEIKDRVLHL

SEQ ID NO: 640 - protein, 720 aa, Unknown
  Description of Unknown: uncultivated organism sequence
  Category: MG55 effectors
  Description: MG55-215 effector
MKIIKRSGAEAVFDISKIIIAINKANHEVVEAERLTADQIKAIAQYIEDSCKDANHALNVEDIQDLVEDQLMDKRAFSVARKYITYRYKRALVRKSNSTDEQILSLIECNNEEVKQENSNKDSTVNSVQRDYMAGEVSKDITRRFLLPEDIVEAHEQGIIHFHDADYFAQHMHNCDLVNLEDMLQNGTVISGTRIDKPHSFSTACNIATQIIAQVASSQYGGQSISLAHLAPFVQISREKIHAELVQTLKESDVELSEEKINSIVERRLHAEIERGVQVIQYQVVTLMTTNGQSPFVTVFMYLNEAKNEQEKKDLAMIIEEVLDQRYQGVKNEDGVWITPAFPKLIYVLEEDNIHEDSEYYYLTKKAAKCTAKRMVPDYISEKKMKELKDGNCYTCMGCRSFLTVYHDEDGKPKFYGRFNQGVVTLNLVDLACSSGGDFEKFWKLFDERLDLCYRALMARHNRLKGTPSDVAPILWQYGALARLKKGETIDKLLYGGYSTISLGYAGLCECTRYMTGKPHTDPAATPFALKVMQRLNDACKEWKEKENIDFSVYGTPLESTTYKFAKCLQKRFGVIPGVTDKNYITNSYHVHVTENIDAFTKLKFESQFQALSPGGAISYVEVPNMQDNLDAVLSVMKFIYENIMYAELNTKSDYCQVCGYDGEIQIVKDDDGKLVWECPHCHNRDQDKMNVARRTCGYIGSQFWNQGRTQEIKERVLHL

SEQ ID NO: 641 - protein, 720 aa, Unknown
  Description of Unknown: uncultivated organism sequence
  Category: MG55 effectors
  Description: MG55-216 effector
MKIIKRSGAEAVFDISKIIIAINKANHEVVEAERLTADQIKEIAQYIEDSCKDANHALNVEDIQDLVEDQLMDKRAFSVARKYITYRYKRALVRKSNSTDEQILSLIECNNEEVKQENSNKDSTVNSVQRDYMAGEVSKDITRRFLLPEDIVAAHEQGIIHFHDADYFAQHMHNCDLVNLEDMLQNGTVISGTRIDKPHSFSTACNIATQIIAQVASSQYGGQSISLAHLVPFVQISREKIHAELVQTLKESDVELSEEKINSIVERRLHAEIERGVQVIQYQVVTLMTTNGQSPFVTVFMYLNEAKNEQEKKDLAMIIEEVLDQRYQGVKNEDGVWITPAFPKLIYVLEEDNIHEDSEYYYLTKKAAKCTAKRMVPDYISEKKMKELKDGNCYTCMGCRSFLTVYHDEDGKPKFYGRFNQGVVTLNLVDLACSSGGDFEKFWKLFDERLDLCYRALMARHNRLKGTPSDVAPILWQYGALARLKKGETIDRLLYGGYSTISLGYAGLCECTRYMTGKPHTDPAATPFALKVMQRLNDACKEWKEKENIDFSVYGTPLESTTYKFAKCLQKRFGVIPGVTDKNYITNSYHVHVTENIDAFTKLKFESQFQALSPGGAISYVEVPNMQDNLDAVLSVMKFIYENIMYAELNTKSDYCQVCGYDGEIQIVKDDDGKLVWECPHCHNRDQDKMNVARRTCGYIGSQFWNQGRTQEIKERVLHL

SEQ ID NO: 642 - protein, 341 aa, Unknown
  Description of Unknown: uncultivated organism sequence
  Category: MG55 effectors
  Description: MG55-217 effector
MAATMKDIARRTGLGLATISSYFNGGNVREKNRIKIEEAIQELHYEVNEVARGLKTNATKTIGVVIPELNNTFCAEIITGMEDVLRSHGYATIVCDCRTDKRLEREAVEFLSRKRVDGIISMPVDAEGNHLKKFQKTGKPIVLIDRRIRELSCDSVLVDNEKAAEDAMRVFFQAGHRKIGIIGGPEEISTAQERLQGYRNAYEKENIPVRESLIYHGDYTIQGGVQGIEKLVADNPDMTAVFVTNYEMTMGAVIGMNELGLKIPEQLSMIGFDNLQFARACNPKLTIVAQPTQGIAGEVAGIMLKRLEGAASEETEPITEKLGAEIIMGKSVRVLDEKEKL

SEQ ID NO: 643 - protein, 1005 aa, Unknown
  Description of Unknown: uncultivated organism sequence
  Category: MG55 effectors
  Description: MG55-218 effector
MSEIKLQQKAAYTLGIDVGSTTVKTVILDADHHVLHSTYQRHFSKVKEAVSEQLQAIIKEHPATLFSVHMTGSAGLGLATAAKIPFVQEVHAAFLAVKERYPKADAVIELGGEDAKIIFLTGGVEQRMNGSCAGGTGAFIDQMATLLDVTVDELDQMALQADRTYPIAARCGVFAKSDIQPLLNQGAKRENVAASIYQAVVDQTVSGLAQGRKIQGYVLFLGGPLSFLQGLRNAFMQTLHLDAEHAIFPVDGRTFVAYGCALAAENSADKPVTGEALLKQIESAETNHTVIADKPLFGYQEEYDRFRERHAQNDVVHGDLHTYQGNAYLGVDAGSTTTKVALIGEDNSLLYSFYETNKGQPLECVKRALETLYQKKNPNLKICGSAVTGYGEEMLKAGLGIDFGIVETVAHFRAAEFFCPDVDFIIDIGGQDIKCFQIKNGAIDSIMLNEACSSGCGSFIQAFANALGYDVAEFAKLGLFAERPVDLGSRCTVFMNSSVKQAQKDGATVADISAGLSGSIVKNAIYKVIRAKSPEDLGKHIVVQGGTFLNDAVLRCFEREMGRDVIRPAISGLMGAFGAAIYAKEHTSGSSTLLSLMDLHTLTYRTQNTTCNGCTAHCNLQILRFSNGKRFIAGNRCERGAGVSKKDQIPNLVDWKYETLRSLTDRQPEQPKATVGLPMALHYYDQLPLWYTFFTDLGFAVKLSEESTRKTYYKGQSTIPSDTVCYPAKLAHGHIESLLEQNVDFIFYPCMTYNLDEGDSDNHYNCPVVAYYPELLLANNEKLNEQNFLHPFLDLNRRKHLITVLYACLSDYATKKEIAAALEHGFAALEQYHNQIAQTAQEIVRQARAAGKTILVLAGRPYHIDPEINHGIHKLISSLGMAVITEDSIAGLAHTPELQALNQWTYHSRMYRAAQYVTTQPDFQLVQLVSFGCGIDAITTDEVRRILEQGGKLYTQLKIDEISNLGAAKIRLRSLKAAIGADVPPKPAAAPSEVAPKNEKEPVSV

SEQ ID NO: 644 - protein, 990 aa, Unknown
  Description of Unknown: uncultivated organism sequence
  Category: MG55 effectors
  Description: MG55-219 effector
MNVNVGIDIGSTTVKIVVVRDGEIIHKHYERHFSKVREKAVELVQNAREVIGPDATIRCAITGSAGLGVAKAADIDFVQEVFATRKAVGVHVPQADVVIELGGEDAKIVFLSGQLEERMNGSCAGGTGAFIDQMAVLLDVTPGELDELAQHAEQIYTIASRCGVFAKSDIQPLLNDGARKEDVAASIFQAVVNQTVAGLAQGREIKGDVLFLGGPLFFFKGLQKRFQETLKLDDMHAHFPALAPYAIAAGAAEYAKDTQKTYSVDSLLDALEHAAGAPVVANYLPPLFENEQQYEEFKHRHGVHDVMTQNVTMYEGDAYLGIDCGSTTTKLVLIGEDHQILFHHYQSNKGNPADVIREQLTKLYELCGDRVHIVSSAVTGYGEALIQHAFGVDFGLVETVAHFRAARHFCPDVDFIIDIGGQDIKCFKIRNKCIDNISLNEACSSGCGSFIETFARSMGYSIEEFCKLGLFAKHPIDLGSRCTVFMNSSVKQAQKDGAGIDAISAGLSVSVVKNALYKVIRAHSPDDLGQHIVVQGGTFLNDAILRSFEQEIGRDVTRPAIAGLMGAYGAALHAKDNRPAQTSLVGMDVLASFRHTVKSARCGLCENHCSLTINDFGGGRRFISGNRCERPLGGTKKADLPNLYQWKLEKLRSYGESSGKPMPNGRIGLPFGLNYYELLPFWTTFLRSLGFETVLSDVSTRDIYMQGQHSIPSDTVCYPAKLMHGHIENLLEKGVDAIFYPCMTYNLDEGRATNCYNCPVVAYYPELLHANVAALADFDFMMPYFELTDHKRFIQQAAKYFCGKYPQIKKKQVAAAAEAAFQELDNYYAEIRLEGQKAIAYADTHGLDIAVIAGRPYHVDPEINHGIDQLIASFGLVIVSEDAVWQLAEEPKVHVLNQWTYHSRMYGAAKYVTRKENAQLIQLVSFGCGIDAITTDEVRAICENGGKIYTQLKIDEISNLGAAKIRIRSMLAAVEEGRKLAEQQSNQHVG

SEQ ID NO: 645 - protein, 708 aa, Unknown
  Description of Unknown: uncultivated organism sequence
  Category: MG55 effectors
  Description: MG55-220 effector
MKVIKRDGRVVDYDRSKILLAIQKANDEVEIKEKITEQKIEKIVASIEHLKKDTMHVEEIQDFIEQKLMADGKFTLAKTYIIYRYTRELVRKANTTDESIMSLIKNSNKDVMEENSNKNAVIASTQRDLIAGEVSKDLTRRLLLPEKISKAHDEGVLHFHDADYFLQSIFNCCLINIKDMLDNGTVMNGKLIESPKSFQVACTVMTQIISAVASSQYGGQSVDIRHLGKYLRYSYKKYQERYQERFKGKLSDEVIEQIVQERLQDELKSGVQTIQYQINTLMTTNGQSPFVTLFLNLDKDDEYIEENAMIIEEVLRQRLQGIKNEKGVYVTPAFPKLIYVLDEHNCFKGGKYDYITKLAVQCSAKRLYPDYISAKKMRENYEGNVFSCMGCRSFLTPWKDENGNYKFEGRFNQGVVSLNLPQIGIIAQGDEEVFWPLLDERLALCYEALMCRHRALEGTLSDVSPIHWQYGAIARLNKGETIDKLLHGGYSTISLGYIGLYEVTKLMKGVSHTEAGGSEFAFKLMNRLREACDTWKRDTGIGFGLYGTPAESLCYRFARIDKERFGEIADVTDKGYYTNSYHVDVREHIDAFNKFTFESQFQVISSGGAISYIEIPNMRHNMEALEEIVKFIYENIQYAEFNTKSDYCHECSFDGEIIINENLEWECPNCGNKDHSKMNVTRRTCGYLGENFWNVGKTKEINSRVLHV

SEQ ID NO: 646 - protein, 727 aa, Unknown
  Description of Unknown: uncultivated organism sequence
  Category: MG55 effectors
  Description: MG55-221 effector
MKVIKRDGHMVDYCPEKIEQAIMKANNEVEEEDQASSTQIKNIIKYIEKLGKKRILVEDIQDIIEMKLMSQGKYELAKHYITYRYTRELVRRSNTTDQSIKELIDGESEYWNTENSNKNAKVVTTQRDYLAGITSTDITRRFLLPEDIVEAHDAGIIHFHDADYFAQNALHNCDLVNLEDMLQNGTSINGVMIEKPHRFLTAMTIATQIITAVSSSQYGGVTITLTHLAPFVRESYNRYLDKYKKRKLSKEQCEKFAMEDTKKEIVDGVQTFQYQVNSMTTTNGQAPFLSVCMYLGETTEYKEELSWIIEEFLKQRILGMKNEQGVYITPAFPKLLYVLEEDNINKNGKYYYLTKLAAECTAKRMVPDYISEKIMKELKIDKNGNGNCYPCMGCRSFLTPYVDENGKPKYYGRFNQGVVTINLVDAALSSDKDMDTFWQIFEERLELCHKALQIRHKRLSKATSDVAPILWQHGALARLKKGESIHELLHNGYSTISLGYAGLYECVKYMTGHSHTDNGKGKEFALEVMEKMNAKCKEWKEVENIDYSVYGTPIESTTYKFAKCLKDRFGVVKGITDRDYITNSYHVPVFEEIDAFTKLKLESEFQKLSPGGAISYIETPNLSNNLDAVLEVITFIYNNIMYAELNTKSDYCQECGYTGEILIDDNMEWYCPNCGNRDHNKLNVARRTCGYIGTNFWNKGRTQEIKERVLHIDNKEEKDTKKDKEEK

SEQ ID NO: 647 - protein, 730 aa, Unknown
  Description of Unknown: uncultivated organism sequence
  Category: MG55 effectors
  Description: MG55-222 effector
MKIIKRSGSEDIFDISKIEAAIRKANDSVIDYEKLGDDKIQAILSNVEKACENMKRSPSVEEIQDMVENQIMSQKAFNVARNYITYRYKRELVRKSNSTDEQILSLLECNNEEVKQENSNKNPTVNSVQRDYMAGEVSKDITRRFLLPPEIVEAHEKGIIHFHDADYFAQHMHNCCLVNLEDMLQNGTVISETMIDTPKSFSTACNIATQAIAQIASSQYGGQSISLSHLAPFVQVSREKFRKQVRKELETAGIEATEEKVNQMAEMRVKEEINRGVQMIQYQVITLMTTNGQAPFITVFMYLDEVPEGQLRDDLAAVIEEMLHQRILGVKNEQGVYITPAFPKLIYVLEEDNIREGSKYWYLTRLAAECTAKRMVPDYISEKMMKKLKDGDCYTCMGCRSFLTVDRTTGNLAHAKNYKEGKHKYYGRFNQGVVTLNLVDAACSSGGDEKKFWEIMDERLEMCYQALMIRHNRLKGTPSDVAPILWQNGALARLKKGETIDELLYHGYSTISLGYAGLCECTRYMKGVSHTEPEGTEFALAVMRRLNDACAKWKKETDIDFSLYGTPLESTTYKFAKCLQKRFGIIPGVTDKNYITNSYHVHVTEQINAFDKLKFESQFQELSPGGAISYVEVPNMQNNLEAVLSVMQYIYENIMYAELNTKSDYCMECGYAGEIKIVTDRDGKLVWECPNCGNRDQNKMSVARRTCGYIGTQFWNQGRTQEIKERVLHL

SEQ ID NO: 648 - protein, 712 aa, Unknown
  Description of Unknown: uncultivated organism sequence
  Category: MG55 effectors
  Description: MG55-223 effector
MEDNFDIKKIEAAIRKANESVIDYEKLTEEKIQEILANVEKACENMKRSPSVEEIQDMVENQIMNQRAFNVARNYITYRYKRALVRKSNSTDEQILSLLECNNEEVKQENSNKNPTVNSVQRDYMAGEVSKDITRRFLLDGDIVEAHEQGIIHFHDADYFAQHMHNCCLVNLEDMLQNGTVISETMIDRPKSFSTACNIATQAIAQIASSQYGGQSISLSHLAPFVDVSRQKFRKTVREELTATGIEPTEEMVNKIAEMRVKEEINRGVQMIQYQVITLMTTNGQAPFVTVFMYLDEVPEGQLRDDLAAVIEEVLHQRIQGVKNEKGVFITPAFPKLIYVLEEDNIREGSRYWYLTRLAAECTAKRMVPDYISEKIMKKLKQGNCYTCMGCRSFLTVYKDENDKFKFYGRFNQGVVTLNLVDVACSSGRDMNKFWELMDERLELCHRALMARHERLKGTPSDVAPILWQNGALARLKKGETIDKLLYGGYSTISLGYAGLCECTRYMKGVSHTDPDGTPFALEVMRHLNDACAKWKAEHNIDFSLYGTPLESTTYKFAKCLQKRFGIIPGVTDKNYITNSYHVHVTEEMSAFDKLKFESQFQELSPGGAISYVEVPNMQNNLDAVLSVMQYIYDNIMYAELNTKSDYCQECGYSGEIKIVNDKDGKLVWECPNCGNRDQNKMSVARRTCGYIGTQFWNQGRTQEIKERVLHL

SEQ ID NO: 649 - protein, 735 aa, Unknown
  Description of Unknown: uncultivated organism sequence
  Category: MG55 effectors
  Description: MG55-224 effector
MGVKMDKELLIMTNVIKRNGKEVKFDIYKIIHAMEKANKEVAPVYQMNEYQIQAAAETVAKKIQASSHAVNVEDIQDMVETAIMEMRAYEVAQKYVRYRYKREMARKANSTDEDILALIDQANEELKQENSNKNPVINSTQRDYMAGEVSKDLTRRLLLPEDIVKAHEEGVIHFHDSDYYAQKEHNCDLINLEDMLQNGTVISETMIEKPHSFFTACNVTTQIVAQVASNQYGGQSFTLSHLAPFVDISRQKIREAVIGERKETGESMDEDIIAKIVNRRLKEEIKSGIQTIQYQLITLMTCNGQAPFVTMFMYLDEVPEGKTREDLALIIEEVLHQRMQGVKNEKGVWITPAFPKLIYVLDEDNISEDAPYYHLTKLAAQCTAKRMVPDYISAKIMREYKGGDVYPCMGCRSFLTEDKEGLGENGAHKYYGRFNQGVVTINLVDVACSSEGNMDSFWEILEERLELCHKALRLRHERLLGTVSDVAPILWQHGALARLKKGEKIDKLLYNNYSTISLGYAGLYEMCVRMLGKSHTTEEGRAFSLKVMEKLNDSCKKWREEEKISYSVYGTPMESTTYKFAKALKKRFGTIPGVTDKNYITNSYHVHVSEKIDAFSKLAFEADFQKLSPGGAISYVEVPNMQNNIPAVLSLMHFIYENIMYAELNTKSDYCCACGYDGEIQIVEDSYGKLQWRCPNCGNENQDQLSVARRTCGYIGTQFWNQGRTQEIKDRVLHL

SEQ ID NO: 650 - protein, 708 aa, Unknown
  Description of Unknown: uncultivated organism sequence
  Category: MG55 effectors
  Description: MG55-225 effector
MRVIKRDGRTVEYDRNKILIAIRKANAEVDTFERVNDDMIDGIVAGIENMKRDTMQVEDIQDIIEQKLMAAGKFDLAKKYIIYRYTRELVRKANTTDDSIMSLLQNSNKDVMEENSNKNAYVASTQRDLIAGEGSKDLTKRILLPEKITKAHEDGVLHFHDMDYFIQPIFNCCLINIGDMLDNGTVMNGKLIESPKSFQVACTVMTQIISAVASSQYGGQSVDTRHLGKYLRKSADKYRKHYTERYAGKIAPDVIEEFVKERVNDELRSGVQTIQYQINTLMTTNGQSPFVTLFLNLDPKDEYIKENAMIIEEILRQRLEGIKNEKGVYVTPAFPKLIYVLDEHNALKGGEYDYITKLAVRCSAKRMYPDYISAKKMRENYEGNVFSCMGCRSFLTPWKDENGNYKFEGRFNQGVVSLNLPQIGILAKGDMEYFWQLLEERLSLCFEALMCRHRALEGVTSDVSPIHWQYGAIARLQKGEKIDKLLHGGYSTISLGYIGLYEVTKLMTGESQTTEKGSQFAKALMNRLRRATDTWKEETGIHFGLYGTPAESLCYRFAEIDKKRFGEIEDVTDKGYYTNSYHVDVREKIDAFSKFEFEAQFQVISSGGAISYVEVPNMQNNLPALEEVVKYIYEHIQYAEFNTKSDYCHVCGYDGEIIINDNLEWECPNCGNKDHDKMNVTRRTCGYLGENFWNVGKTKEINARVLHL

SEQ ID NO: 651 - protein, 708 aa, Unknown
  Description of Unknown: uncultivated organism sequence
  Category: MG55 effectors
  Description: MG55-226 effector
MKVIKRDGSTADFDSSKIIVAIQKANQVVEPEDRIDQERIEAIAHYVESKNRMRLLVEDIQDMVEHQLMDEGKFNLAKSYIIYRYTRALVRKANTTDESILSLIRNSNKDVMEENSNKNAVMASTQRDLIAGEVSKDLTRRLILPEKISKAHDEGAIHFHDADYFVQPIFNCCLINVGDMLDNGTVMNGKLIESPKSFQVACTVMTQIIASVASSQYGGQSVDIRHLGKYLRRSYEKFKLTIKAEVGDSVADEVVERLTKRRLQDELRSGVQTIQYQINTLMTTNGQSPFVTIFLNLQADDEYLEENAMIVEEILRQRLEGIKNDKGVFVTPAFPKLVYVLDEHNCLKGGKYDYITKLAVKCSAKRLYPDYISAKKMRENYEGNVFAPMGCRSFLAAWKDDEGNYKFEGRFNQGVVSLNLPQVAILAHGDEEKFWPLLDERLQLCYEALMCRHNSLKGIRSDVSPVHWQYGAIARLEKGEVIDKYLEKGYSTISLGYIGLYEMTKLMKDVSHTTPEGEEFALRVMKYLRAACDKWKKETGLGFALYGTPEISLCYRFARIDKERFGTIADVTDKGYYTNSYHVDVREDIDAFSKFNFESQFQRISSGGAISYVEIPNMRHNLEAMEDVVRFIYDNIQYAEFNTKSDYCHVCGFDGEIIINDDLEWECPNCGNKNQTLMNVTRRTCGYLGENFWNVGKTKEIKSRVLHL

SEQ ID NO: 652 - protein, 1441 aa, Unknown
  Description of Unknown: uncultivated organism sequence
  Category: MG55 effectors
  Description: MG55-227 effector
MDEILHVGLDVGSTTVKIIVMNSNKETIYSNYERHFSDTKNTICNTLEKLAEKYPNNKFTLALTGSGAMSAAKFLGVDFIQEVVSCKRAVEKYIPKTDVVIELGGEDAKIIYFDESIEQRMNGTCAGGTGAFLDQMASLLHTDTQGLNTLAKNYNTIYPIASRCGVFAKTDIQPLLNEGAAKEDIAASIFQAVVNQTISGLACGRPIKGNVAFLGGPLNYLSELRQRFIKTLNLKPEEIIIPEEAHLIVAKGAALDSINSNIITIEELKEKINNLKNSHDNTSKPLDPLFNSKEELEEFKLRHSKAKINKKDLKDFEENCYIGIDAGSTTTKLVLIDDNNNLLYSLYGSNEGNPLKSVMNMLKELYSILPEKAIIRYSGVTGYGENLIQTALNVDLNEIETIAHYTAAKEFEPDVTSIVDIGGQDMKYIKIKDDTIDNIMLNEACSSGCGSFIETFAKSLNITISDFVKEALESKTPVDLGSRCTVFMNSKIKQAQKEGYSVGDISAGLSYSVIKNAIQKVMKVRDVETLGNHIVVQGGTFYNDAVLRAFELIVGKNVIRPEIAGLMGAYGVALLAKEQFESNLNMEYTSTIANLKDIENLDIKTSHIRCKGCENHCLLTINTFSNGQRHISGNRCEKGAGITNKKQDLPNLVKYKYERLFNYTPLEEKDAPRGTIGIPRVLNMYEDYPFWFTFFTNLGFRVILSDKSTRETYEKGMESMPSESVCYPAKLSHGHIINLIEKGITTIFYPCIPYSRKEFEKANNQYNCPIVISYSEVLKNNVEELKTNNIKFLNPFLPFDTKNLVKRILELDEFKEYNFNKKELLNAAKLAEEEYQNFKKEILEKGNETVKYIEENNLRGIVLAGRPYHLDPEINHGIDTLITSLGLCVLTEDFVARNEKLENPLRVVNQWVYHSRLYAAADFVGKHDHLELIQLNSFGCGVDAVTTDQVEEILKSYDKMYTLIKIDEVNNLGAVRIRIRSLLASMNKRIKEKQENKELGNYSPLRPIFTKEMKKDYTILIPQMAPIHFELLESAVRASGYNAVLLRECTQKTVETGLKYVNNDACYPSILTTGQFIEALQSGKYDLDKTAIIMSQTGGGCRATNYIGFIRKALKDAGFEKVPIISFNVVGMEKMPGFKLTLPLLERLLKMVIYGDLLQKMLTKNRAYEINKGETEKLFNEWLEKCKKLVAKSTNKQFKQSIYNIVNDFEKIELDTSIEKPKVGVVGEVLIKYHPFGNNYVANVLEKEGAEVILPDFMGFVKFMATHKITFNTLLKTTPTIAKISKAAIKLIDILEKDVKIALANSKKGYMQPCDIFHLEEQVKDVLSIGNQTGEGWFLTAEMIEYMENEIPNIVCVQPFACLPNHVVGKGVIKTIRNKYPEANISPIDYDPGASEANQTNRIKLLMTVAKDNLKNNKIKKEKLNSKENKAIDHDIKIYKK

SEQ ID NO: 653 - protein, 1416 aa, Unknown
  Description of Unknown: uncultivated organism sequence
  Category: MG55 effectors
  Description: MG55-228 effector
MKLDFNTLGIDIGSTTVKIAILNKDGEIIFSDYQRHYANIQETLAKIIDEAYEEFGDIPVSPMITGSGGLTLSKHMEIPFVQEVVAVATSLKDYAPRTDVAIELGGEDAKIIYFTGGIDQRMNGICAGGTGSFIDQMATLLKTDAAGLNEYAKNYKAIYPIAARCGVFAKTDIQPLINEGATKEDLSASIFQAVVNQTISGLACGKPIKGNVAFLGGPLHFLTELKQAFIRTLGLEGDAIIAPEHSHLFAASGAAMNAHADVQSSLGELKEKLSHKIELEFEVTRMEPLFASEKEYEDFTERHNKHNVRKGDFASYKGDLFLGIDAGSTTTKVAVIGDDGSLLYSFYSSNNGSPLKTALKAMKDIYSKMPEGARIVRSCSTGYGEALLKSALLLDEGEVETVAHYTAAAFFDPNVDCILDIGGQDMKCIKIKNNSVDKVQLNEACSSGCGSFIETFAKSLNYEVADFAKIALFAENPIDLGSRCTVFMNSKVKQAQKEGASVADISAGLAYSVIKNALLKVIKLTDPKDLGKQVVVQGGTFYNDAVLRSFERISGCEAIRPDIAGIMGAFGAALIAKDRYTGQKSTMLSFKEINELRFKTSMTRCQGCINHCLLTVNEFTGDRKFISGNRCEKGLGLEKNKEQIPNLFEYKNERVFRHYKPLKKADAPRGVVGIPRVLNMYENYPFWFTFFTKLGYSVKLSPVSSRKIYELGIESIPSESECYPAKLAHGHVTWLIRQGLEYIFYPCIPYERVEVPDAGNHYNCPIVTSYGENIKNNIEELRDDKIKYQNPFISLESEEILTKRLVDFFRKENGIPAAEIKAAAHEGWLEMQAVREDMTKKGKEVLQYLKETGRHGIVLAGRPYHSDPEINHGIPDLITSYGVAVLTEDSISELSEVDRPTIVMDQWMYHSRLYKAASFVAKNDNLDLIQLNSFGCGLDAVTTDQVNDILTKQNKIYTVLKIDEVNNLGAARIRIRSLLAAVKDRERKKIEAKRVDTAHHRVIFTEQMRKDYTILVPDMSPIHFEILESALASCGYKVEVLKADSKCIDYGLKYVNNDACYPSLIVVGQFMQTLLSGKYDLHKVALIITQTGGGCRATNYIGFIRRALEKAGMGYIPVISMSAGIEKNPGLKVNLEMANKALQALIYGDVFMRVLYKTRPYEKVKGSANALHEKWKKIAIESVKKANKKQFKKNIQNIVKEFDELELVDIKKPKVGIVGEILVKFMPLANNFIVELLEEEGAEAVCPDLIDFFMYSLYNANFKAEYLGKKKSSAKINNFLIWFIERYRKCANDALAASKRFHPTVPIQKLAEYASPIVSCGNQTGEGWFLTGEMIELIKSGVPNIVCTQPFGCLPNHVVGKGVIKELRHQYPDSNIVAVDYDPGASEVNQLNRIKLMLSTAGKNLIAESKDNEEPA

SEQ ID NO: 654 - protein, 337 aa, Unknown
  Description of Unknown: uncultivated organism sequence
  Category: MG55 effectors
  Description: MG55-229 effector
MAATMKDIARRTGLGLATISSYFNGGNVREKNRIKIEEAIEELHYEVNEVARGLKTNATKTIGVVIPELNNIFCAEIITGMEDILRSHGYATIVCDCRTDKKLEREAVEFLIRRRVDGIINMPVDETGAHLKRFQKTGRPIVLIDRRIQGIPCDSVLVDNQKAAEEAVELFIEKGHRNIGIIGGPEGIFTAEERLTGYCTALEKAGISIKNSLVYRGDYTIKGGVRGLEELVRNNPDMTAVFVTNYEMTMGAMIGVNELGIQVPGQLSMIGFDNLPFARACRPKLTIVSQPTDGIAREVARIMLERLEKREAGSEEPFMEKLQTEIMEGKSVCVLSR

SEQ ID NO: 655 - protein, 971 aa, Unknown
  Description of Unknown: uncultivated organism sequence
  Category: MG55 effectors
  Description: MG55-230 effector
MTNYKIGIDVGSTTVKCVLISEDKKILYSEYKRHFSRVKEAVLEQLERMFENFEGNFKVAITGSAGLGLSSAADLLFVQEVYSASLAIKDMYPDADCAVELGGEDAKILFLTGGIEQRMNGTCAGGTGAFIDQMATLLKVSGDNLDGLALKAEKKYPIASRCGVFAKSDIQPLLNQGASLSDVAASIFQAVVDQTVAGLAQGRKIQGKVLFLGGPLHFYKALGKAFKDTLKLSDENAIFPEYATCFMAFGAALYADGNPEYFTKEEILRRIRDSKPNSSIVAFKPLFENEEEYKEFKERHSKMSVAKANINTYEGNAYLGIDAGSTTTKIVLLSEDKKILYSHYTENSGRPLDVVCTKLKEIYSIIGDRIKIKSSAVTGYGEELLRAGLKIDFGIVETVAHFNAAIYFNPDVDFIIDIGGQDIKCFKIKNKAIDNIMLNEACSSGCGSFIQTFANALGYSVEDFAKLGLFAKNPVELGSRCTVFMNSAVKQAQKDGATVEDISAGISSSVVKNAIYKVIRAKSAKELGQNVVVQGGTFLNDAVLRSFERELGINVIRPTIAGLMGAYGAALYAIRKSKDKSTIISKEELNNFSYTSKSVNCQRCTAHCLLDIINFSDGRKLISGNRCERGLGKKDSEILPDIYKFKYSYITEGIVNTNEKPLATVGLPLCLNFYEQMPFWNTVFNELGFRTVISDQSSRETFIRGQHTIPSDTVCYPAKLVHGHIFNLLDKNVDFIFYPCQSYNIDEGDSDNHYNCPVVAYYPELLKANMDVLTKDNFICPHMDLNNPANVADVVYHSLKKYNLKKSKVVKAIHNGYEAMKKYQDAIREEGARLVEIARERNLPIIVLAGRPYHIDPEINHGVQKLIATLGAVSISEDAVSYLAKPPKLGILNQWTYHSRLYRAAQYVTTQKDMHLVQLVSFGCGIDAITTDETRSIIENGGKIYTQLKIDEISNLGAIKIRLRSLLAAIE

SEQ ID NO: 656 - protein, 735 aa, Unknown
  Description of Unknown: uncultivated organism sequence
  Category: MG55 effectors
  Description: MG55-231 effector
MGDNMDKELLIMTNVIKRNGKEVKFDIYKIIHAMEKANKEVAPVYQMNEYQIQAAAETVAKKIQASSHAVNVEDIQDMVETAIMEMRAYEVAQKYVRYRYKREMARKANSTDEDILALIDQANEELKQENSNKNPVINSTQRDYMAGEVSKDLTKRLLLPEDIVKAHEEGVIHFHDSDYYAQKEHNCDLINLEDMLQNGTVISETMIEKPHSFFTACNVTTQIVAQVASNQYGGQSFTLSHLAPFVDISRQKIREAVIAERKETGESMDEDIIAKIVNRRLKEEIKSGIQTIQYQLITLMTCNGQAPFVTMFMYLDEVPEGKTREDLALIIEEVLHQRMQGVKNEKGVWITPAFPKLIYVLDEDNITEDAPYYHLTKLAAQCTAKRMVPDYISAKIMREYKGGDVYPCMGCRSFLTEDKEGLGENGAHKYYGRFNQGVVTINLVDVACSSQGNMDAFWQILEERLELCHKALRLRHERLLGTVSDVAPILWQHGALARLKKGEKIDKLLYNNYSTISLGYAGLYEMCVRMLGKSHTTEEGREFSLKVMEKLNDSCKKWREAENISYSVYGTPMESTTYKFAKALKKRFGTIPGVTDKNYITNSYHVHVSEKIDAFSKLAFEADFQKLSPGGAISYVEVPNMQNNIPAVLSLMHFIYENIMYAELNTKSDYCCACGYDGEIQIVEDSYGKLQWRCPNCGNENQEQLSVARRTCGYIGTQFWNQGRTQEIKDRVLHL

SEQ ID NO: 657 - protein, 1439 aa, Unknown
  Description of Unknown: uncultivated organism sequence
  Category: MG55 effectors
  Description: MG55-232 effector
MIKTLHVGLDVGSTTVKIIVMDENLNTIYTDYKRHFSDTKNTICNVLENLIIMYPDTEFTIALTGSGAISAAKFLDLPFIQEVVSCKRAVEKYIPETDVVIELGGEDAKIIYFDKFIEQRMNGTCAGGTGAFIDQMASLLNTDPTGLNELAKSHKLIYPIASRCGVFAKTDIQPLLNEGAAKEDIAASIFQAVVNQTISGLACGRPIRGNVAFLGGPLNYLSELRNRFIETLNLKDNEIIVPNEAHLLVAKGAALDSLNSHTITIEKLKSKIEVLKSSHDDTSNPLNPLFSIDAEYDEFKKRHEKDKVKRADFKTFKGNCFLGIDAGSTTTKLVVISEDGTLLYSLYGSNEGNPLQSVINMLKKLYAEKPSEAIIRFSGVTGYGEKLIQTALNVDLNEIETIAHYTAAKEFMPNVTSIVDIGGQDMKYIKMKNGAIDNIMLNEACSSGCGSFIETFAKSLGLSIQDFVQSALEARRPVDLGSRCTVFMNSKIKQAQKEGYSVGDISAGLSYSVIKNAIQKVMKVRDVKKLGAHIVVQGGTFYNDAVLRAFELIVGRNVVRPDIAGLMGAYGVALLAKEQYENNLDMDYVSSISNINELDKLEINITHIRCQGCENHCLLTINKFSNGTKYISGNRCEKGAGIVDKTLDRPNLIKYKFERTFNYTPLEEKNAPRGTIGIPRVLNMYEDYPFWFTFLTNLGFRVILSEKSNRKTYEKGMESMPSESVCFPAKLSHGHIIGLINSGIKTIFYPCIPYSRKEYQKADNHYNCPIVISYSEVLKNNVEELKDKNIKFLNPFLPFEPDKLAEIIMNLPEFKEYNFTKKELLSAAKKAETEYQNYKSDIHNKGQETLKFMEENNLKGIVLAGRPYHVDPEVNHGIDTLITSLGLCVLTEDSISNLTEAKRPLRVVDQWVFHARLYAAADFVGKHDNLELVQLNSFGCGVDAVTTDQVEEILTSYEKMYTLIKIDEINNLGAIRIRIRSLLASMNKRIKDNNSSMCNGNYEVNKKIFTKEMRKDYTILMPQMAPIHFEFLESAMKNSGYKMELLRDCTQHTVETGLKYVNNDACYPSILVTGQMIEALESGKYDLNKTALIMSQTGGGCRATNYIGFIRKALKDAGFENVPVISFNVVGMEKMPGFKLTIPLIERLIKSCIYADLLQKMLTKNRAYEINKGKTKELFDYWMEKCKKLVNKSSIKEFKQSIFDIVSDFEKIEIDTSVIKPKVGIVGEVLIKYHPFGNNFVADKLEQEGAEVILPDFMGFIKFIATHKITFNKLIKTDAIKAKLFKTAIKLIDLLEKPVISALNNSKKGYLLPCNIWDLEEKVNDILSIGNQTGEGWFLTAEMIEYIEHDIPNIVCVQPFACLPNHVVGKGVIKTIRSKFPEANIAPIDYDPGASEANQTNRIKLMMTVAKDNLKNKNNINKAIKKENYIIDEKNKISN

SEQ ID NO: 658 - protein, 722 aa, Unknown
  Description of Unknown: uncultivated organism sequence
  Category: MG55 effectors
  Description: MG55-233 effector
MKIIKRNGAEVKFDVSKILNAIRKANREVSEDNRLTEEQIATIAKKVTELAGDLNRAVGVEEIQDFVENQIMDQKAYAVARKYITYRYSRALVRRANTTDERILTLIECNNEEVKQENSNKNPTVNSVQRDYMAGEVSRDLTRRLLLPREIVEAHDAGLIHFHDADYYAQHMHNCDLVNLEDMLQNGTVISGTFIEKPHSFSTACNIATQIIAQVASNQYGGQSISLTHLAPFVDVSRQKIRAEVREELADVGVMEDTVNRIAEKRLRAEIKKGIQTIQYQVVTLLTTNGQAPFVTVFMYLGEARNERERADLAMIIEETLNQRIEGVKNESGVWVTPAFPKLIYVLEEDNVREGSRYWYLTELAAKCTAKRMVPDYISEKKMLEFKVDKNGEGHCYTCMGCRSFLTPYVDETGKPKYYGRFNQGVVTINLPDVALSSGGDMEKFWQIFDERLELCHRALMERHNRLKGTLSDAAPILWQYGALARLKKGETIDKLLYGGYSTISLGYAGLYECVKYMTGKTHTDPSAKPFALSVMQHMNDKCKEWKKMHNIDFSLYGTPLESTTYKFAKALQKRFGIIEGVTDKNYITNSYHVHVTEHIDAFTKLKFESEFQQLSPGGAISYVEVPNMQDNIPAVLSVMQYIYENIMYAELNTKSDYCQVCGYDGEIQIVEDGGKLYWECPHCHNRDQSKMNVARRTCGYIGTQYWNQGRTQEIKDRVLHL

SEQ ID NO: 659 - protein, 1284 aa, Unknown
  Description of Unknown: uncultivated organism sequence
  Category: MG55 effectors
  Description: MG55-234 effector
MKLDFNTLGIDIGSTTVKIAILNKDGEIIFSDYQRHYANIQETLAKIIDEAYEEFGDIPVSPMITGSGGLTLSKHMEIPFVQEVVAVATSLKDYAPRTDVAIELGGEDAKIIYFTGGIDQRMNGICAGGTGSFIDQMATLLKTDAAGLNEYAKNYKAIYPIAARCGVFAKTDIQPLINEGATKEDLSASIFQAVVNQTISGLACGKPIKGNVAFLGGPLHFLTELKQAFIRTLGLEGDAIIAPEHSHLFAASGAAMNAHADVQSSLGELKEKLSHKIELEFEVTRMEPLFASEKEYEDFTERHNKHNVRKGDFASYKGDLFLGIDAGSTTTKVAVIGDDGSLLYSFYSSNNGSPLKTALKAMKDIYSKMPEGARIVRSCSTGYGEALLKSALLLDEGEVETVAHYTAAAFFDPNVDCILDIGGQDMKCIKIKNNSVDKVQLNEACSSGCGSFIETFAKSLNYEVADFAKIALFAENPIDLGSRCTVFMNSKVKQAQKEGASVADISAGLAYSVIKNALLKVIKLTDPKDLGKQVVVQGGTFYNDAVLRSFERISGCEAIRPDIAGIMGAFGAALIAKDRYTGQKSTMLSFKEINELRFKTSMTRCQGCINHCLLTVNEFTGDRKFISGNRCEKGLGLEKNKEQIPNLFEYKNERVFRHYKPLKKADAPRGVVGIPRVLNMYENYPFWFTFFTKLGYSVKLSPVSSRKIYELGIESIPSESECYPAKLAHGHVTWLIRQGLEYIFYPCIPYERVEVPDAGNHYNCPIVTSYGENIKNNIEELRDDKIKYQNPFISLESEEILTKRLVDFFRKENGIPAAEIKAAAHEGWLEMQAVREDMTKKGKEVLQYLKETGRHGIVLAGRPYHSDPEINHGIPDLITSYGVAVLTEDSISELSEVDRPTIVMDQWMYHSRLYKAASFVAKNDNLDLIQLNSFGCGLDAVTTDQVNDILTKQNKIYTVLKIDEVNNLGAARIRIRSLLAAVKDRERKKIEAKRVDTAHHRVIFTEQMRKDYTILVPDMSPIHFEILESALASCGYNVEVLKADSKCIDYGLKYVNNDACYPSLIVVGQFMQALLSGKYDLHKVALIITQTGGGCRATNYIGFIRRALEKAGMGYIPVISMSAGIEKNPGLKVNLEMANKALQALIYGDVFMRVLYKTRPYEKVKGSANALHEKWKKIAIESVKKANKKQFKKNIQNIVKEFDELELVDIKKPKVGIVGEILVKFMPLANNFIVELLEEEGAEAVCPDLIDFFMYSLYNANFKAEYLGKKKSSAKINNFLIWFI

SEQ ID NO: 660 - protein, 978 aa, Unknown
  Description of Unknown: uncultivated organism sequence
  Category: MG55 effectors
  Description: MG55-235 effector
MSRSVGVDIGSTTAKVVVMENDQVLFRRYERHYSQVRQKTLEIIRQAEKEIGSEPFTIAISGSAGLGVAKAADIPFVQEGFATSELVRKKIPDADAVIELGGEDAKILFFDKSGTFEERMNGSCAGGTGAFIDQMATLLAVTPEELDRLSADHKFIYTIASRCGVFAKTDIQPLLNQGASKSDIAASIFQAVVDQTITGLAQGRKIQGKVLFLGGPLHFFTGLQERFVETLKLSEENAVFPEYGLYAVGMGAAIYAEEEGKTFTYDELVEKLENAKDEAVTTLRLQPLFRDEAEYEAFKARHAKATIETVPIENYTGKAFLGIDCGSTTTKLCLIDDNYNILYSYYDSNKGNPVKIVREQLLHILDLCGDRIQICGSAVTGYGEDLIKNAFNIDMGLVETMAHLRAASHFNPNVDFVLDIGGQDIKCFKIRNGVIDNIVLNEACSSGCGSFIETFAKSMGYDAASFAKEGLFAQHPVDLGSRCTVFMNSSVKQAQKEGATLQDISAGLSMSVTKNAIYKVIRAVSKEDLGTNIVVQGGTFLNDAILRSFELEIERDVIRPSISGLMGAYGAALYARELRLETSAMMNKEQLEQFQHTSKTISCGICNNHCNLTVNTFDGKRKFISGNRCEKPLGVKANKELPNMFQYKMEKIRALKGVDGGMGKIGIPMGLNMYENIAFWYAFLTRLGFEVVLSDPSTRALYRKGQDTIPSDTVCYPAKLMHGHIKNLIEKGCTRIFYPCLPYNFDEKVGDNHYNCPVVAYYPELLEANMDDLKTVKFYNGYFGIHRPKDFDKKAYEYFKDEFNFPHKLVKQAAKEAYAVYNSWMEDIRNEGARAIHYAREHGCKIIVLAGRPYHIDPEINHGLDKMLSSFNLVIVTEDSVAHLGHAGKVHVLNQWTYHSRLYNAAKYVTTQLDMELIQIVSFGCGIDAITTDEVRSILENGDKLYTQLKIDEINNLSAIRIRIRSLLAAIKAKEAQK

SEQ ID NO: 661 - protein, 731 aa, Unknown
  Description of Unknown: uncultivated organism sequence
  Category: MG55 effectors
  Description: MG55-236 effector
MKVVKRDGHIVDFDRSKIVTAIRKANAEVDPEEKISDDKIETIVHGIETKKRKRILVEDIQDIIEQDLMEDGKYVLAKTYIIYRYTRELVRKANTTDDSILSLIKNRNKDVMEENSNKNATVASTQRDLIAGEVSKDLTRRVLLPEKISKAHDEGVLHFHDADYFLQPIFNCCLINIKDMLENGTVMNGKLIESPKSFQVACTVMTQIIASVASSQYGGQSVDLIHLGKYLRKSYEKYKERFTKDFGDKVDADTLEAMIQERLNDELRSGVQTIQYQINTLMTTNGQSPFVTLFLHLDPEDEYVEENARIIIEILRQRYEGIKNEAGVYVTPAFPKLIYVLDEFNCLKGGKYDYITEMAVKCSAKRMYPDYISAKKMRENYEGNVFSPMGCRSFLAPWKDENGQYKFEGRFNQGVVSLNLPQIGIIARGDEELFWKILDERLELCYEALMCRHNALMGVTSDVSPIHWQYGAIARLGKGERIDKYLLNGYSSISLGYIGLYEVTKLMKGVSHTTPEGQEFALRIMHKLRNACDTWKKETGLGFALYGTPAESLCYRFARIDKERFGTIPDITDKGYYTNSYHVDVREDIDAFEKFTFESQFQSISSGGAISYVEIPNMANNLEALTELVKFLYDNIQYAEFNTKSDYCHVCGFDGEIKVNENNEWECPVCHNKDHSKMNVTRRTCGYLGENFWNVGKTKEIKSRVLHVGTPDYIAETVTASASKIFPEKKF

SEQ ID NO: 662 - protein, 708 aa, Unknown
  Description of Unknown: uncultivated organism sequence
  Category: MG55 effectors
  Description: MG55-237 effector
MKVIKRDGHTVTYDRSKIITAIKKANAEVEPCEKVTDEKIEEIVQGIESKNRPRMLVEDIQDIIEQKLMADGKFVLAKTYIIYRYTRELVRKANTTDDSILSLIKNRNKDVMEENSNKNATVASTQRDLIAGEVSKDLTRRVLLPEKISKAHDEGVLHFHDADYFLQPIFNCCLINIGDMLDNGTVMNGKLIESPKSFQVACTVMTQIISSVASSQYGGQSVDIRHLGKYLRKSYNKYKNKLVEEFGDKIDDAILEQMAQDRLQDELRSGVQTIQYQINTLMTTNGQSPFVTLFLNLDPNDEYIEENAIIVEEILRQRLEGIKNEKGVYVTPAFPKLIYVLDEHNCLKGGKYDYITKLAVKCSAKRLYPDYISAKKMRENYEGNVFSCMGCRSFLSPWKDENGNYKWEGRFNQGVVSLNLPQIGILAKGNEEKFWSMLDERLDLCYEALMCRHNALLGVTSDVSPVHWQYGAIARLKKGEKIDPLLKDGYSTISLGYIGLYEVTKLMTGKSHTEPEGEEFALRVMNRLRKACDTWKEETGLGFGLYGTPAESLCYRFARIDQERFGTIEDVTDKGYYTNSYHVDVREKIDAFSKFRFESQFQTISSGGAISYVEIPNMRHNLEALEEIVRFIYDNIQYAEFNTKSDYCHVCDYDGEIMINDDNEWECPQCGNKDHSKMNVTRRTCGYLGENFWNVGKTKEIKARVLHL

SEQ ID NO: 663 - protein, 1439 aa, Unknown
  Description of Unknown: uncultivated organism sequence
  Category: MG55 effectors
  Description: MG55-238 effector
MIKTLHVGLDVGSTTVKIIVMDENLNTIYTDYKRHFSDTKNTICNVLENLIIMYPNTEFTIALTGSGAISAAKFLDLPFIQEVVSCKRAVEKYIPETDVVIELGGEDAKIIYFDKFIEQRMNGTCAGGTGAFIDQMASLLNTDPTGLNELAKSHKLIYPIASRCGVFAKTDIQPLLNEGAAKEDIAASIFQAVVNQTISGLACGRPIRGNVAFLGGPLNYLSELRNRFIETLNLKDNEIIVPNEAHLLVAKGAALDSLNSHTITIEKLKSKIEVLKSSHDDTSNPLNPLFSIDAEYDEFKKRHEKDKVKRADFKTFKGNCFLGIDAGSTTTKLVVISEDGTLLYSLYGSNEGNPLQSVINMLKKLYAEKPSEAVIRFSGVTGYGEKLIQTALNVDLNEIETIAHYTAAKEFMPNVTSIVDIGGQDMKYIKMKNGAIDNIMLNEACSSGCGSFIETFAKSLGLSIQDFVQSALEARRPVDLGSRCTVFMNSKIKQAQKEGYSVGDISAGLSYSVIKNAIQKVMKVRDVKKLGAHIVVQGGTFYNDAVLRAFELIVGRNVVRPDIAGLMGAYGVALLAKEQYENNLDMDYVSSISNINELDKLEINITHIRCQGCENHCLLTINKFSNGTKYISGNRCEKGAGIVDKTLDRPNLIKYKFERTFNYTPLEEKNAPRGTIGIPRVLNMYEDYPFWFTFLTNLGFRVILSEKSNRKTYEKGMESMPSESVCFPAKLSHGHIIGLINSGIKTIFYPCIPYSRKEYQKADNHYNCPIVISYSEVLKNNVEELKDKNIKFLNPFLPFEPDKLAEIIMNLPEFKEYNFTKKELLSAAKKAETEYQNYKSDIHNKGQETLKFMEENNLKGIVLAGRPYHVDPEVNHGIDTLITSLGLCVLTEDSISNLTEAKRPLRVVDQWVFHARLYAAADFVGKHDNLELVQLNSFGCGVDAVTTDQVEEILTSYEKMYTLIKIDEINNLGAIRIRIRSLLASMNKRIKDNNSSMCNGNYEVNKKIFTKEMRKDYTILMPQMAPIHFEFLESAMKNSGYKMELLRDCTQHTVETGLKYVNNDACYPSILVTGQMIEALESGKYDLNKTALIMSQTGGGCRATNYIGFIRKALKDAGFENVPVISFNVVGMEKMPGFKLTIPLIERLIKSCIYADLLQKMLTKNRAYEINKGKTKELFDYWMEKCKKLVNKSSIKEFKQSIFDIVSDFEKIEIDTSVIKPKVGIVGEVLIKYHPFGNNFVADKLEQEGAEVILPDFMGFIKFIATHKITFNKLIKTDAIKAKLFKTAIKLIDLLEKPVISALNNSKKGYLLPCNIWDLEEKVNDILSIGNQTGEGWFLTAEMIEYIEHDIPNIVCVQPFACLPNHVVGKGVIKTIRSKFPEANIAPIDYDPGASEANQTNRIKLMMTVAKDNLKNKNNINKAIKKENYIIDEKNKISN

SEQ ID NO: 664 - protein, 1439 aa, Unknown
  Description of Unknown: uncultivated organism sequence
  Category: MG55 effectors
  Description: MG55-239 effector
MIKTLHVGLDVGSTTVKIIVMDENLNTIYTDYKRHFSDTKNTICNVLENLIIMYPNTEFTIALTGSGAISAAKFLDLPFIQEVVSCKRAVEKYIPETDVVIELGGEDAKIIYFDKFIEQRMNGTCAGGTGAFIDQMASLLNTDPTGLNELAKSHKLIYPIASRCGVFAKTDIQPLLNEGAAKEDIAASIFQAVVNQTISGLACGRPIRGNVAFLGGPLNYLSELRNRFIETLNLKDNEIIVPNEAHLLVAKGAALDSLNSHTITIEKLKSKIEVLKSSHDDTSNPLNPLFSIDAEYDEFKKRHEKDKVKRADFKTFKGNCFLGIDAGSTTTKLVVISEDGTLLYSLYGSNEGNPLQSVINMLKKLYAEKPSEAVIRFSGVTGYGEKLIQTALNVDLNEIETIAHYTAAKEFMPNVTSIVDIGGQDMKYIKMKNGAIDNIMLNEACSSGCGSFIETFAKSLGLSIQDFVQSALEARRPVDLGSRCTVFMNSKIKQAQKEGYSVGDISAGLSYSVIKNAIQKVMKVRDVKKLGAHIVVQGGTFYNDAVLRAFELIVGRNVVRPDIAGLMGAYGVALLAKEQYENNLDMDYVSSISNINELDKLEINITHIRCQGCENHCLLTINKFSNGAKYISGNRCEKGAGIVDKTLDRPNLIKYKFERTFNYTPLEEKNAPRGTIGIPRVLNMYEDYPFWFTFLTNLGFRVILSEKSNRKTYEKGMESMPSESVCFPAKLSHGHIIGLINSGIKTIFYPCIPYSRKEYQKADNHYNCPIVISYSEVLKNNVEELKDKNIKFLNPFLPFEPDKLAEIIMNLPEFKEYNFTKKELLSAAKKAETEYQNYKSDIHNKGQETLKFMEENNLKGIVLAGRPYHVDPEVNHGIDTLITSLGLCVLTEDSISNLTEAKRPLRVVDQWVFHARLYAAADFVGKHDNLELVQLNSFGCGVDAVTTDQVEEILTSYEKMYTLIKIDEINNLGAIRIRIRSLLASMNKRIKDNNSSMCNGNYEVNKKIFTKEMRKDYTILMPQMAPIHFEFLESAMKNSGYKMELLKDCTQHTVETGLKYVNNDACYPSILVTGQMIEALESGKYDLNKTALIMSQTGGGCRATNYIGFIRKALKDAGFENVPVISFNVVGMEKMPGFKLTIPLIERLIKSCIYADLLQKMLTKNRAYEINKGKTKELFDYWMEKCKKLVNKSSIKEFKQSIFDIVSDFEKIEIDTSVIKPKVGIVGEVLIKYHPFGNNFVADKLEQEGAEVILPDFMGFIKFIATHKITFNKLIKTDAIKAKLFKTAIKLIDLLEKPVISALNNSKKGYLLPCNIWDLEGKVNDILSIGNQTGEGWFLTAEMIEYIEHDIPNIVCVQPFACLPNHVVGKGVIKTIRSKFPEANIAPIDYDPGASEANQTNRIKLMMTVAKDNLKNKNNINKAIKKENYIIDEKNKISN

SEQ ID NO: 665 - protein, 1439 aa, Unknown
  Description of Unknown: uncultivated organism sequence
  Category: MG55 effectors
  Description: MG55-240 effector
MIKTLHVGLDVGSTTVKIIVMDENLNTIYTDYKRHFSDTKNTICNVLENLIIMYPDTEFTIALTGSGAISAAKFLDLPFIQEVVSCKRAVEKYIPETDVVIELGGEDAKIIYFDKFIEQRMNGTCAGGTGAFIDQMASLLNTDPTGLNELAKSHKLIYPIASRCGVFAKTDIQPLLNEGAAKEDIAASIFQAVVNQTISGLACGRPIRGNVAFLGGPLNYLSELRNRFIETLNLKDNEIIVPNEAHLLVAKGAALDSLNSHTITIEKLKSKIEVLKSSHDDTSNPLNPLFSIDAEYDEFKKRHEKDKVKRADFKTFKGNCFLGIDAGSTTTKLVVISEDGTLLYSLYGSNEGNPLQSVINMLKKLYAEKPSEAIIRFSGVTGYGEKLIQTALNVDLNEIETIAHYTAAKEFMPNVTSIVDIGGQDMKYIKMKNGAIDNIMLNEACSSGCGSFIETFAKSLGLSIQDFVQSALEARRPVDLGSRCTVFMNSKIKQAQKEGYSVGDISAGLSYSVIKNAIQKVMKVRDVKKLGAHIVVQGGTFYNDAVLRAFELIVGRNVVRPDIAGLMGAYGVALLAKEQYENNLDMDYVSSISNINELDKLEINITHIRCQGCENHCLLTINKFSNGTKYISGNRCEKGAGIVDKTLDRPNLIKYKFERTFNYTPLEEKNAPRGTIGIPRVLNMYEDYPFWFTFLTNLGFRVILSEKSNRKTYEKGMESMPSESVCFPAKLSHGHIIGLINSGIKTIFYPCIPYSRKEYQKADNHYNCPIVISYSEVLKNNVEELKDKNIKFLNPFLPFEPDKLAEIIMNLPEFKEYNFTKKELLSAAKKAETEYQNYKSDIHNKGQETLKFMEENNLKGIVLAGRPYHVDPEVNHGIDTLITSLGLCVLTEDSISNLTEAKRPLRVVDQWVFHARLYAAADFVGKHDNLELVQLNSFGCGVDAVTTDQVEEILTSYEKMYTLIKIDEINNLGAIRIRIRSLLASMNKRIKDNNSSMCNGNYEVNKKIFTKEMRKDYTILMPQMAPIHFEFLESAMKNSGYKMELLKDCTQHTVETGLKYVNNDACYPSILVTGQMIEALESGKYDLNKTALIMSQTGGGCRATNYIGFIRKALKDAGFENVPVISFNVVGMEKMPGFKLTIPLIERLIKSCIYADLLQKMLTKNRAYEINKGKTKELFNYWMEKCKKLVNKSSIKEFKQSIFDIVSDFEKIEIDTSVIKPKVGIVGEVLIKYHPFGNNFVADKLEQEGAEVILPDFMGFIKFIATHKITFNKLIKTDAIKAKLFKTAIKLIDLLEKPVISALNNSKKGYLLPCNIWDLEEKVNDILSIGNQTGEGWFLTAEMIEYIEHDIPNIVCVQPFACLPNHVVGKGVIKTIRSKFPEANIAPIDYDPGASEANQTNRIKLMMTVAKDNLKNKNNINKAIKKENYIIDEKNKISN

SEQ ID NO: 666 - protein, 354 aa, Unknown
  Description of Unknown: uncultivated organism sequence
  Category: MG55 effectors
  Description: MG55-241 effector
MRSKVEKLREEKGRLDQLEQRDWLTGQYNRVATERLVNRLIEERGCGVMLVLDVDHLRKINGRHGHIVGDHVLRAVAGVLDSMVFRHDVVGRIDGDMFVVFMPVDQEERFLQERCRQIRERLKEIRLPGDLSLSVSLNAGGAVWRSGDDYNSMFERAKEQLSSEKPIGPARERSAGSGARKGNFMVDLRQVRGELAEQTMIPGAYCQDYETFKNIYRFVERRLRRAKISSYILLLTLTDGNGDFPPLEKRERQMATLRELIQNSLRSGDVFTQYSSCQYLVMVADASAENVEMIASRIREAFYRIIDNGTGQVLLHHCYPMWPAGRPARDPGAGRDEDGVDPGNALGNVSGEFK

SEQ ID NO: 667 - protein, 967 aa, Unknown
  Description of Unknown: uncultivated organism sequence
  Category: MG55 effectors
  Description: MG55-242 effector
MRLGLDIGSTTIKCVVLDDNDKLLYSTYERHYSQITTKIGEILTRVRKEIDGVENALVAMSGSAGMGVADQCDITFVQEVYATRVATNTFIPGTDVVIELGGEDAKILFLSGGMEVRMNGTCAGGTGAFIDQMATLLNVPLEEMNDLAKGYEKTYTIASRCGVFAKTDIQPLLNQGARKADIAQSIFHAVVNQTVAGLAQGREIEGNVVYLGGPLTFMEELRKAFDEELGTKGTCPENSLYYVACGAALCAESTINFDEIIEKVSHYTGSGNFAFNPPLFKNEEEYEQFKARHAKATVKEVPLEDYDGDCYIGMDAGSTTVKAVVMGKNGELLYSKYLSNSGNPVPIIKDFLNELYDKKPNIKIKSSAVTGYGEDIIKNAFCVDYGIVETVAHFTAAKSFMPDVEFVIDIGGQDIKCFKVHNGAIDNIFLNEACSSGCGSFLQTFANALGYSIQDFAQLGIFGKHPVDLGSRCTVFMNSSVKQAQKDGATIEDISSGLSLSVVKNALYKVIRASGPDELGKKIVVQGGTFLNDAVLRAFEQEMGVNVVRPTISGLMGAYGAAMYAQSKSEGSAEGSTLLKKPDLENFVHEIKVVNCGMCNNNCRLTVNTFADGRKFIAGNRCERPITKKSPDESLNMYEYKLKVLREYKPVKGSRGKIGIPMGLNMFELLPFWHRFFTELGFEVIRSPFSTRKLYQKGQQTIPSDTVCFPAKLMHGHVKALIDMGVDTIFYPCMSYNIDEHLGDNHYNCPVVAYYPEVIYNNMKEVHNVTFIKDYFGIHRPKDFYKKAYEDLSKYFPDLTQKEVKNAAKCAYEEYDNYFAKIRQHGNEIIEKAEKEGKDIIVLSGRPYHIDPEINHGISKMIASFGVAIVSEDCVSDRVEKFKVGVLNQWTYHSRLYAAAKYVSTRKDMNLVQLVSFGCGVDAITTDEVRDILEKNGKIYTQIKIDEITNLGAVKIRIRSLLAAIGK

SEQ ID NO: 668 - protein, 983 aa, Unknown
  Description of Unknown: uncultivated organism sequence
  Category: MG55 effectors
  Description: MG55-243 effector
MLAMNESQEKYTLGIDVGSTTVKAVLLNSKGEVLYVSYKRHFSKVRETSESEVKKIREKFGNLEVKFAFTGSAGLGLSERSHLPFVQEVQSSYVAIKRLYPMTDSAIELGGEDAKIIFITGGLEERMNGQCAGGTGAFIDQMATLLNVTVPGLEELATQSKKTYPIASRCGVFAKSDIQALLNQGASKEDVAMSIFYAVADQTIAGLAQGRRIQGHVLFLGGPLHFLNSLGKAFKDRLKLTDEEAIFPEDSDTFVAKGAAIYAEGFKETISLDEIADHLEQANMKGTITTGKPLFNNQEEYDSFVASHQDFDIKRADLRTYEGKAYLGIDAGSTTTKIVLLSENNEILYDHYESNLGLPIDRIVEQLKTIYSLANPKLDIVGSAVTGYGEDLIRAALHVDYGMVETVAHFKAARFYEPDVNFVIDIGGQDIKCFNVKNGAIDSIMLNEACSSGCGSFLQTFAQSLGYGVEEFAQTAYFAKNPVLLGSRCTVFMNSSVKQAQREGAPVDDIAAGLCRSVVKNALYKVIRVRDAKELGEKIVCQGGTFLNNAVLRSFEQEIGHQVIRPSIAGLMGAFGAALTAKEKGGERGLISPKDLDNFGYTSTHSTCHMCGARCPLTLLKFPNGQIFLSGNKCDKPEGRRRSSDALDLYVYKRNRIKELLPSPASPKGVVGLPMSLVMWEQLPFWDAFFKHLGFDTLVSPFSTRKMYREGQKTIPSDTACYPAKLMHGHVDYLLQQNPTFIFYPSESYNVNEKRGDNHFNCPVVAYYGELIKKNDERFPTATFLDPFVDLSAPKKAIATLTDCLSSYGVKKKEVKNAFEFAYQAELKYRADLKQKAKQIIAEAREKKMITVVLAGRPYHVDPEVSHGIERLLDSLGVAVVSEDALDYSEQPQSKVHVLNQWTFHARLYDAANYVAKHEDMELVQLISFGCGVDAVTSDEVRRILESQHKLYTGIKIDEINNLGAVRIRLRSLLAAVEEKKHV

SEQ ID NO: 669 - protein, 720 aa, Unknown
  Description of Unknown: uncultivated organism sequence
  Category: MG55 effectors
  Description: MG55-244 effector
MKIIKRSGSEDTFDARKITAAVTKANYEVPTKERLSKEQIKSITADVENICLDMNRALSVEEIQDLVEEQIMDRRAFAVARKYITYRYNRALLRKANSTDKQILSLLECNNEMVKQENSNKNPTVNSVQRDYMAGEVSKDITKRFLLPSEIVRAHEQGIIHFHDSDYFAQHMHNCCLVNLEDMLQNGTVISETMIEKPKSFSTACNIATQSIAQIASSQYGGQSISLTHLAPFVDISRQKYKKQVENELKEAGLSYNSKQVDEIAEIRVRDEIKRGVQMIQYQVITLMTTNGQAPFVSVFMYLDEAPEGRLREDLALIMEEILRQRMQGVKNEKGVYITPAFPKLLYVLEEDNVREGSKYWYLTQLAAKCTAKRMVPDYISEKIMKKMKDGNCYPCMGCRSFLTVYHDEKDRPKFYGRFNQGVVTINLVDVACSSDGDEETFWKILDKRLELCKKALMYRHNRLKGTPSDVAPILWQYGALARLKKGEVIDKLLYNGYSTISLGYAGLCECTRYMTGKSHTDPSATPFALKVMEKLNDACSRWREEENIDFSLYGTPLESTTYKFAKCLQKRFGIIKGVTDKNYITNSYHVHVTEEINAFDKLKFEAQFQNLSPGGAVSYVEVPNMENNIDAVLQVMQFIYDNIMYAELNTKSDYCQVCDYSGQIEIVNDEHGKLIWKCPNCGNTDQDKMNVARRTCGYIGTQFWNQGRTQEIKERVLHL

SEQ ID NO: 670 - protein, 1439 aa, Unknown
  Description of Unknown: uncultivated organism sequence
  Category: MG55 effectors
  Description: MG55-245 effector
MIKTLHVGLDVGSTTVKIIVMDENLNTIYTDYKRHFSDTQNTICNVLENLIIMYPDTEFTIALTGSGAISAAKFLDLPFIQEVVSCKRAVEKYIPETDVVIELGGEDAKIIYFDKFIEQRMNGTCAGGTGAFIDQMASLLNTDPTGLNELAKSHKLIYPIASRCGVFAKTDIQPLLNEGAAKEDIAASIFQAVVNQTISGLACGRPIRGNVAFLGGPLNYLSELRNRFIETLNLKDNEIIVPNEAHLLVAKGAALDSLNSHTITIEKLKSKIEVLKSSHDDTSNPLNPLFSIDAEYDEFKKRHEKDKVKRADFKTFKGNCFLGIDAGSTTTKLVVISEDGTLLYSLYGSNEGNPLQSVINMLKKLYAEKPSEAVIRFSGVTGYGEKLIQTALNVDLNEIETIAHYTAAKEFMPNVTSIVDIGGQDMKYIKMKNGAIDNIMLNEACSSGCGSFIETFAKSLGLSIQDFVQSALEARRPVDLGSRCTVFMNSKIKQAQKEGYSVGDISAGLSYSVIKNAIQKVMKVRDVKKLGAHIVVQGGTFYNDAVLRAFELIVGRNVVRPDIAGLMGAYGVALLAKEQYKNNLDMDYVSSISNINELDKLEINITHIRCQGCENHCLLTINKFSNGAKYISGNRCEKGAGIVDKTLDRPNLIKYKFERTFNYTPLEEKNAPRGTIGIPRVLNMYEDYPFWFTFLTNLGFRVILSEKSNRKTYEKGMESMPSESVCFPAKLSHGHIIGLINSGIKTIFYPCIPYSRKEYQKADNHYNCPIVISYSEVLKNNVEELKDKNIKFLNPFLPFEPDKLAEIIMNLPEFKEYNFTKKELLSAAKKAETEYQNYKSDIHNKGQETLKFMEENNLKGIVLAGRPYHVDPEVNHGIDTLITSLGLCVLTEDSISNLTEAKRPLRVVDQWVFHARLYAAADFVGKHDNLELVQLNSFGCGVDAVTTDQVEEILTSYEKMYTLIKIDEINNLGAIRIRIRSLLASMNKRIKDNNSSMCNGNYEVNKKIFTKEMRKDYTILMPQMAPIHFEFLESAMKNSGYKMELLKDCTQHTVETGLKYVNNDACYPSILVTGQMIEALESGKYDLNKTALIMSQTGGGCRATNYIGFIRKALKDAGFENVPVISFNVVGMEKMPGFKLTIPLIERLIKSCIYADLLQKMLTKNRAYEINKGKTKELFDYWMEKCKKLVNKSSIKEFKQSIFDIVSDFEKIEIDTSVIKPKVGIVGEVLIKYHPFGNNFVADKLEQEGAEVILPDFMGFIKFIATHKITFNKLIKTDAIKAKLFKTAIKLIDLLEKPVISALNNSKKGYLLPCNIWDLEGKVNDILSIGNQTGEGWFLTAEMIEYIEHDIPNIVCVQPFACLPNHVVGKGVIKTIRSKFPEANIAPIDYDPGASEANQTNRIKLMMTVAKDNLKNKNNINKAIKKENYIIDEKNKISN

SEQ ID NO: 671 - protein, 1439 aa, Unknown
  Description of Unknown: uncultivated organism sequence
  Category: MG55 effectors
  Description: MG55-246 effector
MIKTLHVGLDVGSTTVKIIVMDENLNTIYTDYKRHFSDTKNTICNVLENLIIMYPNTEFTIALTGSGAISAAKFLDLPFIQEVVSCKRAVEKYIPETDVVIELGGEDAKIIYFDKFIEQRMNGTCAGGTGAFIDQMASLLNTDPTGLNELAKSHKLIYPIASRCGVFAKTDIQPLLNEGAAKEDIAASIFQAVVNQTISGLACGRPIRGNVAFLGGPLNYLSELRNRFIETLNLKDNEIIVPNEAHLLVAKGAALDSLNSHTITIEKLKSKIEVLKSSHDDTSNPLNPLFSIDAEYDEFKKRHEKDKVKRADFKTFKGNCFLGIDAGSTTTKLVVISEDGTLLYSLYGSNEGNPLQSVINMLKKLYAEKPSEAVIRFSGVTGYGEKLIQTALNVDLNEIETIAHYTAAKEFMPNVTSIVDIGGQDMKYIKMKNGAIDNIMLNEACSSGCGSFIETFAKSLGLSIQDFVQSALEARRPVDLGSRCTVFMNSKIKQAQKEGYSVGDISAGLSYSVIKNAIQKVMKVRDVKKLGAHIVVQGGTFYNDAVLRAFELIVGRNVVRPDIAGLMGAYGVALLAKEQYENNLDMDYVSSISNINELDKLEINITHIRCQGCENHCLLTINKFSNGTKYISGNRCEKGAGIVDKTLDRPNLIKYKFERTFNYTPLEEKNAPRGTIGIPRVLNMYEDYPFWFTFLTNLGFRVILSEKSNRKTYEKGMESMPSESVCFPAKLSHGHIIGLINSGIKTIFYPCIPYSRKEYQKADNHYNCPIVISYSEVLKNNVEELKDKNIKFLNPFLPFEPDKLAEIIMNLPEFKEYNFTKKELLSAAKKAETEYQNYKSDIHNKGQETLKFMEENNLKGIVLAGRPYHVDPEVNHGIDTLITSLGLCVLTEDSISNLTEAKRPLRVVDQWVFHARLYAAADFVGKHDNLELVQLNSFGCGVDAVTTDQVEEILTSYEKMYTLIKIDEINNLGAIRIRIRSLLASMNKRIKDNNSSMCNGNYEVNKKIFTKEMRKDYTILMPQMAPIHFEFLESAMKNSGYKMELLRDCTQHTVETGLKYVNNDACYPSILVTGQMIEALESGKYDLNKTALIMSQTGGGCRATNYIGFIRKALKDAGFENVPVISFNVVGMEKMPGFKLTIPLIERLIKSCIYADLLQKMLTKNRAYEINKGKTKELFDYWMEKCKKLVNKSSIKEFKQSIFDIVSDFEKIEIDTSVIKPKVGIVGEVLIKYHPFGNNFVADKLEQEGAEVILPDFMGFIKFIATHKITFNKLIKTDAIKAKLFKTAIKLIDLLEKPVISALNNSKKGYLLPCNIWNLEEKVNDILSIGNQTGEGWFLTAEMIEYIEHDIPNIVCVQPFACLPNHVVGKGVIKTIRSKFPEANIAPIDYDPGASEANQTNRIKLMMTVAKDNLKNKNNINKAIKKENYIIDEKNKISN

SEQ ID NO: 672 - protein, 1416 aa, Unknown
  Description of Unknown: uncultivated organism sequence
  Category: MG55 effectors
  Description: MG55-247 effector
MKLDFNTLGIDIGSTTVKIAILNKDGEIIFSDYQRHYANIQETLAKIIDEAYEEFGDIPVSPMITGSGGLTLSKHMEIPFVQEVVAVATSLKDYAPRTDVAIELGGEDAKIIYFTGGIDQRMNGICAGGTGSFIDQMATLLKTDAAGLNEYAKNYKAIYPIAARCGVFAKTDIQPLINEGATKEDLSASIFQAVVNQTISGLACGKPIKGNVAFLGGPLHFLTELKQAFIRTLGLEGDAIIAPEHSHLFAASGAAMNAHADVQSSLGELKEKLSHKIELEFEVTRMEPLFASEKEYEDFTERHNKHNVRKGDFASYKGDLFLGIDAGSTTTKVAVIGDDGSLLYSFYSSNNGSPLKTALKAMKDIYSKMPEGARIVRSCSTGYGEALLKSALLLDEGEVETVAHYTAAAFFDPNVDCILDIGGQDMKCIKIKNNSVDKVQLNEACSSGCGSFIETFAKSLNYEVADFAKIALFAENPIDLGSRCTVFMNSKVKQAQKEGASVADISAGLAYSVIKNALLKVIKLTDPKDLGKQVVVQGGTFYNDAVLRSFERISGCEAIRPDIAGIMGAFGAALIAKDRYTGQKSTMLSFKEINELRFKTSMTRCQGCINHCLLTVNEFTGNRKFISGNRCEKGLGLEKNKEQIPNLFEYKNERVFRHYKPLKKADATRGVVGIPRVLNMYENYPFWFTFFTKLGYSVKLSPVSSRKIYELGIESIPSESECYPAKLAHGHVTWLIRQGLEYIFYPCIPYERVEVPDAGNHYNCPIVTSYGENIKNNIEELRDDKIKYQNPFISLESEEILTKRLVDFFRKENGIPAAEIKAAAHEGWLEMQAVREDMNKKGKEVLQYLKETGRHGIVLAGRPYHSDPEINHGIPDLITSYGVAVLTEDSISELSEVDRPTIVMDQWMYHSRLYKAASFVAKNDNLDLIQLNSFGCGLDAVTTDQVSDILTKQNKIYTVLKIDEVNNLGAARIRIRSLLAAVKDRERKKIEAKRVDTAHHRVIFTEQMRKDYTILVPDMSPIHFEILESALASCGYNVEVLKADSKCIDYGLKYVNNDACYPSLIVVGQFMQALLSGKYDLHKVALIITQTGGGCRATNYIGFIRRALEKAGMGYIPVISMSAGIEKNPGLKVNLEMANKALQALIYGDVFMRVLYKTRPYEKVKGSANALHEKWKKIAIESVKKANKKQFKKNIQNIVKEFDELELVDIKKPKVGIVGEILVKFMPLANNFIVELLEEEGAEAVCPDLIDFFMYSLYNANFKAEYLGKKKSSAKINNFLIWFIERYRKCANDALAASKRFHPTVPIQKLAEYASPIVSCGNQTGEGWFLTGEMIELIKSGVPNIVCTQPFGCLPNHVVGKGVIKELRHQYPDSNIVAVDYDPGASEVNQLNRIKLMLSTAGKNLIAESKDNEETA

SEQ ID NO: 673 - protein, 1439 aa, Unknown
  Description of Unknown: uncultivated organism sequence
  Category: MG55 effectors
  Description: MG55-248 effector
MIKTLHVGLDVGSTTVKIIVMDENLNTIYTDYKRHFSDTKNTICNVLENLIIMYPNTEFTIALTGSGAISAAKFLDLPFIQEVVSCKRAVEKYIPETDVVIELGGEDAKIIYFDKFIEQRMNGTCAGGTGAFIDQMASLLNTDPTGLNELAKSHKLIYPIASRCGVFAKTDIQPLLNEGAAKEDIAASIFQAVVNQTISGLACGRPIRGNVAFLGGPLNYLSELRNRFIETLNLKDNEIIVPNEAHLLVAKGAALDSLNSHTITIEKLKSKIEVLKSSHDDTSNPLNPLFSIDAEYDEFKKRHEKDKVKRADFKTFKGNCFLGIDAGSTTTKLVVISEDGTLLYSLYGSNEGNPLQSVINMLKKLYAEKPSEAVIRFSGVTGYGEKLIQTALNVDLNEIETIAHYTAAKEFMPNVTSIVDIGGQDMKYIKMKNGAIDNIMLNEACSSGCGSFIETFAKSLGLSIQDFVQSALEARRPVDLGSRCTVFMNSKIKQAQKEGYSVGDISAGLSYSVIKNAIQKVMKVRDVKKLGAHIVVQGGTFYNDAVLRAFELIVGRNVVRPDIAGLMGAYGVALLAKEQYENNLDMDYVSSISNINELDKLEINITHIRCQGCENHCLLTINKFSNGAKYISGNRCEKGAGIVDKTLDRPNLIKYKFERTFNYTPLEEKNAPRGTIGIPRVLNMYEDYPFWFTFLTNLGFRVILSEKSNRKTYEKGMESMPSESVCFPAKLSHGHIIGLINSGIKTIFYPCIPYSRKEYQKADNHYNCPIVISYSEVLKNNVEELKDKNIKFLNPFLPFEPDKLAEIIMNLPEFKEYNFTKKELLSAAKKAETEYQNYKSDIHNKGQETLKFMEENNLKGIVLAGRPYHVDPEVNHGIDTLITSLGLCVLTEDSISNLTEAKRPLRVVDQWVFHARLYAAADFVGKHDNLELVQLNSFGCGVDAVTTDQVEEILTSYEKMYTLIKIDEINNLGAIRIRIRSLLASMNKRIKDNNSSMCNGNYEVNKKIFTKEMRKDYTILMPQMAPIHFEFLESAMKNSGYKMELLRDCTQHTVETGLKYVNNDACYPSILVTGQMIEALESGKYDLNKTALIMSQTGGGCRATNYIGFIRKALKDAGFENVPVISFNVVGMEKMPGFKLTIPLIERLIKSCIYADLLQKMLTKNRAYEINKGKTKELFDYWMEKCKKLVNKSSIKEFKQSIFDIVSDFEKIEIDTSVIKPKVGIVGEVLIKYHPFGNNFVADKLEQEGAEVILPDFMGFIKFIATHKITFNKLIKTDAIKAKLFKTAIKLIDLLEKPVISALNNSKKGYLLPCNIWNLEEKVNDILSIGNQTGEGWFLTAEMIEYIEHDIPNIVCVQPFACLPNHVVGKGVIKTIRSKFPEANIAPIDYDPGASEANQTNRIKLMMTVAKDNLKNKNNINKAIKKENYIIDEKNKISN

SEQ ID NO: 674 - protein, 1439 aa, Unknown
  Description of Unknown: uncultivated organism sequence
  Category: MG55 effectors
  Description: MG55-249 effector
MIKTLHVGLDVGSTTVKIIVMDENLNTIYTDYKRHFSDTKNTICNVLENLIIMYPDTEFTIALTGSGAISAAKFLDLPFIQEVVSCKRAVEKYIPETDVVIELGGEDAKIIYFDKFIEQRMNGTCAGGTGAFIDQMASLLNTDPTGLNELAKSHKLIYPIASRCGVFAKTDIQPLLNEGAAKEDIAASIFQAVVNQTISGLACGRPIRGNVAFLGGPLNYLSELRNRFIETLNLKDNEIIVPNEAHLLVAKGAALDSLNSHTITIEKLKSKIEVLKSSHDDTSNPLNPLFSIDAEYDEFKKRHEKDKVKRADFKTFKGNCFLGIDAGSTTTKLVVISEDGTLLYSLYGSNEGNPLQSVINMLKKLYAEKPSEAVIRFSGVTGYGEKLIQTALNVDLNEIETIAHYTAAKEFMPNVTSIVDIGGQDMKYIKMKNGAIDNIMLNEACSSGCGSFIETFAKSLGLSIQDFVQSALEARRPVDLGSRCTVFMNSKIKQAQKEGYSVGDISAGLSYSVIKNAIQKVMKVRDVKKLGAHIVVQGGTFYNDAVLRAFELIVGRNVVRPDIAGLMGAYGVALLAKEQYENNLDMDYVSSISNINELDKLEINITHIRCQGCENHCLLTINKFSNGTKYISGNRCEKGAGIVDKTLDRPNLIKYKFERTFNYTPLEEKNAPRGTIGIPRVLNMYEDYPFWFTFLTNLGFRVILSEKSNRKTYEKGMESMPSESVCFPAKLSHGHIIGLINSGIKTIFYPCIPYSRKEYQKADNHYNCPIVISYSEVLKNNVEELKDKNIKFLNPFLPFEPDKLAEIIMNLPEFKEYNFTKKELLSAAKKAETEYQNYKSDIHNKGQETLKFMEENNLKGIVLAGRPYHVDPEVNHGIDTLITSLGLCVLTEDSISNLTEAKRPLRVVDQWVFHARLYAAADFVGKHDNLELVQLNSFGCGVDAVTTDQVEEILTSYEKMYTLIKIDEINNLGAIRIRIRSLLASMNKRIKDNDSSMCNGNYEVNKKIFTKEMRKDYTILMPQMAPIHFEFLESAMKNSGYKMELLKDCTQHTVETGLKYVNNDACYPSILVTGQMIEALESGKYDLNKTALIMSQTGGGCRATNYIGFIRKALKDAGFENVPVISFNVVGMEKMPGFKLTIPLIERLIKSCIYADLLQKMLTKNRAYEINKGKTKELFDYWMEKCKKLVNKSSIKEFKQSIFDIVSDFEKIEIDTSVIKPKVGIVGEVLIKYHPFGNNFVADKLEQEGAEVILPDFMGFIKFIATHKITFNKLIKTDAIKAKLFKTAIKLIDLLEKPVIFALNNSKKGYLLPCNIWNLEEKVNDILSIGNQTGEGWFLTAEMIEYIEHDIPNIICVQPFACLPNHVVGKGVIKTIRSKFPEANIAPIDYDPGASEANQTNRIKLMMTVAKDNLKNKNNINKAIKKENYIIDEKNKISN

SEQ ID NO: 675 - protein, 1439 aa, Unknown
  Description of Unknown: uncultivated organism sequence
  Category: MG55 effectors
  Description: MG55-250 effector
MIKTLHVGLDVGSTTVKIIVMDENLNTIYTDYKRHFSDTKNTICNVLENLIIMYPNTEFTIALTGSGAISAAKFLDLPFIQEVVSCKRAVEKYIPETDVVIELGGEDAKIIYFDKFIEQRMNGTCAGGTGAFIDQMASLLNTDPTGLNELAKSHKLIYPIASRCGVFAKTDIQPLLNEGAAKEDIAASIFQAVVNQTISGLACGRPIRGNVAFLGGPLNYLSELRNRFIETLNLKDNEIIVPNEAHLLVAKGAALDSLNSHTITIEKLKSKIEVLKSSHDDTSNPLNPLFSIDAEYDEFKKRHEKDKVKRADFKTFKGNCFLGIDAGSTTTKLVVISEDGTLLYSLYGSNEGNPLQSVINMLKKLYAEKPSEAVIRFSGVTGYGEKLIQTALNVDLNEIETIAHYTAAKEFMPNVTSIVDIGGQDMKYIKMKNGAIDNIMLNEACSSGCGSFIETFAKSLGLSIQDFVQSALEARRPVDLGSRCTVFMNSKIKQAQKEGYSVGDISAGLSYSVIKNAIQKVMKVRDVKKLGAHIVVQGGTFYNDAVLRAFELIVGRNVVRPDIAGLMGAYGVALLAKEQYENNLDMDYVSSISNINELDKLEINITHIRCQGCENHCLLTINKFSNGAKYISGNRCEKGAGIVDKTLDRPNLIKYKFERTFNYTPLEEKNAPRGTIGIPRVLNMYEDYPFWFTFLTNLGFRVILSEKSNRKTYEKGMESMPSESVCFPAKLSHGHIIGLINSGIKTIFYPCIPYSRKEYQKADNHYNCPIVISYSEVLKNNVEELKDKNIKFLNPFLPFEPDKLAEIIMNLPEFKEYNFTKKELLSAAKKAETEYQNYKSDIHNKGQETLKFMEENNLKGIVLAGRPYHVDPEVNHGIDTLITSLGLCVLTEDSISNLTEAKRPLRVVDQWVFHARLYAAADFVGKHDNLELVQLNSFGCGVDAVTTDQVEEILTSYEKMYTLIKIDEINNLGAIRIRIRSLLASMNKRIKDNNSSICNGNYEVNKKIFTKEMRKDYTILMPQMAPIHFEFLESAMKNSGYKMELLRDCTQHTVETGLKYVNNDACYPSILVTGQMIEALESGKYDLNKTALIMSQTGGGCRATNYIGFIRKALKDAGFENVPVISFNVVGMEKMPGFKLTIPLIERLIKSCIYADLLQKMLTKNRAYEINKGKTKELFDYWMEKCKKLVNKSSIKEFKQSIFDIVSDFEKIEIDTSVIKPKVGIVGEVLIKYHPFGNNFVADKLEQEGAEVILPDFMGFIKFIATHKITFNKLIKTDAIKAKLFKTAIKLIDLLEKPVISALNNSKKGYLLPCNIWNLEEKVNDILSIGNQTGEGWFLTAEMIEYIEHDIPNIVCVQPFACLPNHVVGKGVIKTIRSKFPEANIAPIDYDPGASEANQTNRIKLMMTVAKDNLKNKNNINKAIKKENYIIDEKNKISN

SEQ ID NO: 676 - protein, 1439 aa, Unknown
  Description of Unknown: uncultivated organism sequence
  Category: MG55 effectors
  Description: MG55-251 effector
MIKTLHVGLDVGSTTVKIIVMDENLNTIYTDYKRHFSDTKNTICNVLENLIIMYPDTEFTIALTGSGAISAAKFLDLPFIQEVVSCKRAVEKYIPETDVVIELGGEDAKIIYFDKFIEQRMNGTCAGGTGAFIDQMASLLNTDPTGLNELAKSHKLIYPIASRCGVFAKTDIQPLLNEGAAKEDIAASIFQAVVNQTISGLACGRPIRGNVAFLGGPLNYLSELRNRFIETLNLKDNEIIVPNEAHLLVAKGAALDSLNSHTITIEKLKSKIEVLKSSHDDTSNPLNPLFSIDAEYDEFKKRHEKDKVKRADFKTFKGNCFLGIDAGSTTTKLVVISEDGTLLYSLYGSNEGNPLQSVINMLKKLYAEKPSEAVIRFSGVTGYGEKLIQTALNVDLNEIETIAHYTAAKEFMPNVTSIVDIGGQDMKYIKMKNGAIDNIMLNEACSSGCGSFIETFAKSLGLSIQDFVQSALEARRPVDLGSRCTVFMNSKIKQAQKEGYSVGDISAGLSYSVIKNAIQKVMKVRDVKKLGAHIVVQGGTFYNDAVLRAFELIVGRNVVRPDIAGLMGAYGVALLAKEQYKNNLDMDYVSSISNINELDKLEINITHIRCQGCENHCLLTINKFSNGAKYISGNRCEKGAGIVDKTLDRPNLIKYKFERTFNYTPLEEKNAPRGTIGIPRVLNMYEDYPFWFTFLTNLGFRVILSEKSNRKTYEKGMESMPSESVCFPAKLSHGHIIGLINSGIKTIFYPCIPYSRKEYQKADNHYNCPIVISYSEVLKNNVEELKDKNIKFLNPFLPFEPDKLAEIIMNLPEFKEYNFTKKELLSAAKKAETEYQNYKSDIHNKGQETLKFMEENNLKGIVLAGRPYHVDPEVNHGIDTLITSLGLCVLTEDSISNLTEAKRPLRVVDQWVFHARLYAAADFVGKHDNLELVQLNSFGCGVDAVTTDQVEEILTSYEKMYTLIKIDEINNLGAIRIRIRSLLASMNKRIKDNNSSMCNGNYEVNKKIFTKEMRKDYTILMPQMAPIHFEFLESAMKNSGYKMELLKDCTQHTVETGLKYVNNDACYPSILVTGQMIEALESGKYDLNKTALIMSQTGGGCRATNYIGFIRKALKDAGFENVPVISFNVVGMEKMPGFKLTIPLIERLIKSCIYADLLQKMLTKNRAYEINKGKTKELFDYWMEKCKKLVNKSSIKEFKQSIFDIVSDFEKIEIDTSVIKPKVGIVGEVLIKYHPFGNNFVADKLEQEGAEVILPDFMGFIKFIATHKITFNKLIKTDAIKAKLFKTAIKLIDLLEKPVISALNNSKKGYLLPCNIWDLEGKVNDILSIGNQTGEGWFLTAEMIEYIEHDIPNIVCVQPFACLPNHVVGKGVIKTIRSKFPEANIAPIDYDPGASEANQTNRIKLMMTVAKDNLKNKNNINKAIKKENYIIDEKNKISN

SEQ ID NO: 677 - protein, 1439 aa, Unknown
  Description of Unknown: uncultivated organism sequence
  Category: MG55 effectors
  Description: MG55-252 effector
MIKTLHVGLDVGSTTVKIIVMDENLNTIYTDYKRHFSDTKNTICNVLENLIIMYPDTEFTIALTGSGAISAAKFLDLPFIQEVVSCKRAVEKYIPETDVVIELGGEDAKIIYFDKFIEQRMNGTCAGGTGAFIDQMASLLNTDPTGLNELAKSHKLIYPIASRCGVFAKTDIQPLLNEGAAKEDIAASIFQAVVNQTISGLACGRPIRGNVAFLGGPLNYLSELRNRFIETLNLKDNEIIVPNEAHLLVAKGAALDSLNSHTITIEKLKSKIEVLKSSHDDTSNPLNPLFSIDAEYDEFKKRHEKDKVKRADFKTFKGNCFLGIDAGSTTTKLVVISEDGTLLYSLYGSNEGNPLQSVINMLKKLYAEKPSEAIIRFSGVTGYGEKLIQTALNVDLNEIETIAHYTAAKEFMPNVTSIVDIGGQDMKYIKMKNGAIDNIMLNEACSSGCGSFIETFAKSLGLSIQDFVQSALEARRPVDLGSRCTVFMNSKIKQAQKEGYSVGDISAGLSYSVIKNAIQKVMKVRDVKKLGAHIVVQGGTFYNDAVLRAFELIVGRNVVRPDIAGLMGAYGVALLAKEQYENNLDMDYVSSISNINELDKLEINITHIRCQGCENHCLLTINKFSNGTKYISGNRCEKGAGIVDKTLDRPNLIKYKFERTFNYTPLEEKNAPRGTIGIPRVLNMYEDYPFWFTFLTNLGFRVILSEKSNRKTYEKGMESMPSESVCFPAKLSHGHIIGLINSGIKTIFYPCIPYSRKEYQKADNHYNCPIVISYSEVLKNNVEELKDKNIKFLNPFLPFEPDKLAEIIMNLPEFKEYNFTKKELLSAAKKAETEYQNYKSDIHNKGQETLKFMEENNLKGIVLAGRPYHVDPEVNHGIDTLITSLGLCVLTEDSISNLTEAKRPLRVVDQWVFHARLYAAADFVGKHDNLELVQLNSFGCGVDAVTTDQVEEILTSYEKMYTLIKIDEINNLGAIRIRIRSLLASMNKRIKDNNSSMCNGNYEVNKKIFTKEMRKDYTILMPQMAPIHFEFLESAMKNSGYKMELLRDCTQHTVETGLKYVNNDACYPSILVTGQMIEALESGKYDLNKTALIMSQTGGGCRATNYIGFIRKALKDAGFENVPVISFNVVGMEKMSGFKLTIPLIERLIKSCIYADLLQKMLTKNRAYEINKGKTKELFDYWMEKCKKLVNKSSIKEFKQSIFDIVSDFEKIEIDTSVIKPKVGIVGEVLIKYHPFGNNFVADKLEQEGAEVILPDFMGFIKFIATHKITFNKLIKTDAIKAKLFKTAIKLIDLLEKPVISALNNSKKGYLLPCNIWDLEGKVNDILSIGNQTGEGWFLTAEMIEYIEHDIPNIVCVQPFACLPNHVVGKGVIKTIRSKFPEANIAPIDYDPGASEANQTNRIKLMMTVAKDNLKNKNNINKAIKKENYIIDEKNKISN

SEQ ID NO: 678 - protein, 1439 aa, Unknown
  Description of Unknown: uncultivated organism sequence
  Category: MG55 effectors
  Description: MG55-253 effector
MIKTLHVGLDVGSTTVKIIVMDENLNTIYTDYKRHFSDTQNTICNVLENLIIMYPDTEFTIALTGSGAISAAKFLDLPFIQEVVSCKRAVEKYIPETDVVIELGGEDAKIIYFDKFIEQRMNGTCAGGTGAFIDQMASLLNTDPTGLNELAKSHKLIYPIASRCGVFAKTDIQPLLNEGAAKEDIAASIFQAVVNQTISGLACGRPIRGNVAFLGGPLNYLSELRNRFIETLNLKDNEIIVPNEAHLLVAKGAALDSLNSHTITIEKLKSKIEVLKSSHDDTSNPLNPLFSIDAEYDEFKKRHEKDKVKRADFKTFKGNCFLGIDAGSTTTKLVVISEDGTLLYSLYGSNEGNPLQSVINMLKKLYAEKPSEAVIRFSGVTGYGEKLIQTALNVDLNEIETIAHYTAAKEFMPNVTSIVDIGGQDMKYIKMKNGAIDNIMLNEACSSGCGSFIETFAKSLGLSIQDFVQSALEARRPVDLGSRCTVFMNSKIKQAQKEGYSVGDISAGLSYSVIKNAIQKVMKVRDVKKLGAHIVVQGGTFYNDAVLRAFELIVGRNVVRPDIAGLMGAYGVALLAKEQYENNLDMDYVSAISNINELDKLEINITHIRCQGCENHCLLTINKFSNGAKYISGNRCEKGAGIVDKTLDRPNLIKYKFERTFNYTPLEEKNAPRGTIGIPRVLNMYEDYPFWFTFLTNLGFRVILSEKSNRKTYEKGMESMPSESVCFPAKLSHGHIIGLINSGIKTIFYPCIPYSRKEYQKADNHYNCPIVISYSEVLKNNVEELKDKNIKFLNPFLPFEPDKLAEIIMNLPEFKEYNFTKKELLSAAKKAETEYQNYKSDIHNKGQETLKFMEENNLKGIVLAGRPYHVDPEVNHGIDTLITSLGLCVLTEDSISNLTEAKRPLRVVDQWVFHARLYAAADFVGKHDNLELVQLNSFGCGVDAVTTDQVEEILTSYEKMYTLIKIDEINNLGAIRIRIRSLLASMNKRIKDNNSSMCNGNYEVNKKIFTKEMRKDYTILMPQMAPIHFEFLESAMKNSGYKMELLRDCTQHTVETGLKYVNNDACYPSILVTGQMIEALESGKYDLNKTALIMSQTGGGCRATNYIGFIRKALKDAGFENVPVISFNVVGMEKMPGFKLTIPLIERLIKSCIYADLLQKMLTKNRAYEINKGKTKELFDYWMEKCKKLVNKSSIKEFKQSIFDIVSDFEKIEIDTSVIKPKVGIVGEVLIKYHPFGNNFVADKLEQEGAEVILPDFMGFIKFIATHKITFNKLIKTDAIKAKLFKTAIKLIDLLEKPVISALNNSKKGYLLPCNIWDLEEKVNDILSIGNQTGEGWFLTAEMIEYIEHDIPNIVCVQPFACLPNHVVGKGVIKTIRSKFPEANIAPIDYDPGASEANQTNRIKLMMTVAKDNLKNKNNINKAIKKENYIIDEKNKISN

SEQ ID NO: 679 - protein, 1439 aa, Unknown
  Description of Unknown: uncultivated organism sequence
  Category: MG55 effectors
  Description: MG55-254 effector
MIKTLHVGLDVGSTTVKIIVMDENLNTIYTDYKRHFSDTKNTICNVLENLIIMYPDTEFTIALTGSGAISAAKFLDLPFIQEVVSCKRAVEKYIPETDVVIELGGEDAKIIYFDKFIEQRMNGTCAGGTGAFIDQMASLLNTDPTGLNELAKSHKLIYPIASRCGVFAKTDIQPLLNEGAAKEDIAASIFQAVVNQTISGLACGRPIRGNVAFLGGPLNYLSELRNRFIETLNLKDNEIIVPNEAHLLVAKGAALDSLNSHTITIEKLKSKIEVLKSSHDDTSNPLNPLFSIDAEYDEFKKRHEKDKVKRADFKTFRGNCFLGIDAGSTTTKLVVISEDGTLLYSLYGSNEGNPLQSVINMLKKLYAEKPSEAVIRFSGVTGYGEKLIQTALNVDLNEIETIAHYTAAKEFMPNVTSIVDIGGQDMKYIKMKNGAIDNIMLNEACSSGCGSFIETFAKSLGLSIQDFVQSALEARRPVDLGSRCTVFMNSKIKQAQKEGYSVGDISAGLSYSVIKNAIQKVMKVRDVKKLGAHIVVQGGTFYNDAVLRAFELIVGRNVVRPDIAGLMGAYGVALLAKEQYENNLDMDYVSSISNINELDKLEINITHIRCQGCENHCLLTINKFSNGTKYISGNRCEKGAGIVDKTLDRPNLIKYKFERTFNYTPLEEKNAPRGTIGIPRVLNMYEDYPFWFTFLTNLGFRVILSEKSNRKTYEKGMESMPSESVCFPAKLSHGHIIGLINSGIKTIFYPCIPYSRKEYQKADNHYNCPIVISYSEVLKNNVEELKDKNIKFLNPFLPFEPDKLAEIIMNLPEFKEYNFTKKELLSAAKKAETEYQNYKSDIHNKGQETLKFMEENNLKGIVLAGRPYHVDPEVNHGIDTLITSLGLCVLTEDSISNLTEAKRPLRVVDQWVFHARLYAAADFVGKHDNLELVQLNSFGCGVDAVTTDQVEEILTSYEKMYTLIKIDEINNLGAIRIRIRSLLASMNKRIKDNNSSMCNGNYEVNKKIFTKEMRKDYTILMPQMAPIHFEFLESAMKNSGYKMELLRDCTQHTVETGLKYVNNDACYPSILVTGQMIEALESGKYDLNKTALIMSQTGGGCRATNYIGFIRKALKDAGFENVPVISFNVVGMEKMPGFKLTIPLIERLIKSCIYADLLQKMLTKNRAYEINKGKTKELFDYWMEKCKKLVNKSSIKEFKQSIFDIVSDFEKIEIDTSVIKPKVGIVGEVLIKYHPFGNNFVADKLEQEGAEVILPDFMGFIKFIATHKITFNKLIKTDAIKAKLFKTAIKLIDLLEKPVISALNNSKKGYLLPCNIWNLEEKVNDILSIGNQTGEGWFLTAEMIEYIEHDIPNIVCVQPFACLPNHVVGKGVIKTIRSKFPEANIAPIDYDPGASEANQTNRIKLMMTVAKDNLKNKNNINKAIKKENYIIDEKNKISN

SEQ ID NO: 680 - protein, 723 aa, Unknown
  Description of Unknown: uncultivated organism sequence
  Category: MG55 effectors
  Description: MG55-255 effector
MRIIKRNGSEEDFNIEKIINAVKKANGSGEHKFLTDEQIEDVADYVEYKCNKIRRAVSVEEIQDMVEDQLMAKGAFELARRYVRYRYNRSLVRKANTTDNRILSLIECNNEEVKQENSNKNPTVNSVQRDYMAGEVSRDLTRRMLLPADIVEADKEGIIHFHDSDYFAQHMHNCDLVNLEDMLQNGTVISDTLIERPHSFSTACNIATQIIAQVASNQYGGQSISLAHLAPFVQVSREKIRRETLAEIEELGVHPTEEKINDIVEQRLRKEVNRGVQTIQYQVVTLLTTNGQAPFVTVFMYLNEAKNEQEKHDLAMIIEETLKQRHKGVKNEKGVWITPAFPKLIYVLEEDNITEDSKYWYLTELAAKCTAKRMVPDYISEKVMLQSKIDKNGEGHCFTCMGCRSFLTPYVDENGKPKYYGRFNQGVVTVNLIDIGLSAGKDLDKFWKIFDERMELCHRALQCRHERLTGTLSDAAPILWQYGALARLKKGEKIDKLLHGGYSTLSLGYAGLWECVYSLIGKKLTEKEGKELGLEIMQKLNDYCAKWKKEENIDYSIYGTPLESTTYKFAKCLQKRFGIIKGVTDKNYITNSYHVHVTENIDAFSKLKLESEFQALSPGGAISYVEVPNMQDNIPAVLQVIKFIYDNIMYAELNTKSDYCQVCGYDGEIKIVHDDGKLVWECPNCGNRDQDKMNVARRTCGYIGTQFWNQGRTQEIEERVLHL

SEQ ID NO: 681 - protein, 723 aa, Unknown
  Description of Unknown: uncultivated organism sequence
  Category: MG55 effectors
  Description: MG55-256 effector
MKIIKRNGSEVPFDITKIITAVTKASDSVSGKSRLTREQITQIAAEVTDQCQSLNRAVSVEEIQDMVENKLMDMKAHDIARHYITYRYVQSLKRQTNTTDERILSLIECQNEEVKQENANKNPTVNSVQRDYMAGEISKDLTARLLLDPEIVKAHQEGLIHFHDSDYFAQHMHNCDLVNLEDMLQNGTVISGTYIEKPHSFSTACNIATQIIAQVASNQYGGQSISLTHLAPFVDVSRKKIAAEVEAEMEGLNVSAERKKAIVERRLRNEINRGVQTIQYQVVTLMTTNGQAPFITVFMYLGEARNAQEKADLAIIIEETIRQRYQGVKNEAGVWITPAFPKLIYVLEEDNIRPGTPYYYLTELAAKCTAKRMVPDYISEKKMLEMKIDKNGEGHCYTCMGCRSFLTPYVDPETGKPKYYGRFNQGVVTINLVDVALSSGGNFEKFWKIFDERLALCHRALQARHKRLLGTPSDAAPILWQYGALARLKKGEKIDKLLFGGYSTISLGYAGLYECVKYMTGRSHTDAGAKPFALSVMQHMNDKCNEWKKAENIDYSLYGTPLESTTYKFAKCLQKRFGIVPGITDKNYITNSYHVHVSEPIDAFTKLKFESEFQRLSPGGAISYVEVPNMQDNLEAVISVLQFIYDNIMYAELNTKSDYCQCCGYDGEIKIVEDDGKLVWECPKCGNRDQNKLNVARRTCGYIGTQFWNQGRTQEIKDRVLHL

SEQ ID NO: 682 - protein, 723 aa, Unknown
  Description of Unknown: uncultivated organism sequence
  Category: MG55 effectors
  Description: MG55-257 effector
MKIIKRNGSEVPFDITKIITAVTKASDSVSGKSRLTREQITQIAAEVTDQCQSLNRAVSVEEIQDMVENKLMDMKAHDIARHYITYRYVQSLKRQTNTTDERILSLIECQNEEVKQENANKNPTVNSVQRDYMAGEISKDLTARLLLDPEIVKAHQEGLIHFHDSDYFAQHMHNCDLVNLEDMLQNGTVISGTYIEKPHSFSTACNIATQIIAQVASNQYGGQSISLTHLAPFVDVSRKKIAAEVETEMEGLNVSAERKKAIVERRLRNEINRGVQTIQYQVVTLMTTNGQAPFITVFMYLGEARNAQEKADLAIIIEETIRQRYQGVKNEAGVWITPAFPKLIYVLEEDNIRPGTPYYYLTELAAKCTAKRMVPDYISEKKMLEMKIDKNGEGHCYTCMGCRSFLTPYVDPETGKPKYYGRFNQGVVTINLVDVALSSGGNFEKFWKIFDERLALCHRALQARHKRLLGTPSDAAPILWQYGALARLKKGEKIDKLLFGGYSTISLGYAGLYECVKYMTGRSHTDAGAKPFALSVMQHMNDKCNEWKKAENIDYSLYGTPLESTTYKFAKCLQKRFGIVPGITDKNYITNSYHVHVSEPIDAFTKLKFESEFQRLSPGGAISYVEVPNMQDNLEAVISVLQFIYDNIMYAELNTKSDYCQCCGYDGEIKIVEDDGKLVWECPKCGNRDQNKLNVARRTCGYIGTQFWNQGRTQEIKDRVLHL

SEQ ID NO: 683 - protein, 703 aa, Unknown
  Description of Unknown: uncultivated organism sequence
  Category: MG55 effectors
  Description: MG55-258 effector
MKVIKRDGSTADFDSSKIIVAIQKANQVVEPEDRIDQERIEAIAHYVESKNRMRLLVEDIQDMVEHQLMDEGKFNLAKSYIIYRYTRALVRKANTTDESILSLIRNSNKDVMEENSNKNAVMASTQRDLIAGEVSKDLTRRLILPEKISKAHDEGAIHFHDADYFVQPIFNCCLINVGDMLDNGTVMNGKLIESPKSFQVACTVMTQIIASVASSQYGGQSVDIRHLGKYLRRSYEKFKLTIKAEVGDSVADEVVERLTKRRLQDELRSGVQTIQYQINTLMTTNGQSPFVTIFLNLQADDEYLEENAMIVEEILRQRLEGIKNDKGVFVTPAFPKLVYVLDEHNCLKGGKYDYITKLAVKCSAKRLYPDYISAKKMRENYEGNVFAPMGCRSFLAAWKDDEGNYKFEGRFNQGVVSLNLPQVAILAHGDEEKFWPLLDERLQLCYEALMCRHNSLKGIRSDVSPVHWQYGAIARLEKGEVIDKYLEKGYSTIGLYEMTKLMKDVSHTTPEGEEFALRVMKYLRAACDKWKKETGLGFALYGTPAESLCYRFARIDKERFGTIADVTDKGYYTNSYHVDVREDIDAFSKFNFESQFQRISSGGAISYVEIPNMRHNLEAMEDVVRFIYDNIQYAEFNTKSDYCHVCGFDGEIIINDDLEWECPNCGNKNQTLMNVTRRTCGYLGENFWNVGKTKEIKSRVLHL

SEQ ID NO: 684 - protein, 972 aa, Unknown
  Description of Unknown: uncultivated organism sequence
  Category: MG55 effectors
  Description: MG55-259 effector
MQIGLDIGSTTIKIAVLDDAGQLQFSKYERHYSQIAEKMQQLLAELHIKMPLLKTARLAISGSAGIGIADSCSLQFVQEVFAEKVCTERLNPGTEAVIELGGEDAKLLFLGRHFDARMNDSCAGGTGAFIDQMASLLSVPTEAMNELAQQASTRYTIASRCGVFAKSDIQPLLNQGAAKADLAASIFDAVASQAVTGLAKGRPITGKVLYLGGPLTFMSELRHSFDKILKIEGYCPENSLYYVAMGAAFCAENKVDLTELPAKLAAVGAQRDFDHLEPLFASTAEYDEFMERHSKERIEPGDISAATEAYIGMDAGSTTIKIAVISPSGQLLDSSYQSNKGNPVIAIKEYLQNFYIKYPHCRILGSAVTGYGEDLIRNGFSVDYGIVETMAHFIAAKTLQPDVDFILDIGGQDIKCLKIHNGCIDNIFLNEACSSGCGSFLQTFAEILGYSAEEFARIGLFADKPVDLGSRCTVFMNSSVKQAQKDGATVANISAGLSLSIVKNALYKVIRPGSKESIGKHIVVQGGTFLNDCVLRAFEKEMGLKVVRPNIAGLMGAYGAAIYSRSRHQETGHVSTLADAAALENFVHEVKAVTCGLCSNHCHLTVNTFASGKRFISGNRCERPVTHCAPDDTFNLYRQKLQLLESLKGVPGKRGKIGLPMGLNMYELLPFWHAFFTRLGFEVITSPIYDKTIFQKGQNTIPSDTVCYPAKLMHGHIKWLLENGINTIFYPCMTYNVDENSAENCYNCPVVAYYPEVLHANMHDLDNATYIFDYLGLGHKKVLLKKLQQICKEHFPDIGSSELKAALQEAYAAYNKFEAQVKELGQTIINTARSQHKPIVVLAGRPYHIDPKVNHSIDRLITTMGAALVSEDAVSSHISMQELNDDLQVLNQWTYHSRLYAAAKYVSRSSDMYMVHLVSFGCGCDAITADECRRILEEHGQIYTQIKIDDIDNLGAAKIRLRSLFAAAGLES

SEQ ID NO: 685 - protein, 724 aa, Unknown
  Description of Unknown: uncultivated organism sequence
  Category: MG55 effectors
  Description: MG55-260 effector
MKIIKRNGAEENFDISKIIMAVTKANAAVEECDRMTPRQIQRIAESVELACQELGRSAAVEEIQDMVEKQIMAHGAFEVAKAYITYRYTRSLVRRANTTDDRILSLIECNNEEAKQENSNKNPIVNSTQRDYMAGEVSRDITSRLLLPKDIVEAHEEGIIHFHDADYYAQHMHNCDLVNLEDMLENGTVITGTLIERPHSFSTACNIATQIIAQVASNQYGGQSISLTHLAPFVQVSRERIRREVEAEMQAIDAHPGEEKLAELVENRVREEIRRGVQTIQYQVVTLLTTNGQAPFVTVFMYLGEAKNEQERHDLAMIIEETLRQRYQGVKNEKGVWVTPAFPKLIYVLEEDNIHEDSPYWYLTELAARCTAKRMVPDYISEKKMLELKVDKNGEGHCYTCMGCRSFLTPYVDENGKPKYYGRFNQGVVTINLPDVALSSGGNMEKFWKIFDERLELCHRALMCRHERLKGTLSDAAPILWQYGALARLKKGEPIDKLLYGGYSTISLGYAGLYECVKYMTGKSHTDPSATPFALEIMQHMNDACAKWKQMHNIDFSLYGTPLESTTYKFAKCLQKRFGIIPGVTDKGYITNSYHIHVTEHIDAFSKLAFESKFQALSPGGAISYVEVPNMQNNIPAVLEVMKFIYDNIMYAELNTKSDYCQKCGFDGEIEILEQDGKLVWTCPQCGNQDQDTMNVARRTCGYIGTQFWNQGRTQEIKERVLHL

SEQ ID NO: 686 - protein, 728 aa, Unknown
  Description of Unknown: uncultivated organism sequence
  Category: MG55 effectors
  Description: MG55-261 effector
MYIIKRSGAEELFDHTKIETAIAKANETVEAVERATKAERELVARRVEECAETCGHALNIEEIQDLVVTNIMDLKLYRLAQNYAVYRYKRELVRKSNTTDEQILSLIECNNEEVKQENSNKNPTVNSVQRDYMAGEVSKDLTRRFLLPPDIVQAHEEGLIHFHDADYFAQHMHNCCLVNLEDMLQNGTVISETQIDPPKSFSTACNVATQAIAQVASSQYGGQTISLSHLAPFVQVSREKFRKQAIAEYDANGIDYTDEQVERAVAMRVKEEIKKGVQTIQYQVITLMTTNGQAPFITVFMYLDEVPEGQTRDDLAAIIEEMLHQRIIGVKNEKGVYVTPAFPKLIYVLEEDNIHEESKYFYLTSLAAQCTAKRMVPDYISEKKMKEIKIDANGDSYCYPSMGCRSFLTPYIDPETNKPKYYGRFNQGVVTLNLVDVACSSDGDMDKFWKILDERLQLCYRALMCRHKRLLGTPSDVAPILWQNGALARLKKGEPIDKLLFNGYSTISLGYAGLYETCMRMLGVSHTEKEKGMPFAKAVMQHLNDACKEWKEKENIDFSVYGTPLESTTYKFAKCLQKRFGKIKDVTDHNYITNSYHVCVREEINAFDKLKFESEFQPLSPGGAISYVEVPNMQNNIEAVLSVMKYIYDNIMYAELNTKSDYCMECGYDGEIKIVKEEGSGKLVWECPCCGNRDQNKMSVARRTCGYIGTQFWNQGRTAEIADRRLHL

SEQ ID NO: 687 - protein, 984 aa, Unknown
  Description of Unknown: uncultivated organism sequence
  Category: MG55 effectors
  Description: MG55-262 effector
MARRIKNVASNNYTLGIDIGSTTAKLALMCDGKIVYSKYQRHRSRIIGTTLDMLREMKEIHPVDKVRVTISGSAGMGMAEKAGIDFIQEVYATGEVVYKLAPDTGVVIELGGEDAKVIFFKGGVDERMNGSCAGGTGAFIDQMAVLLNMSVDDMDKASLEAKRIYPIASRCGVFAKTDIQPLLNQGASKADIAASIFQAVVNQTITGLIQGRKIEGKVMFLGGPLYYCEGLKKRFYETLSLTKETAVFPEYALYAVAMGASMYAQNSEEISFEELEKRIENSAKCESRGLDTLPPLFASKEEYDYFVQRHNKATVPQKDINTYIGNAWLGIDCGSTTTKLVLISDDRSILYSFYSSNKGNPVKLVKEQLEIIYFLCQNRIKICGSSVTGYGEELIRHAFRTDEGVVETIAHYTAAKYFRPDVDFILDIGGQDIKCFKIRNGAIDSIMLNEACSSGCGSFVETFAKAMGYNVSDFAKLGIFAKSPVNLGSRCTVFMNSSVKQSQKDGASVEDISAGLSASVVKNAIYKVIRANSPKELGNCIVVQGGTFYNDAVLRAFEKEIKNNVIRPSIAGLMGAYGAALHIMKSKESTLLSQKELETFTHTSNSSICRGCSNNCHLTINRFSDGETFVSGNQCQKALGLKNTEELPNLYAWKRNFFENLKPVRGTRGKIGIPMALSMYELAPLWNAFFTYLGFEVHFSALSNRKTYEKGQFTIPSDTACYPAKIMHGHMVELMEKGFENIFYPSITYNINEHAGDNHFNCPIVAYYAELLNGNMEELKNINFLYPYVSIDSPSELSKTIYDTILKLDPKVSKSEVLKAAKSGFAAYKEYKNKVKNEGAKAIAYARENGKRIMILAGRPYHIDPEIGHGIDKLATSLGFVVVSEDSVCELAPVQYVKVLDQWTFHSRLYRAARYATEHSDTELVQLVSFGCGVDAITTDEVRSILEEKHKHYTQIKIDEITNLGAVKIRLRSLIGALEEGEAK

SEQ ID NO: 688 - protein, 1416 aa, Unknown
  Description of Unknown: uncultivated organism sequence
  Category: MG55 effectors
  Description: MG55-263 effector
MKLDFNTLGIDIGSTTVKIAILNKDGEIIFSDYQRHYANIQETLAKIIDEAYEEFGDIPVSPMITGSGGLTLSKHMEIPFVQEVVAVATSLKDYAPRTDVAIELGGEDAKIIYFTGGIDQRMNGICAGGTGSFIDQMATLLKTDAAGLNEYAKNYKAIYPIAARCGVFAKTDIQPLINEGATKEDLSASIFQAVVNQTISGLACGKPIKGNVAFLGGPLHFLTELKQAFIRTLGLEGDAIIAPEHSHLFAASGAAMNAHADVQSSLGELKEKLSHKIELEFEVTRMEPLFASEKEYEDFTERHNKHNVKKGDFASYKGDLFLGIDAGSTTTKVAVIGDDGSLLYSFYSSNNGSPLKTALKAMKDIYSKMPEGARIVRSCSTGYGEALLKSALLLDEGEVETVAHYTAAAFFDPNVDCILDIGGQDMKCIKIKNNSVDKVQLNEACSSGCGSFIETFAKSLNYEVADFAKIALFAENPIDLGSRCTVFMNSKVKQAQKEGASVADISAGLAYSVIKNALLKVIKLTDPKDLGKQVVVQGGTFYNDAVLRSFERISGCEAIRPDIAGIMGAFGAALIAKDRYTGQKSTMLSFKEINELRFKTSMTRCQGCINHCLLTVNEFTGDRKFISGNRCEKGLGLEKNKEHIPNLFEYKNERVFKHYKPLKKADAPRGVVGIPRVLNMYENYPFWFTFFTKLGYSVKLSPVSSRKIYELGIESIPSESECYPAKLAHGHVTWLIRQGLEYIFYPCIPYERVEVPDAGNHYNCPIVTSYGENIKNNIEELRDDKIKYQNPFISLESEEILTKRLVDFFRKENGIPAAEIKAAAHEGWLEMQAVREDMNKKGKEVLQYLKETGRHGIVLAGRPYHSDPEINHGIPDLITSYGVAVLTEDSISELSEVDRPTIVMDQWMYHSRLYKAASFVAKNDNLDLIQLNSFGCGLDAVTTDQVNDILTKQNKIYTVLKIDEVNNLGAARIRIRSLLAAVKDRERKKIEAKRVDTAHHRVIFTEQMRKDYTILVPDMSPIHFEILESALASCGYNVEVLKADSKCIDYGLKYVNNDACYPSLIVVGQFMQALLSGKYDLHKVALIITQTGGGCRATNYIGFIRRALEKAGMGYIPVISMSAGIEKNPGLKVNLEMANKALQALIYGDVFMRVLYKTRPYEKVKGSANALHEKWKKIAIESVKKANKKQFKKNIQNIVKEFDELELVDIKKPKVGIVGEILVKFMPLANNFIVELLEEEGAEAVCPDLIDFFMYSLYNANFKAEYLGKKKSSAKINNFLIWFIERYRKCANDALAASKRFHPTVPIQKLAEYASPIVSCGNQTGEGWFLTGEMIELIKSGVPNIVCTQPFGCLPNHVVGKGVIKELRHQYPDSNIVAVDYDPGASEVNQLNRIKLMLSTAGKNLIAESKDNEETA

SEQ ID NO: 689 - protein, 1415 aa, Unknown
  Description of Unknown: uncultivated organism sequence
  Category: MG56 effectors
  Description: MG56-1 effector
MDKITREDKAKYFINKNKTGVHLLERDKKRARVFSLFKKLVTALHAEYIDRVLSENDNTESLSDDFASLINKLVDYKNKKSRESDDLSDIEKNVNKLKKELASSINKVLKNKNNAIEIAIGERNITIDFNALTGAGDPGADKLVEAFREIPIEDLKKAEIFKHYIDEQDWDLEDISWGKEADALNPFSFFHKWKTYLRKFYQIRAKIYDTDGYDSDTENSGIVKGLAHQITTRILDDNAELFVQNYQKYLSQIAEKDYKAKLDEQLSKELSVNSDIFKPENFANVLSQSQIDIYNKAVGIANRFLNEKLQGSGKKPDFFKKLYKQILGKENKDENSDSKDEFLEFDTIDELQKFLLVANDYDGKPFLQYAVDLLDKDIFTGLLDKENKKLNFPETELGEFRLNTNQLSFISNFAFGNWEVFRDAVKRVKEELKNKKDDELTGEEKQVIDSVNKFLDENEIALSELVQIFRFKVEDPDSSEKTKINLTGKDLYKLVKEESAWNLPKEELQKFSQEDTGDAALYNLLLVFELYFNSLRNGRAWHTAVEEKEMEESCDKKTCPEHKSLRELFEDLKSYVSAHGEQIKESKNKRNDYMEKLSILFYRLNDMNKFLYLFELADDESLYTNKALQEIVKINPRKNKINEAFNATRNYATKAIVVEDKIKLTFERQKLADGWSLKKTENRWGNQYEAFILKKNDKYHLGINAKLPFRIENNFNLDGFEIMEYKLLKNKTLFGSSWRGYFNESSPNYTLERLRKENPDTAVKKINKMLAEFLNEKFVKTNYFSAITDKFKEIVALLESGKVDFELSYEKLSSLYAKKFSTEYKDDDSDKSTKLDRMEELSKYLVDEQILNTIPLHCIVNKIKSILDKKEGVLSGNEVAMCYIATLEKYMYEIEFINVNKKNPPTNLVLFEIYNKDFSDKKEADSTKNIHTLYFLELFSAENKKNSQFKLSGQAEVFFRDALPESEREKVSKAELKKPKTDKIPYRKKRFASPKILFHVPIEINRLAGKGGVADEIKEYIKNNKDEISVIGVDRGEKHLAYYCLLDKDGNIKEIDSLNEIEGIKFQEKLTAREEQRMKNRKLWKTIEQIKDLKKGYISFVIRKLAEMIVDNNTILTMEELNRGFKRGRMKIEKNIYQQLENALLHKLEYFVKEKTSGGIRNAYQLVPPVGPQYKWGSQQGVVFYVDAKFTSKTCPKCGYRRRGVNFGSSKDIRKMMDKKDLQLFYDKENDRFIVKYKWEYKYKNPSGNEIPFRSDYLLTDSNGFETIYSNIDRSVWRKKQHNVERINVTKILKEALLDVDLDDLAINKNIFEIPDIEVSFSKLKMALKYWTNLRFEDNWSDIEDDKRDVLQCPSCHFDTRKANHLINGDAVGAYNIARKGILAKQNLAEKNKAKVILKEWDEYTHQQRSEQRDL

SEQ ID NO: 690 - protein, 1189 aa, Unknown
  Description of Unknown: uncultivated organism sequence
  Category: MG56 effectors
  Description: MG56-2 effector
MNKYQKTSAIRLALKVNENFESNLKNAIETYKKNTADPEELCSRLIEILKKVIELFDKEEVKKDEYKSLLYKLKLSPHIIGSEFGLFISGSGRADSLRLNSRKLKGFFSTLFKKTNESLISLEKQLTEKNTPNFSPKNTRKILDEIFKSSLDIEHELLKRKAPTLKEAIDLIQKQNYHSDDLVPQEFAELQKTLAKLSKILDKLKESLSIFHEVITASLNEHTLTRQTTLEEREKKIKEEEDKLTQKVWAGDLKDNLNYISRFVAGHKNAFKATMNYLGKSINDNFITVEEAGKWTKKFYKIIAEGYKTEIKGLKKEVDELAKQIIGSDLEEFVKSNKDKIRVNKIKIDQNIKNSAINIFKKYLPDLPSNIKDDFLIKFLRNRILKVLIDNLIGKENKKYQIKPERKNAANELAKIINNKSEDNLEESQIIEILLNKKQKAAHTAGTNYTHIINKSNFIQNKNKVAKYIGNIKAKIATYKKDKKNLSHLALLVLDKKDENFDLLLVPKKFKKEFLYTLERLNEPVGDKKIYKIESLTLRSAKTLISANLGELIPFFKAGKWHTIFAFKAFLIKYLLDAGSINSTKAAALKCKVVEEFKKLIEYASLGGQEQKEADKFIGVVDKLICNSKNRFSHIELSHSFAEKSISIVEKDYSDVADFKKDFTELYNFVLVANVNSGKLIKLIQEAQKKFNNPNNLQFSNLFLLTSSGVKGNYRQNRRYLKEEKELLQSIKKQDFESIRLNPEIKIFLELGLDTQSSEELKELASKTRRGKDRLSIVFTITKNAKEEEDFLPAFAQDEDLETRIFELNKVVNENLKNAVRIGLDRGESELVSAVFGKIEEGRVKFQKIQVYYIDYKKIFDENQEGAVKIFLNPSLLFDENKPYTKYTKHLIEKEISQENLSYAKVIKDKVIMNADISSVVNQLMYITFADLNIEQVENLIVAEPGFVDKTKTIQLKFNGINSKKFGINASYLYLNGNITEDVKENFISAFLIKVLEHKLKIFNERVLPLIKIGQISIDTLPKNTKEALASNIAGVIAYLIEKEFNNQAIIHLEDLSAQFKDDHSKNGRAISREFEWALYRRLGKIENDFDLVPPKLGQTIYFAEIKKLKQAGIIKYLPTGKSSSFCPECLQFNFTNKDGIKKYIKITQKCQFCDFEIGNNELGIDSPDTLAAYNLIYPEFERRAINNN

SEQ ID NO: 691 - protein, 1403 aa, Unknown
  Description of Unknown: uncultivated organism sequence
  Category: MG57 effectors
  Description: MG57-1 effector
MEKFTNLYQLSKTLRFKLEPIGNTAETFKQWLNDMNSTNESDNLFAKDKNIYDAYLVIKSIMDKLHEQFIEKSLLSDEAKQIDFSEYYEVFKDSTKEISTDLEKRLRREIGNTYNVGGSFFLNEIATATKKLEEEKNKVRKSGKKSKGEKTDNKKKKKPYEYLTDAKILNYLSANVKTLAIQNDIEEQELDKHIKQFKGFWGYLGGYNQNRENYYEVEKEASTAVATRIVHENLPTFCSNALRFEKHKDEYLGIHQYLKDNNLITKIKNSSGEENEAETMTDTIFLIGHFNECLAQTQIEEYNRIIGNYNYLINLYNQARCDEKGFNKIDEFEKLKKQIGCGKKKHMFASLIKDKQSELTETEKKNEIEDGAILSVETLLKRAKEAGDVMFNNGNDEVEIKTIPDFIQFLKECDNWDGIYMSKTAINKISNLYFANWHSIVDTFIEIYNGKDKELKEKVNTSVTYDKKREDPLKLRDAIELSGLFAVLDTVPTEHFFKESLFKEDDTNEYRGLLDKTLPPSKNLIKLLCFDIEHNTKAFLNKSRDVIKLEKYKEENIQADEEDQKIKLIKDWFDAATDVMRIVRYFAVRKGKMKGNLPNVTMEQALSNLLYRDDAQWFKWYDLIRNYLTKKPQDDVKENKLKLNFGNSSLLGGWSDGQEKTKAATLLRCENDLYLCILKKRDVFDTSKDNPIYSSPSNASRLIIRNLKFQTLAGKGFLSEYGISYGEMSKDDPKKAIQCLQEIIKERYVKKYPLLEKFVTIKYADKSEFDAEINETLKECYVCEFVPINWNLIVEKQNNDELFLFKILCKDYKPNSIGKRDLQTIYWEDVLSDASNHQLCAGAEIFMRKPIANESPLTHRIGSKLVNKRDKDGNTIPDKFYREIYLYANGKTKVISKEAKKYIDEEKATIKDVNHEIIKDKRFYGDSQEPQYMFHCPIKLNYKTKGYKEPQYAFPEVNAKINGALQQSENMQFVGIDRGEKHLVYSCTIDKDGKIVKDTNNEWKCQHHDNINGTDYVKKLEAIAGERIIAKKNWQAQNRIKDLKCGYISHVVHRLVEEVIKDDNNRISPHAYIVLEDLNTEMKRGRQKIEKQVYQNLEVALAKKLNFVVDKEAKQGELGSVSKALQLTPPISNYQDIEGKKQFGVMLYTRANYTSITDPATGWRKTIYIRNGKEEDIKKQVLEKFSDFGFDGKDYFFEYTEANAGHTWRMYSGKNGEPLLRFQNKKQMQKDKNVWVPEPINVVEILDNLFADFDKAKSFKEQINGGVKLKKIDGRNETAWQSLRYALDIIQQIRNSGIKETDDNFLYSPVRSANGEHFDTHFPEKNGELSAIRDADANGAYNIARKGLIMDAHYRYWIEQGKPEIKKGETALSLYVSDIEWDMWLLDKEMWKRHLGEFALKKK

SEQ ID NO: 692 - protein, 1372 aa, Unknown
  Description of Unknown: uncultivated organism sequence
  Category: MG57 effectors
  Description: MG57-2 effector
MKTKTITIMKEKEQYSDFTNLYQLSKTLRFELKPVGKTAETFKQWLSEMNNSDKEENLFAKDKKIKNAYMVIKPIIDKLHERFIEKSLTSKEAKEIDFSPYFEAYKQKNVLDTFEEGLRKKIGETYTVAGGFQYLTDKRILNYLSANVEELAKQNGIDEKTLANHIEQFKGFGGYLSGYNQNRMNYYTTKEEQSTAVATRIVHENLPTFCDNILRFEKSREGYLSICQYLKDNNREIKIKNAQGEETEAETITEAIFQIKHFNSCLAQSQIEEYNRIIGNYNFLINLYNQARREEKEFKKLDEFESLYKQIGCGEKKSLFESLHDDSDLKALLQKIKEAGDTFFKECCDETEISTVSAFIKFLKECDNWEGIYMSSAAVNKISNLYFTNWHSIKDKLKESNANACITYDKDREEPVKLRDAVELSELFAVLNKESLEHLFKESLFKDNKLDTELTPSHNLINLLCSDVKQNIDYFWEHSEGITDLINDKNQSNEETQKIKQIKEWLDAAMNAMRIVRYFAVRKSKMKGNMPNVTIEQALSNLLYNDDAQWFKWYDLVRNYLTKKPQDDVKENKLKLNFGNSTLMNGWDMNKERDNTAVIIRRNNLYYLGIMDKNYNKILDADKIKSDDKSSYYEKMDYKQIALPTGVGGFVRKCFDTAQQYGWSCPKDCLNEDEKIIIKDDEARKNLTKIIDCYKDFFDKYEKDGFKYRNFNFRFLKSTEYEKLSDFFKDVERQRYMIKFRNISADYIDDLVNEGKLYLFQIYNKDFSTGRNERNGSKGKPNMHTLYWKTLFDETNLNDVVYKLNGQAEIFMREPIAENSPVKHGVGSKLVNKRDKDGNTIPEQIYKEIYLFANNKVKKENLSAEAKNYIESEKVKIKEAKYEIVKDNRFYGETKYMFHCPITINFKAGSSSGVNEKITDALQQSDNLQFIGIDRGEKHLVYSCTIDKYGKIIKCNHHDNINGTDYVQKLEAVANERLIAKKNWQQQNRIKDLKSGYISHVVHRLVEETIKDDKTIAPHAYIVLEDLNSEMKRGRQKIEKQVYQNLELALAKKFNFVVDKTAKQGELGSVSMALQLTPPVTNYKDIEGKKRFGIMLYTRANYTSITDPATGWRKTIYIKNGKDEEIKAQIIDKFSNFGFDEKDYYFEYTEENAGHTWRMYSGKDGKPLPRFQNKKQMLQDKNIWVPEQINVKEILDKLFANFDKGRSFKEQVNEEVKLEKIEGRSETAWQSLRYALNMIQQIRNSGVEKTDDNFLYSPVRNENGEHFDTRNHENNGDLSPIVDADANGAFNIARKGLIMDAHIKKWIKEGKPTTKEGDSKTPDLDLFISDREWDLWLLDREEWKKYLPVFASKSKKDADKTTSTKSPKRKKK

SEQ ID NO: 693 - protein, 1353 aa, Unknown
  Description of Unknown: uncultivated organism sequence
  Category: MG57 effectors
  Description: MG57-3 effector
MKKKLDDFTNLYSLSKTLRFELKPEAETNKRFDDWIKELEANNETTVENLIAKDYKIFNAYKALKPILDSIHEEYITIALQSDTAKNIDFLTFYEAYSDKSKDTKNIESDLRNEIEKSFEVAEEDFFDAIKSVEPKVKKSTKASVLTDKYILSYIEKNMKNFVSNTLSEEELEKHLNAFKGFFTYFSGYNINRANYYDCKEEKNTAVATRIVNENLPIFCNNKIRFEKYRQQYSIIYSELKNLGVETKIVDNNGKLQESEPISDSVFDIKYFNYCLSQVEIEKYNQIIGNANFLINLFNQQKSKEQKFAKLPLFEKLRKQIGCGTRKNLFFALKKDKEPELTEKERNSEEILSVEKLLKITAEAGERIFNGHNNTEYSVKKLIDFLQTQTNWDGFYWSDASVSYISNKFFANWHDLLDKLKDNKACASFVKKRDEQVKLNEAVELSGLFQVLDKEANEQAFKKSVLDNYRCIINLKESVSSNLINIICSDLQNFLNEFNKNKTAILTLEKYKKKNAYNTEYDSNIRLIKEWYDSIKGILRIVGLFHAKKTKMKGCLANPEIENFVESILNPENVSWNKWYDGIRNYLTKKPQDDVKENMLKLNFGSSSLLGGWSDGQEKVKISTILKHENQVYLCILKNKQFFDTSKDNNPVYKGDGGFRLILRNLKFQTLAGKGFIGAFGQGYSEMGKETPKKAMDCLKSFIKDNYIGKYPILQSVIINEYKNKKDFDLAIQEKLKECYECKFIPIDWNKIIEAEKNGDLFIFQISSKDSKENSRGRKDLQTLYWESVLSENSPHQLCAGAEIFMRKPVDKKSPVIHKKGSILINKRFSDETTIPDELYKKLMAFVASIKQPFENEQAVKDLLFKSELSKIYAKEYLDKVKLRIAEYDIEKDKRFYGETKYFFHCPIKLNYNLKTYGKPEYAFTEINQKVNDVFTSLESPYFIGLDRGEKHLVYLCEIDNSCNIIDCRSLNNINGTNYMLKLEEKAGSRQKSRQEWQRIDNISNLKDGYVSHVVHAITEKVVNEPSYIVLEDLSRKMMQGRQKIEKSLYQKFEVALAKKLNFVVEKEIPNGEPGSVSSALQLTPPLNNYKDIENKRQFGIMLYTRANYTSVTDPVTGWRKTIYLKKGSAESIRQQIIDTFSEIGFDGKDYYFEYIELNAHKTWRMYSGKDGVSLPRFINEKKLQEDKNLWIPVEVDIVEILNQLFHCFDKNKSLLEQIKDGKELNKLCNRNETAWESLIFAINMIQQIRNNGCTEQDENFLYSPVRNENGVHFDTRKQDNTKYPADADANGAYNIARKGIIMHEHILQWRKEGSKKGDVDLFVSDEEWDLWLLDRKRWQEKLPYFASKSAKK

SEQ ID NO: 694 - protein, 1357 aa, Unknown
  Description of Unknown: uncultivated organism sequence
  Category: MG57 effectors
  Description: MG57-4 effector
MKKKLDDFTNLYSLSKTLRFELKPEAETNKRFDDWIKELEANNETTAENLIAKDYKIFNAYKALKPILDSIHEEYITIALQSDTAKNIDFSTFYEAYSDKSKDTKNIESDLRNEIEKSFEVAEEDFFDAIKSVEPKVKKSTKASVLTDKYILSYIEKNMKNFVSNTLSEEELEKHLKAFKGFFTYFSGYNINRANYYDCKEEKNTAVATRIVNENLPIFCNNKIRFEKYRQQYSIIYSELKTLGVETKIVDNNGKLQESEPISDSVFDIKYFNYCLSQVEIEKYNQIIGNANFLINLFNQQKSKEQGFVKLPLFEKLRKQIGCGTRKNLFFALKKDKESELTEKERNSEEILSVEKLLKTTAESGERIFNGHNNTEYSVKKLIDFLQTQTNWDGFYWSDASVSYISNRFFANWHDLLDKLKDNRACASFDKKREEQVKLNEAVELSGLFKVLDKETNEQAFKESVFDNYKNIIDVKESVSSNLINIICSDLQNFLNEFNKNKTSILTLEKYKEKNAYNTEDDSNIRLIKEWYDSIKGILRIVGLFHAKKTKMKGSLANPEIESFVESILNPENVFWNKWYDGIRNYLTKKPQDDVKENMLKLNFGSSSLLGGWSDGQEKVKISTILKHENQVYLCILKNKQFFDTSKDNNPVYKGDGGFRLILRNLKFQTLAGKGFIGAFGQGYSEMGKETPKKAIDCLKSFIKDNYIGKYPILQSVIINEYKNKKDFDLAIQEKLKECYECKFILIDWNKIMEAEKNGDLFIFQISSKDFKENSRGRKDLQTLYWESVLSENSSHQLCAGAEIFMRKPVAEKSPVIHTKGSILINKRFSDGTTIPDELYKKLMAFVASIKQPFENEQAVKDLLFNSELSRIYAKEYLDKIKFRIAEYDIEKDKRFYGKTKYFFHCPIKLNYNLKTYGKPEYAFTEINQKVNDVFTSLESPYFIGLDRGEKHLVYLCEIDNSCNIIDCRSLNNINGTNYMLKLEEKAGSRQKSRQEWQRIDNISNLKDGYVSHVVHAITEKVVNEPSYIVLEDLSRKMMQGRQKIEKSLYQKFEVALAKKLNFVVEKEIPNGEPGSVSSALQLTPPLNNYKDIENKRQFGIMLYTRANYTSVTDPVTGWRKTIYLKKGSAESIRQQIIDTFSEIGFDGKDYYFEYIELNAHKTWRMYSGKDGVSLPRFINEKKLQEDKNLWIPVEVDIVEILNQLFHCFDKNESLLEQIKDGKELNKLCNRNETAWESLIFAINMIQQIRNNGCTEQDENFLYSPVRNENGVHFDTRKQDNTKYPADADANGAYNIARKGIIMHEHIVQWKKDGSKKGDVDLFVSEEEWDLWLLDKNKWQEKLPYFASKSAKKKNEY

SEQ ID NO: 695 - protein, 1410 aa, Unknown
  Description of Unknown: uncultivated organism sequence
  Category: MG57 effectors
  Description: MG57-5 effector
MEEFTNLYQLSKTLRFELKPVGKTAETFKQWLEELKNDELVVDNDGNLFAKDKSIKDAYLAIKPIMDRLHEQFIEMSLLSEEAKQIDFSDYFEKYQKNNVPEKLEGGLREIIGNTYKVAGNYLSEEISIVLGKEFKTKKDRPYECLTDAKMYNYLSAHVKDLAEQNGIDEEDLKKHIEQFKGFWGYLDGYNQNRENYYKVDKEASTAVATRIVHENLPTFCSNAIRFEKRKEEYLCIYRYLHDNSRETKIKNAKGEEIDVEAISDVIFQINHFNECLAQSQIEEYNRIIGNYNMLINLYNQLRCGEKDFKKVDEFEKLRKQIGCGKNKSMFETLQDDCDVKNLLRKASKAGKMMFGVASDNIEIKTVPDFIKFLRECDNWDGIYMSKTAIDKISSLYFANWHSIKDKLKESKADACITYEKKREEPIKLRDAVELSGLFAVLDSEQSEHFFKDSLFKDDDTNNYRGILNIDLKPSSNLINLLCFDIEQNIKAFLDESDNIVALEKYKDENNQAGEEDQTIKKLKEWFDAATSAMRIVRYFAVRKSKMKGNNIPNATMEQALSNLLYSDDVQWFKWYDLIRNYLTKKPQDDVKENMLKLNFGNETLMDGWDMNKEHDNSTVILRKNGKNGWYYLGIMDTKHKDVLDKEKVRTTGECYEKMDYKQIALHSGVGGFVRKCFGTAQNFGWRCPNNCLNEEGKIIIKDDEAQANLKEIIDCHKDFFDKYEKDGFKYKDFNFDFRESNKYGKLSEFYRDVEQQGYKITFRNVSVDYINDLVSEGKLYLFKINNKDFSPGKNGGKGSIGKPNLHTMYWRMLFDENNLKDVVFTLNGKSEIFMRKPVAKESPTKHSIGSKLVNKQYKDGDTKKTIPEKIYREIYSYANGETKDISAEAKKYIDEKKAIIKDVKHEIIKDNRFYGDDIEGTKYMFHCPITINFKANKYKDPKYAYPEVNKKITDSLQQSDNLQFIGIDRGEKHLVYSCTIDKNGRIIKDKCHHHDNINGTDYVQKLEAVADDRTIAKENWQAQRKIKDLRDGYISHVVHQLVEEAIKDDGKIAPHAYIVLEDLNTEMKRGRQKFEKQVYQNLETALAKKLNFVVDKDAKQGELGSESNALQLTPPINNYQDIEGKKQFGVMLYTRSNYTSVTDPATGWRKTIYIKNGKEEDIKKQILEKFSDFGFDGKDYYFEYTESNAGHLWRMYSGNNGEPLPRFLYKKQILKDKNNWVPERIDVVKILDKLFANFDKAKSFKSQIENGVELQKDEERNETAWQSLRFALDLIQQIRNSGEKDSEDDNFLFSPVRNDKGEHFDTHNYKNNAELSEIKDADANGAYNIARKGLIMDAHIKYWIEKGRPKISAKKDEKTSDLDLFISDREWDLWLLDKKLWKKELPTFASKSAKYDSDTPQTAKKRKKR

SEQ ID NO: 696 - protein, 1358 aa, Unknown
  Description of Unknown: uncultivated organism sequence
  Category: MG57 effectors
  Description: MG57-6 effector
MEEKEKVQYSDFTNLYQLSKTLRFELKPIGKTKETFEGWLKENNSFNNEDNLFAQDKKIKDAYVVIKSIMDKLHEQFIEKSLTSEEAKNIDFSDFLDIYKYRGNDFPKDFEKKLREQIGNTYKVAGAYFSKEISEALNKEFKTKKPFECLTDAKMLNYLSANVKEIAEQNNIDQETLANHIEQFKGFWGYLSNYNKNRENYYTTDKEQSTAVATRIVHENLPTFCDNILRFEKSREGYLSICQYLKDNNREIKIKNAQGEETEAETITEAIFQIKHFNSCLAQSQIEEYNRIIGNYNFLINLYNQARREEKEFKKLDEFESLYKQIGCGEKKSLFESLHDDSDLKALLQKIKEAGDTFFKECCDETEISTVSAFIKFLKECDNWEGIYMSSAAVNKISNLYFTNWHSIKDKLKDNKACVTYDKNREEPIQLRDAVELSDLFKVLDDKEQSEHFFKESLSNDINEKECPSKNLINLLCFDIEQNISKFLANSENIINLLNGNKDNQASEEDKIKQIKEWLDAAIDTMRIVRYFAVRKSKMKGNLPNTTMEKALNNLLYNDDAQWFKWYDLVRNYLTKKPQDDAKENKLKLNFGNPSLLGGWSDGQEQTKAATLLKYNNELYLCILKIRNIFDTSKADNPIYTKAPFCACRLILRNLKFQTLAGKGFKSKYGIKYSEMGNEDQSQAIKCLKEIIRERYAKKYPPLEQIINQEYSDKKSFDNEVKEALKECYVCEFVPINWDVVSKKQNSTDLFLFKIHCKDYLPKATGKKDLQTMYWEDVLSDSSNHQLCGGAEIFMREPVPKESPVKHGVGSKLVNKRDKDGNTIPEQIYKEIYLFANDKVKKENLSAEAKNYIESEKVKIKEAKYEIVKDNRFYGETKYMFHCPITINFKAGSSSGVNEKITDALQQSDNLQFIGIDRGEKHLVYSCTIDKYGKIIKCNHHDNINGTDYVQKLEAVANERLIAKKNWQQQNRIKDLKSGYISHVVHRLVEETIKDDKTIAPHAYIVLEDLNSEMKRGRQKIEKQVYQNLELALAKKFNFVVDKTAKQGELGSVSMALQLTPPVTNYKDIEGKKRFGIMLYTRANYTSITDPATGWRKTIYIKNGKDEEIKAQIIDKFSNFGFYGKDYYFEYTEENAGHTWRMYSGKDGKPLPRFQNKKQMLQDKNIWVPEQINVKEILDKLFANFDKGRSFKEQVNEEVKLEKIEGRSETAWQSFRYVLNMIQQIRNSGIEKKDDNFLYSPVRNENGEHFDTRNPQNNGGLELIVDADANGAFNIARKGLIMDAHIKHWINSGRPKIKKDGKETSDLDLFISDREWDLWLLDREEWKKYLPVFASKSKKDAEKLPLQSPQKERRNNKY

SEQ ID NO: 697 - protein, 1353 aa, Unknown
  Description of Unknown: uncultivated organism sequence
  Category: MG57 effectors
  Description: MG57-7 effector
MEEKEKVQYSDFTNLYQLSKTLRFELKPIGKTKETFEGWLKENNSFNNEDNLFAQDKKIKDAYVVIKSIMDKLHEQFIEKSLTSEEAKNIDFSDFLDIYKYRGNDFPKDFEKKLREQIGNTYKVAGAYFSKEISEALNKEFKTKKPFECLTDAKMLNYLSANVKEIAEQNNIDQETLANHIEQFKGFWGYLSNYNKNRENYYTTDKEQSTAVATRIVHENLPTFCDNILRFEKSREGYLSICQYLKDNNREIKIKNAQGEETEAETITEAIFQIKHFNSCLAQSQIEEYNRIIGNYNFLINLYNQARREEKEFKKLDEFESLYKQIGCGEKKSLFESLHDDSDLKALLQKIKEAGDTFFKECCDETEISTVSAFIKFLKECDNWEGIYMSSAAVNKISNLYFTNWHSIKDKLKDNKACVTYDKNREEPIQLRDAVELSDLFKVLDDKEQSEHFFKESLSNDINEKECPSKNLINLLCFDIEQNISKFLANSENIINLLNGNKDNQASEEDKIKQIKEWLDAAIDTMRIVRYFAVRKSKMKGNLPNTTMEKALNNLLYNDDAQWFKWYDLVRNYLTKKPQDDAKENKLKLNFGNPSLLGGWSDGQEQTKAATLLKYNNELYLCILKIRNIFDTSKADNPIYTKAPFCACRLILRNLKFQTLAGKGFKSKYGIKYSEMGNEDQSQAIKCLKEIIRERYAKKYPPLEQIINQEYSDKKSFDNEVKEALKECYVCEFVPINWDVVSKKQNSTDLFLFKIHCKDYLPKATGKKDLQTMYWEDVLSDSSNHQLCGGAEIFMREPVPKESPVKHAKGSKLVNKRDKDGNTIPEQIYREIYLYANDKKQDISTEAKKYITDKKVIIKDVKHEIIKDRRFYGETKYMFHCPITINFKAGSSSGVNEKITDALQQSDNLQFIGIDRGEKHLVYSCTIDKEGKIVKCNHHDNINGTDYVQKLEAVANERLIAKKNWQQQNRIKDLKSGYISHVVHRLVEETIKDDKTIAPHAYIVLEDLNSEMKRGRQKIEKQVYQNLELALAKKFNFVVDKTAKQGELGSVSMALQLTPPVTNYKDIEGKKRFGIMLYTRANYTSITDPTTGWRKTIYIKNGKDEEIRKQILEKFTDFGFAGKDYYFEYIEANAGHSWRMYSGKDGKPLPRFQNKKQLQNDKNIWVPEPVNVVEILNNIFEDFDKRSSFKDQVKNNVELKKVEGRNETAWQSLRYALNMIQQIRNSGVEKTDDNFLYSPVRNENGEHFDTRNPQNNGGLELIVDADANGAFNIARKGLIMDAHIKHWINSGRPKIKKDGKETPDLDLFISDREWDLWLLDREEWKKYLPVFASKSKKDADKTTSTKSPKRKKK

SEQ ID NO: 698 - protein, 1450 aa, Unknown
  Description of Unknown: uncultivated organism sequence
  Category: MG57 effectors
  Description: MG57-8 effector
MEQFTNLYQLSKTLKFKLEPEGNTKTTFEKWVNEMNSTSEDSNLFAKDEKIRDAYLVIKPIMDKLHEQFIEKSLTSDEAKHIDFSEFLAEFRDKKKRRSKKIQKIEERLRKDIGATYNVGGRFFSAEIEKAVEKLKEEKNNGEESEKKSKDEETDNKRKKTPYDCLTEKKIFSYLCANAKTLAKENGITERILNKHLEQFKKFWGYLDGYNQNRENYYEVKEEAATAVATRIVHENLPTFCSNALRFEKHREEYLGIYQFLKDNNCEAKIKNSQGKEVEAEAITETCFLIGHFNNCLAQSQIEEYNRIIGNYNYLINLYNQAPHDEKDFKKIDEFEKLKKQIGCGKKKTMFAALIKDKQNELTDEQKKKENKEGDILTVETLLNRAKDAGDVMFVKDDNKDNDKAEIITIPDFIQFLEGCDNWDGIYMSKAAINKISNRYFANWHSIVDLFIEIYNGKDKELKEKINACITYDKKREEPLKLRDAVELSGFFAVLDKVKSEHFFKEWLFKEDNTNEYCGDKALSPSKNLIKLLCHDMKYYTEEVFLKKSSEIVALKKYKDEKTQAGKEDENIKKIKEWFDAAADAMSIVRFFAVRRSKMKGSLPNVTMEQALSNLLYSEDIQWFKWRDLIRNYLTKKPQDDVKENKLKLNFGNPTLMKGWDLNKEPDNTTVILRKNDWYYLGIMNKEYNHILDNVKTSSNGECYEKMDYKQISLSSGVGGFVRKCFSSAQEYGWHCPDNCLNEDGKIIIKDDEAQPHLKAIIDCYKDFFDKYKKDGFEYKDYNFNFLESNEYEKLSDFFRDVEQQGYKISFRKVSVNYIDNLVKEGKLYLFKIYSKDFSTGKDGGNGSTGNENLHTKYWKRLFDENNLKDVVYKLNGKSEIFMRKPIAKEARIKHKKGSKLVNKRDINGEIIPEHIYKEIYSYVNNNTKISKEAKIYIDEKKAIIKDAKHEIVKDNRFYGETNSYFFHCPITINFKAKKYKEPQYAYPEVNAKITDALQQSDNLQFIGIDRGEKHLVYSCTIDKNGKIVKDKNNEWKCHHHDIITVIRKDKDGKIVEHKTNYVQKLEAVAGERIIAKKNWQAQRKIKDLRNGYISHVVHRLVEEVIKEDNKRIAPHAYIVLEDLSTEMKRGRQKFEKQVYQNLEVALAKKLNFVVDKEAEQGELGSVSKALQLTPPISNYQDIEGKKQFGIMLYTRANYTSITDPATGWRKTIYIRNGKEEDIKKQILDKFNDFGLEGKDYFFEYREANAGRIWRMYSGKNGEPLTRFRNKREKLTDKNVWVTEPINVVEILDKLFADFDKTKSFKKQIEDDGIELKKIEGRSETAWQSLRYVLDMIQQIRNSGIEKKDDNFLHSPVRGENGEHFDTRNHENNGELSAIKDADANGAYNIARKGLIMNAHYRYWVNQGRPEIKKGKTALSLYVSDAEWDMWLLDKEKWHEHLCEFALRTK

SEQ ID NO: 699 - protein, 1435 aa, Unknown
  Description of Unknown: uncultivated organism sequence
  Category: MG57 effectors
  Description: MG57-9 effector
MKEFTNLYQLSKTLRFELKPIGKTTKTFQRWLEEMNKAELVGDNDGNLFLKDKKIKNAYLAIKPIMDKLHEQLIEMSLLSEEAKQIDFSVYFEAYKNKAVKVEMENGFRKAFAKPFQYAGQCFIEKISKAQKNGKEIKTKKDKQYECLTDAKMYNYLSAHIKDLAEQNGIDEQELKKHLEQFKGFWGYLDGYNQNRENYYEVDKEASTAVATRIVHENLPTFCSNALRFEDRREEYLGIYQYLKDNNHETKIKDSKGAEIEAEAISEEIFQINYFNECLAQSQIDEYNRIIGNYNYLINLYKQARRSEKDFKKIDEFEKLKKQIGCGKKKLMFAALIKDKQSELTEDQKKMENDGGAILTVKTLLQKAKSAGDTMFNKGEDTEEIKTVPEFIQFLQGCDDWNGIYMSKSAIRKISNMYFANWHNIEDIFIDWYNGTDKEKKEMAKACITYDKNRENPLKLRDAVELSGLFAVMDKDEQSEHFFKDSLFDNEDTNDYRGVLDKELTPSKNLINLLCFDIEQNIKVFLNNSGKIVALEKYKDENNQEGEEDQTINDIKDWFDAATDAMRIVRYFAVRKSKMKGNIPNATMEQALSNLLYGEEEQWFNWYDQIRNYLTKKPQDDVKENMLKLNFGNETLMDGWDMNKEHDNSTVILRKDGFYYLGIMDTTHKDVLDKEKVRTTGECYEKMDYKQIALHSGVGGFVRKCFGTAQNFGWRCPNNCLNEEGKIIIKDDEAQANLKEIIDCHKDFFDKYEKDGFKYKDFNFDFRESNKYEKLSEFYRDVEQQSYKITFRNVSVDYINNLVSEGQLYLFKIYNKDFSTGKNGGNGSTGKPNLHTIYWRMLFDKNNLKDVVFTLNGKSEIFMRKPVAKESPTKHSIGSKLVNKRYKDGDTKKTIPEKIYREIYSYANGETKDISAEAQKYIDEKKAIIKDVKHEIIKDNRFYGDDIEGTKYMFHCPITINFKANKYKEPKYAYPEVNKKITDSLQQSANLQFIGIDRGEKHLVYSCIVDKDCKILKCGHHDVINGTDYVQKLEAVADERIIAKKNWQSQSRIKDLRDGYISHVVHSLVKETIKDDGKIAPHAYIVLEDLSTEMKRGRQKFEKQVYQNLETALAKKLNFVVDKEAKQGELGSVTKALQLTPPINNYQDIEGKKQFGVMLYTRANYTSVTDPATGWRKTIYIKDGKEEEIKKQFFEKFSKFGFDGKDYYFEYTEANAGHTWRMFSGKDGKPLPRFRNKKQKLEDKNIWVPEQINVVEILNKLFTKFDKTKSFKTQIENGVELQKVEGRSETAWQSLRYALDLIQQIRNSGEKNSRDDNFLYSPVRNDNGEHFDTRNYKNNGELSEIRDADANGAYNIARKGLIMDKHIKYWINNGRPKTKVDGNEVSDLDLFISDREWDLWLLDREQWMKELSTFASKIAKYDSDAPQTAKRRKKR

SEQ ID NO: 700 - protein, 1364 aa, Unknown
  Description of Unknown: uncultivated organism sequence
  Category: MG57 effectors
  Description: MG57-10 effector
MKQFTDLYQVSKTLRFELQPIGKTAETFKQWLEDLKSTEAVVDNNNLFAKDQGIKDAYSIIKPIMDKLHEQFIEMSLLSEVAKEIDFSQYFEAYQERNVSERLEAELREQIGKTYIVAGHFFTKEISDAIGKDFKIKKDKPYECLTDAKMTYYLSAKSQELAKQNDIDEKKLAMHIEQFKGFWGYLTGFNQNRENYYEVKKETSTAVATRIVHENLPTFCDNILRFEKRKEEYLNIFQFLKDNERETKIKNAQGEEVEIEPIAETFFQIEYFNKCLSQSQIEEYNRIICNFNYLVNLYNQARRGEDGFKKIDEFETLYKQIGCGKKKTYFETLQDISELKNLLQKARIAGDSMFNKESSKTEINTVPEFIKFLQECDNWQGIYMSSAAINKISNLYFANWHSIKDKLKEAKANACITYDKKREEPIKLRDAVELSELFDVLNTEQSEHFFKDSLFKNDETNEYRGVLDKALKPSQNLIKLLCHDIKRNIEAFLEDSDKIVALEKFKDESNPSGEEDKAIKRIKDWLDAAIGAMRIVRYFAVRKSKMKGSIPNVTMEQALGNLLYCEEAPWFKWYDLVRNYLTKKPQDDAKENKMKLNFGTSSLLGGWSDGQEMNKAATLLKYEDEMYLCILKTKNVFDTSKKDNPIYNVASSNASRLILRNLKFQTLAGKGFLGEYKVSYGEMGQSDPVKAIQCLQKIIEDRYVKKYPLLEKFVVNRYDDKSQFDKEIKEALNECYVCEFVPIDWNLVTEKQNNTELFLFKIHSKDYKSNATGKRDLQTMYWEDVLSDGSKHQLCAGAEIFMRKPVAKESPVRHRVGSKIVNKRDKDGNTIPEQIYREIYAYANGKTKDISTEAQKYINEKRAIIKDVKHDIDKDKRFYGETKFMFHCPIKLHFEAKDPKYAFAEVNAKITESLHQSNNLNYIGIDRGEKHLVYSCTIDQDGKILKCNHHDNINGTDYVQKLEAVADERIIAKKNWQAQNRIKDLKNGYISHVVHRLVEETIKDGGIISPHAYIVLEDLNTEMKRGRQKIEKQVYQNLELALAKKFNFVVDKNAEPGGLGSVSQALQLTPPVSNYQDIEGKKQFGVMLYTRANYTSITDPATGWRKTIYIKNGKEEDIRNEILDKFRDFGFDGKDYFFEYVEVHAGHTWRMYSGKDGKPLPRFQNNKQMIDDKNVWVPEQINVVDILDLLFAKFDKSKSFKKQIDQGVELTKIDGRSETAWQSLRYALNMIQQIRNSGLKNEDDNFLFSPVRNNKGEHFDTRNHQNNGELSLIVDADANGAFNIARKGLIMDAHIKHWIEIGRPMKSARRDERTSDLDLFISDKEWDLWLLNREAWEKELPLFSSRAAKEDFSKPKTGKSRKKK

SEQ ID NO: 701 - protein, 1414 aa, Unknown
  Description of Unknown: uncultivated organism sequence
  Category: MG57 effectors
  Description: MG57-11 effector
MKTFNDLTGLYSLSKTLRFELKPVGKTEETFKQWLEEMPNDKIVVDNDGNLFQKDKKIKDAYLAIKPIMDRLHEQFIEMSLLSEKAKQIDFSEYFVRFIDKDISSDLEKKLRREIGGTYQVAGECISKEITNACVKESKNKKVKDFKTKKGKEYQCLTDAKILDYLSANARILAEQNGIDEKTLEKHINQLKGFWGYLTGYNQNRENYYEVEKEASTAVATRIVHENLPTFCSNISRFEKRKDEYVGIYQYLADNNRERKIKNSKGEEVDAEAISENVFQIGYFNECLAQSQIEEYNRIIGNYNMLINLYNQARRSEKDFKKIEEFEKLYKQIGCGVKKTMFETLQNESDVKSLLEKASEAGNAMFKTCSNSLEIKTVPDFISFLKECDNWDGIYMSKTAISKISNLYFANWHSIKDKLKEAKADACITYDKNREEPIKLRDAVELSGLFAVMDSERPEYTFKESLFKNDKTNDYRGVLDKELSSSQNLIRLLCSDIERNINDFLKDSNSIVALETYKNINSQADEENQTIKQIKDWFDAATDAMRIVRYFAVRKSKMKGKNLPNVTMEQALSNLLYSDEAQWFKWYDLIRNYLTKKPQDDAKENKLKLNFDSSSFLKESGWDNDYLKHGAFIVIKGNDYYLVVVNDKLEEDDINQLKTSSNNTAKRLVYKQQKMDFKNFPRWFIFSKGDNLAPAVEKYKLPIETILTDYKKYRELSQKGKESFIEEHPKFRSNLIAYFKKCALVHESLMPFKDMLEMVWRKTDEYKTLSDFYNDTINACYEITFEDIDFDKLRSMDKFYIFQIYNKDFSTGQNGGNGTTGKPNMHTIYWKMLFDEINLKNVVFKLDGQGAELFKRKPIGKESLVKHGLGFKLVNKRDKEGNTIPEQIYREIYMYVNDKKEVISVEAQKYIDEQKVIIKDVKHEIIKDKRFFGETKYLFHCPITINFKAKSANEPEVNSKILNVLHQLDNLHFIGIDRGEKHLVYSCTIDKDGKIIKCNHHDNINGTDYVQKLEAVADERIIAKKNWQEQNKIKDLKSGYISHVVHRLVEETIKDDGKIAPHAYIVLEDLNTEMKRGRQKIEKQVYQNLETALAKKLNFVVDKNAKQGELGSVSKALQLTPPISNYQDIENKKQFGVMLYTRANYTSVTDPATGWRKTIYVKNGKEEDIKNQILEKFDDFGFDGKDYYFEYTEAHVGRTWRLYSGKNGEALPRFQNRKQLLQDKNIWVPESINVVEILDKLFVDFDKSKSFKLQIKKGVELKKIEGKSETAWQSLRYALDLIQQIRNSGEKNSIDDNFLYSPVRNINGEHFDTRNHEGNGDLSKIVDADANGAYNIARKGLIMDAHIKHWIESGSPAKKGEKSPDLDLFISDKEWDMWLLNRDLWKKELPIFASRNAKEDAVKSNIGIRRAKKK

SEQ ID NO: 702 - protein, 1365 aa, Unknown
  Description of Unknown: uncultivated organism sequence
  Category: MG57 effectors
  Description: MG57-12 effector
MKTLNDFTGLYSLSKTLRFELKPVGKTEETFKQWLEEMQSKEIVVDNDGNLFLKDKKIKDAYLAIKPIMDKLHEQFIEMSLLSEKANQIDFSEYFIKFRDKNVSSDLEKNLRSKIGDTYQVAGECISEEITNACKKEFKTKKGKEYQCLTDAKMLDYLSANVKDLAEQNGIDKQTLDNHIKQFKGFWGYLDGYNQNRENYYVVDKEASTAVATRIVHENLPTFCSNILRFEKREDEYVGIYQYLKGINRERKIKNSKGEEVDVEAISENVFQIEHFNECLAQSQIEEYNRIIGNYNMLINLYKQARRGEKDFKKIEEFEKLYKQIGCGEKETMFETLQNESDVKNLLEKASEAGKEMFKTCSKSLEIKTVPDFITFLKECDNWDGIYMSKTAISKISNLYFANWHSIKDKLKEAKKDACITYDKNREEPIKLRDAVELSGLFDVLDSERPEYTFKESLFKDDETNEYRDVLDKDRSSSQNLIRLLCFDIERNIRSFLNASDSIVALKKYKNINSQADEESQTIKQIKEWFDAATDAMRIVRYFAVRKSKMKGNMPNVTMEQALNNLLYSDEARWFKWYDLIRNYLTKKPQDDAKENKLKLNFGTSSLLGGWSDGQEKTKAATLLKFENELYLCILKTKNIFDTSKNNNPIYTTQSNASRLILRNLKFQTLAGKGFLGENGISYGDMGNDNPVKAIQCLQKIIKERYVKKYPLLEKFVVNKYTDKSKFDAEINETLKECYVCEFMPIDWSLVIEKQNNAELFLFKIHCKDYLSNAIGKKDLQTMYWEDVLSDGSKHQLCAGAEIFMRKPVAKESPIKHSVGSKLVNKRDKDGNTIPEQIYKEIYLYANGKTKDISAEAQRYIFEQKAVIKDVKHEIIKDKRFYGEAKYMFHCPIKLQFEAKDPKYVLPEVNRIITDALQQSNNLNFIGIDRGEKHLVYSCTIDKDGKIKECNHHDNINGTDYVQKLEAVADARVIAKKNWQEQNKIKDLKSGYISHVVHRLVEETIKDNDKIAPHAYIVLEDLNTEMKRGRQKIEKQVYQNLETALAKKLNFVVDKNAKQGELGSVSKALQLTPPINNYQDIENKKQFGVMLYTRANYTSVTDPATGWRKTIYIKNGKEEDIKSQILDKFDDFGFDGKDYYFEYTESNTGHTWRMYSGKNGKSLPRFQNRKQMMQDKNIWVSESIDVVEILNQLFSDFDKGKSFKEQIGQGVDLKKIEGRSEPAWQSLRYALDLIQQIRNSGLEKKDDNFLFSPVRNETGEHFDTRKHANNGGLSKIEDADANGAYNIARKGLIMDAHIKHWIERGRPTMKGEKTPDLDLFISDKEWDLWLLDREQWEKELHIFASRSEKEGEDNSLVAKKRKKKI

SEQ ID NO: 703 - protein, 1365 aa, Unknown
  Description of Unknown: uncultivated organism sequence
  Category: MG57 effectors
  Description: MG57-13 effector
MKTLNEFTGLYSLSKTLRFELKPVGKTEETFKQWLEEMQSNEIVVDNDGNLFLKDKKIKDAYLAIKPIMDKLHEQFIEMSLLSEKAKHIDFSEYFTKFRDKNVSSDLEKNLRSKIGDTYQVAGECISEEITNVCEKEFKTKKGKEYQCLTDAKMLDYLSTNVKDLAEQNGIDEQTLANHIKQFKGFWGYLDGYNQNRENYYVVDKEASTAVATRIVHENLPTFCSNILRFEKREDEYVGIYQYLKGINRERKIKNSKGEEVDVEAISENVFQIEHFNECLAQSQIEEYNRIIGNYNMLINLYNQARRDEKDFKKIEEFEKLYKQIGCGEKETMFETLQNESDVKNLLEKASKAGEAMFRTSNNSLEIKTMPDFITFLKKCDDWDGIYMSKTAISKISNLYFANWHSIKDKLKEAKKDACITYDKNREEPIKLRDAVELSGLFDVLDSERPEYTFKESLFKDDETNEYRDVLDKDRSSSQNLIRLLCFDIERNIRSFLNASDSIVALEKYKDENNQIGEENQTIKQIKDWFDAAIDAMRIVRYFAVRKSKMKGNMPNVTMEQALNNLLYSDEARWFKWYDLIRNYLTKKPQDDAKENKLKLNFGTSSLLGGWSDGQEKTKAATLLKFENELYLCILKTKNIFDTSKNNNPIYTTQSNASRLILRNLKFQTLAGKGFLGENGISYGDMGNDNPVKAIQCLQKIIKERYVKKYPLLEKFVVNKYTDKSKFDAEINETLKECYVCEFMPIDWSLVIEKQNNAELFLFKIHCKDYLSNAIGKKDLQTMYWEDVLSDGSKHQLCAGAEIFMRKPVAKESPIKHSVGSKLVNKRDKDGNTIPEQIYKEIYLYANGKTKDISAEAQRYIFEQKAVIKDVKHEIIKDKRFYGEAKYMFHCPIKLQFEAKDPKYVLPEVNRIITDALQHSNNLHFIGIDRGEKHLVYSCTIDKDGKIIKCNHHDNINGTDYVQKLEAVADARVIAKKNWQEQNKIKDLKSGYISHVVHRLVEETIKDNDKIAPHAYIVLEDLNTEMKRGRQKIEKQVYQNLETALAKKLNFVVDKNAKQGELGSVSKALQLTPPINNYQDIENKKQFGVMLYTRANYTSVTDPATGWRKTIYIKNGKEEDIKSQILDKFDDFGFDGKDYYFEYTESNTGHTWRMYSGKNGKSLPRFQNRKQMMQDKNIWVPESIDVVEILNQLFSDFDKGKSFKEQIGQGVDLKKIEGRSEPAWQSLRYALDLIQQIRNSGLEKKDDNFLFSPVRNETGEHFDTRKHANNGGLSKIEDADANGAYNIARKGLIMDAHIKHWIERGRPTMKGEKTPDLDLFISDKEWDLWLLDREQWEKELHIFASRSAKEGEDNSLVAKKRKKKI

SEQ ID NO: 704 - protein, 1401 aa, Unknown
  Description of Unknown: uncultivated organism sequence
  Category: MG57 effectors
  Description: MG57-14 effector
MKTLTNLYQVSKTLRFELQPIGKTSETFKQWLEDMNMNELVVDNDGNLFAKDKNIKEAYLAIKPIMDRLHEQLIEMSLLSEEAKQIDFSDYFEAYKNKAVKAEMEKGLRKAFAKPFQFAGQCFIDMISNDPKVGIEIKTKKDKQYECLTDAKMYNYLLANVKDLAEQNGIAEQKLAKHIEQFKGFWGYLDGYNQNRENYYEVDKETSTAVATRIVHENLPTFCSNILRFEKRLEEYLSIYQYLKDNNRETKIKDSKGEEIDVEAISDDIFQIKHFNECLAQSQIEEYNRIVGNYNMLINIYNQLRRSEKDFKKVDEFETLYKQIGCGKKKSMFETLQGDSDVKELLRKASEAGKQMFKDATDTIEIKTLPDFIKFLKECDNWDGIYMSKTAIDKISSLYFANWHSIKDKLKEAKADACITYDKKREDPIKLRDAVELSGLFAVLDTEQSEHFFKDSLFKDDESNDYRGVLDKALMPSKNLINLLCFDIEQNTKAFLNESNNIVALEKYKDENNQARVEDKTIKQIKDWFDAATDAMRIVRYFAVRKSKMKGNIPNTTMEQALSNLLYCDEARWFKWYDLIRNYLTKKPQDDAKENMLKLNFDNSTLMEGWDINKEHDNTTVILRKKGLYYLGIINKKYNNILDKDNAISDGECYEKMDYKQIALPMGVGAFVRKCFGTAQNFGWCCPQNCLNEEGKIIIKDDEAQPNLKAIVDCYKDFFDKYEKDGFKYKDFNFRFLESDKYKKLSEFFREVEPQGYKIAFRNVSVDYIEDLVENGKLYLFNIYNKDFEDKATGTPNLHTIYWKMLFDENNLKDVVYKLNGKAEVFMRNPVAKESPIKHSIGSKLVNKRDKDGNSIPEQIYREIYLYANGKTKAISVEAKKYIDEQKVVIKDVKHEIIKDKRFYGETKYMFHCPITINFKAKSSSGSEVNAKITDALQQSKNLNFIGIDRGEKHLVYSCTIDNDGKIIKGKCHDHDIISVIIKDKDGKDITHKTNYVQKLEAVADERIIAKKNWQAQNKIKDLKNGYISHVVHHLVEETIKVDGNISPHAYIVLEDLNTEMKRGRQKIEKQVYQNLELALAKKLNFVVDKNAKQGELGSVFQALQLTPPINNYQDIEGKKQFGVMLYTRANYTSVTDPATGWRKTIYIKNGKEEDIRKEILSKFDDFGFDGQDYFFEYTEANAGHIWRLYSGKNGKALPRFQNKKQMLQDKNVWVPEIINVVEILDNLFADFDKAKSFKKQIENGVELRKIEGRNETAWQSLRFALDIIQQIRNSGEKNSKDDNFLYSPVRKNGEHFDTRNYEYNGELSEIRDADANGAYNIARKGLIMDAHIKYWIDKGRPMMSSKKDKKTSDLDLFISDKEWDLWLLDKNQWRKELPTFASRSAKEGNTESKTGKRKKK

SEQ ID NO: 705 - protein, 1407 aa, Unknown
  Description of Unknown: uncultivated organism sequence
  Category: MG57 effectors
  Description: MG57-15 effector
MNDLKQFTGLYSLSKTLRFELKPVGKTKETFKRWLDELKNTELVVDDGGNLFLKDKQIKDAYLAIKPIMDKLHDQFIEMSLLSKEARNIDFSDYYTAFKDRSKGLNDIEKKLRENIGATYNVAGNYFSAEISKALGKEFKIKKDKSYECLTDAKMYYYLSANIKDLAEQNNIEEQALAQYIEKFKGFWGYLDGYNQNRENYYEFGNEASTAVATRIVHENLPTFCSNVFRFEKRKEEYLDIYQYLKDNNRETRIKDSQGKEVEVEAISEIVFQIKHFNECLAQSQIEEYNRIIGNYNMLINIYNQLRSSDKDFKRIDEFETLYKQIGCGERKAMFETLQDDSDVKNLLKRASDAGSEMFNTYSDSSEIKTVLDFIKFLRGCDNWDGIYMSKTAISKISNLYFANWHSIKDKLKEAKASACITYEKNLEDPIKLRDAVELSGLFAVFDTEQSEHFFKESLFKDDETNEYRGVLDKALTPSKNLIRLLCFDIERNIKFFLQKSVEIVALEKYKDENNYAGDEDQTIRIIKDWLDAATDAMRIVRYFAVRKNKMKGNLPNTTMEQALGNLLYNDDAQWFKWYDLIRNYLTKKPQDDVKENKLKLNFDSSSFLKESGWDNDYSKSGAFIVIHDNAYYLVVLNNKLEEREINKLKTLSNNSAQRIVYKQQKMDFKNFPRLFIFSKGDNLAPAVNKYNLPIATIIDDYKKYRNLNGKDKDAFIEEHPKFRYNLIEYFKKCAPLHESLSPFKDQFEKVWRKTEDYNTLSEFYKDTANACYEISFENIDFQQLCSMDKCWLFQIYNKDFSIGKDGCNGSTGKPNLHTIYWKMLFDETNLKNVIFKLDGQGAEIFMREPVPKESPTKHPVGSKIVNKRDNDGNTIPEHIFREIYLYANGKTKDISNVARKYIGEGKAVIKDVKHEIIKDKRFYGEPKYIFHCPITINFKSKSANESEINSKITNALQQSDNLQFIGIDRGEKHLVYSCTIDKNCKIIKCDHHDNINGTNYVQKLEGVADDRIIAKKNWQAQSKIKDLRDGYISHVVHRLVDETIKDGDSIAPHAYIVLEDLNTEMKRGRQKFEKQVYQNLETALAKKLNFVVDKNAKQGELGSVSKALQLTPPINNYQDIEGRKQFGVMLYTRANYTSVTDPATGWRKTIYIKNGKEEDIKEQILDKFSDFGFDGKDYYFEYTESNVGHTWRLYSGNNGEPLPRFQNKKQMQQDKNVWVPEKNNVVEILDKLFVNFDKSKSFKAQIENGVELQKAEGRSETSWQSLRYALDLIQQIRNSGEKNSKDDNFLYSPVRDDKGEHFDSRHPERNGELSEIKDADANGAYNIARKGLIMDAHIKYWIEKGRPTMKKDGKEISDLDLFISDKEWDLWLLDRDQWKNTLPTFALRNAKEGDAKPPKRKGGKKK

SEQ ID NO: 706 - protein, 1391 aa, Unknown
  Description of Unknown: uncultivated organism sequence
  Category: MG57 effectors
  Description: MG57-16 effector
MNNTDALTNLYSLSKTLRFELQPIGKTKETFDDWLKEMNGDNPVVDNDSNLFVKDQGIKDAYMAIKPIMDKLHERFIEKSLTSEESKRIDFSEYFARFKDKSKDITNELEKGLRERIGETYIVAGNYFSEEIDKATKKLQEEQPKGKSRKQKENGTKPQKAKKKKPFECLTDAQMLNYLYANVAELAKENNIDEKVLANHIKKFQGFWGYLSGYNTNRENYYTTDTEQSTAVATRIVNDNLPTFCTNVLRFEKCRDEYLGMYQYLKDHNRETKIKKPQGELVEAETIKETFFQIEHFNECLSQQQIEEYNRVIGNCNLLINLYNQSSRDEKDFKKVDEFETLYKQIGCGKKKSMFAALIKDKQSELSEEQKKEENEENAIYSVETLLRKAQKAGDKMFGNGKNESSINTLPAFIHFLKDCDNWNGIYMSSTAVNKISNRYFANWHSIEDKLKEAKADACITYNKNREEQIRLRDAVELSGLFAVLDTEQSEHLFKQSLFKEEATNDYRGVLDTTLTPSKNLINLLCFDMERNMKAFLEISDSINALKKYKDDNTSSGEENQAIKLIKEWFDAATHAMRIVRFFAVRKSKMKGNLPNVTMEQALSNLLYSDDAQWFMWYDLVRNYLTKKPQDDVKENKLKLNFDNPILLGGWSDGQEKVKSATLLKYMNEMYLCILKTRNIFDTSKENPIYIEHSDASRLILRNLKFQTLAGKGFKGENGITYGEMGKSDPQKAIQCLQKIIAERYVSKYPLLEEYVSNAYTDKSKFDAAITETLKQCYVCEFEPIDWNLVVEKQNNGELFLFKIHCKDYMPKVSGKKDLQTLYWEDVLSEGSKHQLCAGAEIFMRKPVAKAPRKKHSVGSKLVNKKDSDGNTIPERIYSEIYLYVNSKTESISAEAQRYIDEQKAVIKDVKHEIIKDKRFYGETKFMFHCPVKLNYESKGYKGPNYAYPEVNTAIRESLQQSDNLQFIGIDRGEKHLVYSCTLDKDCNIIACHDHDNINGTDYVQKLEDVANERIIAKKNWQAEDKIKDLKSGYISHVVHRLVEEVIKDGNTIEPHAYIVLEDLNTEMKRGRQKIEKQVYQNLETALAKKLNFVVDKDAQPNELGSVGKALQLTPPISNYQDIEGKKQFGVMLYTRANYTSVTDPATGWRKTIYLKNGKEEEIKKQVLEKFSDLGFDGRDYFFEYTEAHAGHTWRLYSGKDGQPLPRFQNKKQLQQDKNIWVPEQVNVVEILDNLFAHFDKTKSFKQQIEQGVELVKIERRKEIAWQSLRYALDLIQQIRNTGTEQKDDNFLYSPVRNSKGEHFDTRNHANNGKLSAIKDADANGAYNIARKGLIMDAHIKYWMACGQPSRKNTLDLFVSDKEWDLWLLDRKGWEQELPAFALRNANESKD

SEQ ID NO: 707 - protein, 1406 aa, Unknown
  Description of Unknown: uncultivated organism sequence
  Category: MG57 effectors
  Description: MG57-17 effector
MTQFTNLYQISKTLRFELKPVGKTKETFKQWFEELKNAELIVDNDGNLFLKDKNIKEAYLTIKPIMDRLHEQFIEMSLLSEEAKQIDFSEYFEKYQAKSVSEKLEKGLREKIGNTYIVAGKYLSNEIGIVLDKELNTKKGKPYDCLTDAKMYNYLSANVKVLAEQNGIDEQVLDKHIKQFKGFWGYLTGYNHNRKNYYEVDKEATTAIATRIVHENLPIFCCNIMRFVKRREEYISIYQYLKEHNRETKIKDSKGNDMDVEAISEEVFQINHFNECLAQSQIEEYNRIISNYNMLINLYNQLRRSEKDFKKIDELETLYKQIGCGKKRTMFETLQDDSDVKRLLQKVSKAGDEMFRVRSNSLEIKTVPDFITFLKDCDNWDGIYMSKAAISKISNIYFANWHSIKDKLKRAKANSCITYDKNREEQIKLRDAVELSELFAVVDTEQTEHFFKESLFKDSDTNEYRGVIDKKITPSKNLIKLLCYDIERNKKVFLEKTDEIVTLKKYKEENNQTSEEDQTIKTIKDWFDAVTDAMRIVRYFSVRKSKMKGNLPNATMEQALSNLLYSDNAQWFKWYDLIRNYLTKKPQDDAKENKLKLNFDSSSFLRESGWDNDYSKNGAFIVIKDNDYYLVVIKEKLEEEDINKLKNLSDNSAKRVVYKQQKMDFKNFPRLFVFSKGDNLAPAVSKYNLPIDTIFDDYRKYRNLKGKEKDVFIEEHPKFRYNLIEYFKKCAPLHESLSSFKDKFEEVWKRTEDYNSLSEFYKDTANACYELSFEHINFEELCSSDKCHLFQIYNKDFSIGENGGNGSIGKPNLHTIYWNMLFDETNLKDVIFKLDGQGAEIFMREPVAKESPTKHPIGSKLVNKRDKDGNTIPAQLYREIYLYVNGKAKIISKEAQEYLDNEKVVIKEVKHEIIKDNRFYGDSAKYMFHCPITINFKAQPGNESEVNSIITNALQQSDNLNIIGIDRGEKHLVYSCTIDRNGKIIKGKCHHYDNINGTNYVQKLEAVADERIIAKKNWQAQDKIKDLKNGYISHVVHRLVKEAIKDGDIIDPHAYIVLEDLNAEMKRGRQKIEKQVYQNLETALAKKLNFVVDKNVTQCELGSARKALQLTPPISNYQDIEGKKQFGIMLYTRANYTSVTDPATGWRKTIYIKNGRDEEIKKQILDRFIDFGFDGKDYYFKYTEDNVGHTWQMYSGKNGEPLSRFQNRKQILKDKNIWVPEQVNVIKILDKLFAEFDKSESFKAQINNGSELQKDDERNETAWQSLRYALDMIQQIRNSGEKNSENDNFLCSPVRNNNGEHFDTRRHEKNGELSEIIDADANGAFNIARKGLIMDAHIKYWIGNGRPTTKRDGKVISDLDLFISDKEWDMWLLDRAQWVKQLPSFASRNVKDSNENPPTAKRGKKS

SEQ ID NO: 708 - protein, 1406 aa, Unknown
  Description of Unknown: uncultivated organism sequence
  Category: MG57 effectors
  Description: MG57-18 effector
MTQFTNLYQISKTLRFELKPVGKTKETFKQWFEELKNAELIVDNDGNLFLKDKNIKEAYLTIKPIMDRLHEQFIEMSLLSEEAKQIDFSEYFEKYQAKSVSEKLEKGLREKIGNTYIVAGKYLSNEIGIVLDKELNTKKGKPYDCLTDAKMYNYLSANVKVLAEQNGIDEQVLDKHIKQFKGFWGYLTGYNHNRKNYYEVDKEATTAIATRIVHENLPIFCCNIMRFVKRREEYISIYQYLKEHNRETKIKDSKGNDMDVEAISEEVFQINHFNECLAQSQIEEYNRIISNYNMLINLYNQLRRSEKDFKKIDELETLYKQIGCGKKRTMFETLQDDSDVKRLLQKVSKAGDEMFRVRSNSLEIKTVPDFITFLKDCDNWDGIYMSKAAISKISNIYFANWHSIKDKLKRAKANSCITYDKNREEQIKLRDAVELSELFAVVDTEQTEHFFKESLFKDSDTNEYRGVIDKKITPSKNLIKLLCYDIERNKKVFLEKTDEIVTLKKYKEENNQTSEEDQTIKTIKDWFDAVTDAMRIVRYFSVRKSKMKGNLPNATMEQALSNLLYSDNAQWFKWYDLIRNYLTKKPQDDAKENKLKLNFDSSSFLRESGWDNDYSKNGAFIVIKDNDYYLVVIKEKLEEEDINKLKNLSDNSAKRVVYKQQKMNFKNFPRLFVFSKGDNLAPAVSKYNLPIDTIIDDYRKYRNLKGKEKDVFIEEHPKFRYNLIEYFKKCAPLHESLSSFKDKFEEVWKRTEDYNSLSEFYKDTANACYELSFEHINFEELCSSDKCHLFQIYNKDFSIGENGGNGSIGKPNLHTIYWNMLFDETNLKDVIFKLDGQGAEIFMREPVAKESPTQHPIGSKLVNKRDKDGNTIPAQLYREIYLYVNGKTKIISKEAQEYLDNEKVVIKEVKHEIIKDNRFYGDSAKYMFHCPITINFKAQPGNESEVNSIITNALQQSDNLKFIGIDRGEKHLVYSCTIDRNGKIIKGKCHHYDNINGTNYVQKLEAVADERIIAKKNWQAQDKIKDLKNGYISHVVHRLVKEAIKDGDIIDPHAYIVLEDLNAEMKRGRQKIEKQVYQNLETALAKKLNFVVDKNVTQCELGSVRKALQLTPPISNYQDIEGKKQFGIMLYTRANYTSVTDPATGWRKTIYIKNGRDEEIKKQILDRFIDFGFDGKDYYFKYTEDNVGHTWQMYSGKNGEPLSRFQNRKQILKDKNIWVPEQVNVIKILDKLFAEFDKSESFKAQINNGSELQKDDERNETAWQSLRYALDMIQQIRNSGEKNSENDNFLCSPVRNNNGEHFDTRRHEKNGELSEIIDADANGAFNIARKGLIMDAHIKYWIGNGRPTTKRDGKVISDLDLFISDKEWDMWLLDRAQWVKQLPSFASKNVKDGNENPPTAKRGKKS

SEQ ID NO: 709 - protein, 1401 aa, Unknown; identical to SEQ ID NO: 704
  Description of Unknown: uncultivated organism sequence
  Category: MG57 effectors
  Description: MG57-19 effector

SEQ ID NO: 710 - protein, 431 aa, Unknown
  Description of Unknown: uncultivated organism sequence
  Category: MG57 effectors
  Description: MG57-20 effector
MKTKTITIMKEKEQYSDFTNLYQLSKTLRFELKPVGKTAETFKQWLSEMNNSDKEENLFAKDKKIKNAYMVIKPIIDKLHERFIEKSLTSKEAKEIDFSPYFEAYKQKNVLDTFEEGLRKKIGETYTVAGGFQYLTDKRILNYLSDNVQELAKQNGIDEKTLANHIEQFKGFGGYLSGYNQNRMNYYTTKEEQSTAVATRIVHENLPTFCDNILRFEKSREGYLSICQYLKDNNREIKIKNAQGEETEAETITEAIFQIKHFNSCLAQSQIEEYNRIIGNYNFLINLYNQARREEKEFKKLDEFESLYKQIGCGEKKSLFESLHDDSDLKALLQKIKEAGDTFFKECCDETEISTVSAFIKFLKECDNWEGIYMSSAAVNKISNLYFTNWHSIKDKLKESNANACITYDKDREEPVKLRDAMGGKTKSKIM

SEQ ID NO: 711 - protein, 1406 aa, Unknown
  Description of Unknown: uncultivated organism sequence
  Category: MG57 effectors
  Description: MG57-21 effector
MKTFNDLTGLYSLSKTLRFELKPVGKTEETFKRWLEEMQNNEKVIDNDSNLFLKDKNIKDAYLAIKPIMDRLHEQFIEMSLLSEKAKQIDFSEYFIKFKDKNISSDLEKKLRREIGDTYQVAGECISEEITNACGKEFKIKKGKEYQCLTDAKILDYLSANVKNLAKFNCIDEKTLDKHINQLKGFWGYLTGYNQNRENYYEVEKEASTAVATRIVHENLPTFCSNILRLEKRKDEYVGIYQYLADNNREIKIKNSKGEEVDAEAISENVFQIGYFNECLAQSQIEEYNRIIGNYNMLINLYNQARRSEKNFKKIEEFEKLYKQIGCGVKKTMFETLQNESDVKSLLEKASEAGNAMFKTCSNSLEIKTVPDFVSFLKECDNWDGIYMSKTAISKISNLYFANWHSIKDKLKETKAEACITYDKNREEPIKLRDAVELSGLFAVMDLERPEYTFKESLFKNDETNDYRGVLDKELSSSQNLIRLLCSDIERNINDFLKDSDSIVALETYKNINSQADEENQTIKQIKDWFDAATDAMRIVRYFAVRKSKMKGKNLPNVTMEQALSNLLYSDEAQWFKWYDLIRNYLTKKPQDDAKENKLKLNFDSSSFFKESGWDNDYLKHGAFIVIKGNDYYLVVVNDKLEEDDINQLKTSSNNTAKRLVYKQQKMDFKNFPRWFIFSKGDNLAPAVEKYKLPIETILKDYQKYRELSQKGKESFIEEHPKFRSNLIAYFKKCALVHESLMPFKDMLEMVWRKTDEYKTLSDFYNDTINACYEITFEDIDFDKLRSMDKFYIFQIYNKDFSTGQNGGNGTTGKPNMHTIYWKMLFDEINLKNVVFKLDGQGAEIFMRKPIGKESLVKHGLGFKLVNKRDKEGNTIPEQIYREIYMYVNDKKEVISVEAQKYIDEQKVIIKDVKHEIIKDKRFFGETKYLFHCPITINFKAKSANEPEVNSKILNVLHQLDNLHFIGIDRGEKHLVYSCTIDKDGKIIKCNHHDNINGTDYVQKLEAVADERIIAKKNWQEQNKIKDLKSGYISHVVHRLVEETIKDDGKIAPHAYIVLEDLNTEMKRGRQKIEKQVYQNLETALAKKLNFVVDKNAQQGELGSVSKALQLTPPISNYQDIENKKQFGVMLYTRANYTSVTDPATGWRKTIYVKNGKEEDVKNQILEKFDDFGFDGKDYYFEYTEAHVGRTWRLYSGKNGEPLPRFQNRKQLLQDKNIWVPESINVVEILDKLFVDFDKSKSFKLQIKQGVELKKIEGKSETAWQSLRYALDLIQQIRNSGEKKSIDDNFLYSPVRNINGEHFDTRNHEGNGDLSKIVDADANGAYNIARKGLIMDAHIRHWIESGRPAKKGEKSPDLDLFISDKEWDLWLLNRDQWKKELPIFASRNAKEDAVKSNTGIRRAKKK

SEQ ID NO: 712 - protein, 1372 aa, Unknown
  Description of Unknown: uncultivated organism sequence
  Category: MG57 effectors
  Description: MG57-22 effector
MKTKTITIMKEKEQYSDFTNLYQLSKTLRFELKPVGKTAETFKQWLSEMNNSDKEENLFAKDKKIKNAYMVIKPIIDKLHERFIEKSLTSKEAKEIDFSPYFEAYKQKNVLDTFEEGLRKKIGETYTVAGGFQYLTDKRILNYLSANVEELAKQNGIDEKTLANHIEQFKGFGGYLSGYNQNRMNYYTTKEEQSTSVATRIVHENLPIFCDNILRFEKSREGYLSICQYLKGNNREIKIKNAQGEETEAETITEAIFQIKHFNSCLAQSQIEEYNRIIGNYNFLINLYNQARREEKEFKKLDEFESLYKQIGCGEKKSLFESLHDDSDLKALLQKIKEAGDTFFKECCDETEISTVSAFIKFLKECDNWEGIYMSSAAVNKISNLYFTNWHSIKDKLKESNANACITYDKDREEPVKLRDAVELSELFAVLNKESLEHLFKESLFKDNKLDTELTPSHNLINLLCSDVKQNIDYFWEHSEGITDLINDKNQSNEETQKIKQIKEWLDAAMNAMRIVRYFAVRKSKMKGNMPNVTIEQALSNLLYNDDAQWFKWYDLVRNYLTKKPQDDVKENKLKLNFGNSTLMNGWDMNKERDNTAVIIRRNNLYYLGIMDKNYNKILDADKIKSDDKSSYYEKMDYKQIALPTGVGGFVRKCFDTAQQYGWSCPKDCLNEDEKIIIKDDEARKNLTKIIDCYKDFFDKYEKDGFKYRNFNFRFLKSTEYEKLSDFFKDVERQRYMIKFRNISADYIDDLVNEGKLYLFQIYNKDFSTGRNERNGSKGKPNMHTIYWKTLFDETNLNDVVYKLNGQAEIFMREPVAKESPVKHGVGSKLVNKRDKDGNTIPEQIYKEIYLFANNKVKKENLSAEAKNYIESEKVKIKEAKYEIVKDNRFYGETKYMFHCPITINFKAGSSSGVNEKITDALQQSDNLQFIGIDRGEKHLVYSCTIDKEGKIVKCNHHDNINGTDYVQKLEAVANERLIAKKNWQQQNRIKDLKSGYISHVVHRLVEETIKDDKTIAPHAYIVLEDLNSEMKRGRQKIEKQVYQNLELALAKKFNFVVDKTAKQGELGSVSMALQLTPPVTNYKDIEGKKRFGIMLYTRANYTSITDPATGWRKTIYIKNGKDEEIKAQIIDKFSNFGFYGKDYYFEYTEENAGHTWRMYSGKDGKPLPRFQNKKQMLQDKNIWVPEQINVKEILDKLFANFDKGRSFKEQVNEEVKLEKIEGRSETAWQSFRYVLNMIQQIRNSGIEKKDDNFLYSPVRNENGEHFDTRNPQNNGGLELIVDADANGAFNIARKGLIMDAHIKHWINSGRPKIKKDGKETSDLDLFISDREWDLWLLDREEWKKYLPVFASKSKKDADKTTSTKSPKRKKK

SEQ ID NO: 713 - protein, 765 aa, Unknown
  Description of Unknown: uncultivated organism sequence
  Category: MG57 effectors
  Description: MG57-23 effector
MKRFTNLYQLSKTLKFKLEPMDNTADTFKDWLEEMERDVCTDENLFAKDKNIKKAYMAIKPIMDRLHEQFIEMSLLSEDAKQIDFSEYFEAYRKKPITPAMEKELRKAFAKPFQCAGRCFIEEISKAQKDGKEIKTKKDKQYECLIDAKIYNYLSANVKEIAEQNGIDELTLDRHIKQFKGFWGYLDGYNQNRENYYEVEKEASTAVATRIVHENLPTFCDNAIRFEKRKEDYLCIYQYLKDNSRETKIKNSKGEEIEVETISDEIFHIKHFNECLAQSQIEEYNRIIGNYNYMINLYNQLRRGEKDFKIIDEFEKLYKQIGCGRKKSMFAVLIKDKHNELKEDQKKAEEDGEVILTVQTLLQRAKSAGDMMFKKGKDTAEIKTVPEFIQFLQGCKDWNGIYMSSAAVNKISNLYFANWHSVKDRLKEAKASACITYDKYREEPIKLRDAVELSGLFAVLDEEQSEHLFKESLFKDDDTNEYRGVLNKALTSSQNLINLLCSDIERNIKVFQEKTADILALDKYKDENNQAGEEDENIKLIKEWFDAATDAMRVVRYFAVRKSKMKGNLPNVTIEQALSNLLYNDDVQWFKWYDLVRNYLTKKPQDYAKDNKLKLNFDSSSFLKENGWDNDYSKSGAFIVIKDNNYYLVVVKDKMEEDELIKLKSPSNNAAKRVIYKQQKMDFKNFPRWFIFSKGDNLAPAVEKYNLPIDTILDDYKVYRTLSGSEKDKFIEGHPRFRYNLIEYFKKCATLHESLSPFKDKFETI

SEQ ID NO: 714 - protein, 1372 aa, Unknown
  Description of Unknown: uncultivated organism sequence
  Category: MG57 effectors
  Description: MG57-24 effector
MKTKTITIMKEKEQYSDFTNLYQLSKTLRFELKPVGKTAETFKQWLSEMNNSDKEENLFAKDKKIKNAYMVIKPIIDKLHERFIEKSLTSNKAKKIDFSPYIEAYKQKNVLDTFEEGLRKKIGETYTVAGGFQYLTDKRILNYLSANVEELAKQNGIDEKTLANHIEQFKGFGGYLSGYNQNRMNYYTTKEEQSTAVATRIVHENLPTFCDNILRFEKSREGYLSICQYLKDNNREIKIKNAQGEETEAETITEAIFQIKHFNSCLAQSQIEEYNRIIGNYNFLINLYNQARREEKEFKKLDEFESLYKQIGCGEKKSLFESLHDDSDLKALLQKIKEAGDTFFKECCDETEISTVSAFIKFLKECDNWEGIYMSSAAVNKISNLYFTNWHSIKDKLKESNANACITYDKDREEPVKLRDAVELSELFAVLNKESLEHLFKESLFKDNKLDTELTPSHNLINLLCSDVKQNIDYFWEHSEGITDLINDKNQSNEETQKIKQIKEWLDAAMNAMRIVRYFAVRKSKMKGNMPNVTIEQALSNLLYNDDAQWFKWYDLVRNYLTKKPQDDVKENKLKLNFGNSTLMNGWDMNKERDNTAVIIRRNNLYYLGIMDKNYNKILDADKIKSDDKSSYYEKMDYKQIALPTGVGGFVRKCFDTAQQYGWSCPKDCLNEDEKIIIKDDEARKNLTKIIDCYKDFFDKYEKDGFKYRNFNFRFLKSTEYEKLSDFFKDVERQRYMIKFRNISADYIDDLVNEGKLYLFQIYNKDFSTGRNERNGSKGKPNMHTIYWKTLFDETNLNDVVYKLNGQAEIFMREPIAENSPVKHGVGSKLVNKRDKDGNTIPEQIYKEIYLFANNKVKKENLSAEAKNYIESEKVKIKEAKYEIVKDNRFYGETKYMFHCPITINFKAGSSSGVNEKITDALQQSDNLQFIGIDRGEKHLVYSCTIDKYGKIIKCNHHDNINGTDYVQKLEAVANERLIAKKNWQQQNRIKDLKSGYISHVVHRLVEETIKDDKTIAPHAYIVLEDLNSEMKRGRQKIEKQVYQNLELALAKKFNFVVDKTAKQGELGSVSMALQLTPPVTNYKDIEGKKRFGIMLYTRANYTSITDPATGWRKTIYIKNGKDEEIKVQIIDKFSNFGFDEKDYYFEYTEENAGHTWRMYSGKDGKPLPRFQNKKQMLQDKNIWVPEQINVKEILDKLFANFDKGRSFKEQVNEEVKLEKIEGRSETAWQSLRYALNMIQQIRNSGVEKTDDNFLYSPVRNENGEHFDTRNHENNGDLSPIVDADANGAFNIARKGLIMDAHIKKWIKEGKPTTKEGDSKTPDLDLFISDREWDLWLLDREEWKKYLPVFASKSKKDADKTTSTKSPKRKKK

SEQ ID NO: 715 - protein, 431 aa, Unknown
  Description of Unknown: uncultivated organism sequence
  Category: MG57 effectors
  Description: MG57-25 effector
MKTKTITIMKEKEQYSDFTNLYQLSKTLRFELKPVGKTAETFKQWLSEMNNSDKEENLFAKDKKIKNAYMVIKPIIDKLHERFIEKSLTSKEAKEIDFSPYFEAYKQKNVLDTFEEGLRKKIGETYTVAGGFQYLTDKRILNYLSANVEELAKQNGIDEKTLANHIEQFKGFGGYLSGYNQNRMNYYTTKEEQSTAVATRIVHENLPTFCDNILRFEKSREGYLSICQYLKDNNREIKIKNAQGEETEAETITEAIFQIKHFNSCLAQSQIEEYNRIIGNYNFLINLYNQARREEKEFKKLDEFESLYKQIGCGEKKSLFESLHDDSDLKALLQKIKEAGDTFFKECCDETEISTVSAFIKFLKECDNWEGIYMSSAAVNKISNLYFTNWHSIKDKLKESNANACITYDKDREEPVKLRDAMGGKTKSKIM

SEQ ID NO: 716 - protein, 1366 aa, Unknown
  Description of Unknown: uncultivated organism sequence
  Category: MG57 effectors
  Description: MG57-26 effector
MKQFTNLYQVSKTLRFELQPIGKTKETFKGWLEKIDTAIPDVDDENLFLRDKKIKEAYLAIKPIMDSIHEEFIEKSLSSKEAKNIDFSDYYSLFKEKKVSSEFEKRLRKKISDTYSIAGDYFISEIEKTIANQKRKSNKKAAVAEEEKITKRKSKKPFECLTDVKMLFYLSANVKRLAEQHEIDEETLSRYIQTFKGFWGYLDGYNQNRENYYESEKETSTAVATRIVNENLPTFCNNILRFEKREKEYLNVFQYLKNNNRETKIKNSLGEEEDVVPIRASIFKIEHFNECLTQSQIEEYNRVIGNYNLLINLYNQLRSEETEYREIDEFEKLRKQIGCGKKPTNFDMLHDDSELKELLQKAGEAGEKMFGTENKQAEISTLPQFVKFLKDCNNWEGIYMSKAAINIISSLYFANWHSIEDKLYEAKAKACITYDKNREEPIQLRDAVELSELFAVLDTELTEHIFKDSLFKKDETNEYQNVLDKTLSPSKNLINLLCCDIEQYTKSFLVKTDKILALEKFKNDTHANEENETVKIIREWFVAATNAMRIVRFFAVRKSKMKGKIPNVAMEHALDNLLYCDNVQWFKWYDLVRNYLTKKPQDDVKENKLKLNFGTSSLLDGWSDGQEKTKAATLLKYNNELYLCILKTKNIFDTSKEDNPVYQTNLSVASRLILRNLKFQTLAGKGFLSENDISYSEMGAANPSQAILCLQKIIKERYVSKYPQLEKFVLKSYTDKGKFDAEISDALKDCYVCEYMPIDWNVIIEKQNSEELFLFKICCKDIKPGTYGRKDLQTMYWEDVLSEGSNHQLCAGAEIFMREPISKESPVRHRVGSKLVNKRDQDGNTIPEHIYREIYSYANGRVNVLSAEAKVFAEKSIIKDAKYEIIKDKRFYGDTKFMFHCPIKLFFKAKDPSRVFSEVNTLVNDALQESTNLHFIGIDRGEKHLVYSCAIDKDARIVKCIHHDIINGTDYVQKLEAVADERIIAKKNWQEENKIKDLKKGYISHVVHRLVEETIKDDGMISPHAYIILEDLSTSMKRGRQKIEKQVYQNLEMALAKKLNFVVDKTASQGELGSVSMALQLTPPVNTYQDIEGKKQFGVMLYTRANYTSITDPATGWRKTIYIKDGKEDNIRKDFISKFTDWGFDGLDYYFEYKEENVGHIWRMYSGINGEPLPRFQNRKQIMQDKNIWVSEQVNVVDILDNLFARFDKSKSLKEQLEHGVELQKINGRNETAWQSLRYAINVIQQIRNSGDKKSGNDNFLYSPVRNAKGEHFDTRNHHNNGELSEIKDADANGAFNIARKGLIMDAHIKYWNECGRPMKSDKKDEKTSDLDLFISDREWDMWLLDRSLWEKELPIFASLKAKKKQ

SEQ ID NO: 717 - protein, 1366 aa, Unknown
  Description of Unknown: uncultivated organism sequence
  Category: MG57 effectors
  Description: MG57-27 effector
MKQFTNLYQVSKTLRFELQPIGKTKETFKGWLEKIDTAIPDVDDENLFLRDKKIKEAYLAIKPIMDSIHEEFIEKSLSSKEAKNIDFSDYYSLFKEKKVSSEFEKRLRKKISDTYSIAGDYFISEIEKTIANQKRKSNKKAAVAEEEKITKRKSKKPFECLTDVKMLFYLSANVKRLAEQHEIDEETLSRYIQTFKGFWGYLDGYNQNRENYYESEKETSTAVATRIVNENLPTFCNNILRFEKREKEYLNVFQYLKNNNRETKIKNSLGEEEDVVPIRASIFKIEHFNECLTQSQIEEYNRVIGNYNLLINLYNQLRSEETEYREIDEFEKLRKQIGCGKKPTNFDMLHDDSELKELLQKAGEAGEKMFGTENKQAEISTLPQFVKFLKDCNNWEGIYMSKAAINIISSLYFANWHSIEDKLYEAKAKACITYDKNREEPIQLRDAVELSELFAVLDTELSEHIFKDSLFKKDETNEYQNVLDKTLSPSKNLINLLCCDIEQYTKSFLVKTDKILALEKFKNDTHANEENETVKIIREWFVAATNAMRIVRFFAVRKSKMKGKIPNVAMEHALDNLLYCDNVQWFKWYDLVRNYLTKKPQDDVKENKLKLNFGTSSLLDGWSDGQEKTKAATLLKYNNELYLCILKTKNIFDTSKEDNPVYQTNLSVASRLILRNLKFQTLAGKGFLSENDISYSEMGAANPSQAILCLQKIIKERYVSKYPQLEKFVLKSYTDKGKFDAEISDALKDCYVCEYMPIDWNVIIEKQNSEELFLFKICCKDIKPGTYGRKDLQTMYWEDVLSEGSNHQLCAGAEIFMREPISKESPVRHRVGSKLVNKRDQDGNTIPEHIYREIYSYANGRVNVLSAEAKVFAEKSIIKDAKYEIIKDKRFYGDTKFMFHCPIKLFFKAKDPSRVFSEVNTLVNDVLQESTNLHFIGIDRGEKHLVYSCAIDKDARIVKCIHHDIINGTDYVQKLEAVADERIIAKKNWQEENKIKDLKKGYISHVVHRLVEETIKDDGMISPHAYIILEDLSTSMKRGRQKIEKQVYQNLEMALAKKLNFVVDKTASQGELGSVSMALQLTPPVNTYQDIEGKKQFGVMLYTRANYTSITDPATGWRKTIYIKDGKEDNIRKDFISKFTDWGFDGLDYYFEYKEENVGHIWRMYSGINGEPLPRFQNRKQIMQDKNIWVSEQVNVVDILDNLFARFDKSKSLKEQLEHGVELQKINGRNETAWQSLRYAINVIQQIRNSGDKKSGNDNFLYSPVRNAKGEHFDTRNHHNNGELSEIKDADANGAFNIARKGLIMDAHIKYWNECGRPMKSDKKDEKTSDLDLFISDREWDMWLLDRSLWEKELPIFASLKAKKKQ

SEQ ID NO: 718 - protein, 1366 aa, Unknown
  Description of Unknown: uncultivated organism sequence
  Category: MG57 effectors
  Description: MG57-28 effector
MKQFTNLYQVSKTLRFELQPIGKTKETFKGWLEKIDTAIPDVDDENLFLRDKKIKEAYLAIKPIMDSIHEEFIEKSLSSKEAKNIDFSDYYSLFKEKKVSSEFEKRLRKKISDTYSIAGDYFISEIEKTIANQKRKSNKKAAVAEEEKITKRKSKKPFECLTDVKMLFYLSANVKRLAEQHEIDEETLSRYIQTFKGFWGYLDGYNQNRENYYESEKETSTAVATRIVNENLPTFCNNILRFEKREKEYLNVFQYLKNNNRETKIKNSLGEEEDVVPIRASIFKIEHFNECLTQSQIEEYNRVIGNYNLLINLYNQLRSEETEYREIDEFEKLRKQIGCGKKPTNFDMLHDDSELKELLQKAGEAGEKMFGTENKQAEISTLPQFVKFLKDCNNWEGIYMSKAAINIISSLYFANWHSIEDKLYEAKAKACITYDKNREEPIQLRDAVELSELFAVLDTELTEHIFKDSLFKKDETNEYQNVLDKTLSPSKNLINLLCCDIEQYTKSFLVKTDKILALEKFKNDTHANEENETVKIIREWFVAATNAMRIVRFFAVRKSKMKGKIPNVAMEHALDNLLYCDNVQWFKWYDLVRNYLTKKPQDDVKENKLKLNFGTSSLLDGWSDGQEKTKAATLLKYNNELYLCILKTKNIFDTSKEDNPVYQTNLSVASRLILRNLKFQTLAGKGFLSENDISYSEMGAANPSQAILCLQKIIKERYVSKYPQLEKFVLKSYTDKGKFDAEISDALKDCYVCEYMPIDWNVIIEKQNSEELFLFKICCKDIKPGTYGRKDLQTMYWEDVLSEGSNHQLCAGAEIFMREPISKESPVRHRVGSKLVNKRDQDGNTIPEHIYREIYSYANGRVNVLSAEAKVFAEKSIIKDAKYEIIKDKRFYGDTKFMFHCPIKLFFKAKDPSRVFSEVNTLVNDVLQESTNLHFIGIDRGEKHLVYSCAIDKDARIVKCIHHDIINGTDYVQKLEAVADERIIAKKNWQEENKIKDLKKGYISHVVHRLVEETIKDDGMISPHAYIILEDLSTSMKRGRQKIEKQVYQNLEMALAKKLNFVVDKTASQGELGSVSMALQLTPPVNTYQDIEGKKQFGVMLYTRANYTSITDPATGWRKTIYIKDGKEDNIRKDFISKFTDWGFDGLDYYFEYKEENVGHIWRMYSGINGEPLPRFQNRKQIMQDKNIWVSEQVNVVDILDNLFARFDKSKSLKEQLEHGVELQKINGRNETAWQSLRYAINVIQQIRNSGDKKSGNDNFLYSPVRNAKGEHFDTRNHHNNGELSEIKDADANGAFNIARKGLIMDAHIKYWNECGRPMKSDKKDEKTSDLDLFISDREWDMWLLDRSLWEKELPIFASLKAKKKQ

SEQ ID NO: 719 - protein, 1128 aa, Unknown
  Description of Unknown: uncultivated organism sequence
  Category: MG57 effectors
  Description: MG57-29 effector
MEQFTNLYQLVKTLRFGLEPVGETKVTFEKWIEKLKNSEPVDDEDGNLFVKDERIRDAYLAIKPIMDRLHEKFIEESLTSNEARKIDFSEYFEAFKDEDKDVSAFEKKLRLDIGATYVVGGRYFSSEIEEAIKKPKEKKEKKEETKDEKTNKTKKKQPYECLTDANMLDYLSANVKKLAEQNGIDEQALSKHIEVFKGFWGYMSGYNQNRKNYYEVKKKATTAVATRIVHENLPIFCNNIRRFEKCRDEYIGIYQLLKDNNRETKIKNSHGVEVEAEAISEDMFQIAHFNNCLSQTQIDEYNRVIGDYNYMINLYKQARSDEKNSKKIDEFERLKKQIGCGKKKSMFVALIKDRKSELKDDDKKRENEDGVILTVETLLQRANIAGEAAFNEHDNESEINSIPGFIRFLKGCNNWSGIYMSKNAINKISSLYFANWHSLEEILVEWHKGNDKELKEKVKACITYDEKREEPLKLRDAVELSGLFAALDTALPEHFFKESLFKDDDTNEYRGVLDKTFTPSENLINMLCFDMKRYTEEFLENSKRILVKEKYKDENIKAGEEDQTIKEIKDWFDAATDAMRIVRYFAVRKSKMKGNIPNATMEQALSNLLYSDEAQWFKWYDLIRNYLTKKPQADVKENRLKLNFNNPTLMEGWDLNKESNYATVILRKNGFYYIGIMAKGHNNKFDEGTIDTDGECYEKMIYKQIPMPMGVVGFVRKCAGTAEKYGWHCPNNCLNEEGKIIGKDDEAHTHLKEIIDCYKDFFDKYEKDGYKYRDFNFTFLDSDKYEKLSDFFRDVEWQSYKVTFRNVSVVFINDKVKNGELYLFKLVSKDFSPGKNGGKGTIGTPNLQTLYWKKLFDEDNLKDVIYKLNGESEIFMRKPVAKESPVKHVLGSKLVNKRDKDDKTIPEQIYREIFLYENKKKKNISDDAKKYIDEQKAIVKDVKHEIVKDNRFYGETKYLFHCPITINFKAKKYKEPKDALAKVNEEITNSLQQSVKDLHFIGIDRGEKHLVYSCTIDENGKIIEGKCHDHDNINGTNYVQKLEAIADERTIARKNWQQQSKIKDLKRGYLSHVVHNLVEETIKDGDVIAPHAYIVLEDLSTEMKRGRQKIEKQVYQLLCLQSEIPMSR

SEQ ID NO: 720 - protein, 990 aa, Unknown
  Description of Unknown: uncultivated organism sequence
  Category: MG57 effectors
  Description: MG57-30 effector
MPAFIKFLQECGNWDGIYMSSAAINKISNLYFANWHSLKDKLKDAKANACITYDKKREEQIKLRDAVELSGLFAVLDTEPSEHFFKDSLFKDDDTNEYHNVLDKRLSPSKNLINLLCFDIERNIKAFLKDSDKIVALEKFKGEEETIKQIKDWLDTATDAMRVVRYFAVRKSKMKGSLPNSTMEQALSNLLYNDDAQWFKWYDLVRNYLTKKPQDDAKENKLKLNFGTSSLLGGWSDGQEKNKAATILKCDNDLYLCILKTKNIFDTSKEDNPIYKTNKSKASRLILKNLAFKTLAGKGFKGEYGVSYGDMGKDDPTKAIQCLQKFIKERYVNKYPLLEKFVANKYTDKRIFDAEINETLKECYVCEFVPIDWNIVTEKQNNEELFLFEIHSKDYQQGRKGKKDLQTMYWEDVLSDGSKHQLCAGAEIFMREPVEKESPIKHSVGSKLVNKRDNDGNTIPEQIYREIYLYANGKTKDISKEAQLYIDEQKAIIKEVKHEITKDKRFYGEQKYMFHCPIKLYFEAKDPKYASPEVNSKITKALQQSDNLQFIGIDRGEKHLVYSCSIDMNGKIVKCNHHDNINGTDYVQKLEAVADERIIAKKNWKAQNRIKDLKNGYISHVVHRLVEETIKDGDIIAPHAYIVLEDLNTEMKRGRQKFEKQVYQNLETALAKKLNFVVDKDAKQGELGSVSKALQFTPPISNYQDIEGKKQFGVMLYTRANYTSVTDPATGWRKTIYIKNGKEEDIKNQILEKFSDFGFDGKDYYFEYTEANAGHTWRLYSGKNGEPLPRFQNRKQLQQDKNIWVPEQINVVEILDNLFDNFDKRNSFKSQIGQGVELKKIEGRSETAWQSLRYALDLIQQIRNSGLKKEDDNFLCSPVRDENGKHFDTRNHANNGELSPIVDADANGAYNIARKGLIMDAHIKHWTDSGQPTKKGEKTPDLDLLISDEEWDLWLLDKEQWKKKLPTFASRKAKEDDKKSQTRKKSGMKQ

SEQ ID NO: 721 - protein, 976 aa, Unknown
  Description of Unknown: uncultivated organism sequence
  Category: MG57 effectors
  Description: MG57-31 effector
MLPFKIFFCFSYSKNFAFRIFDYNAVELSELFAVLNKESLEHLFKESLFKDNKLDTELTPSHNLINLLCSDVKQNIDYFWEHSEGITDLINDKNQSNEETQKIKQIKEWLDAAMNAMRIVRYFAVRKSKMKGNMPNVTIEQALSNLLYNDDAQWFKWYDLVRNYLTKKPQDDVKENKLKLNFGNSTLMNGWDMNKERDNTAVIIRRNNLYYLGIMDKNYNKILDADKIKSDDKSSYYEKMDYKQIALPTGVGGFVRKCFDTAQQYGWSCPKDCLNEDEKIIIKDDEARKNLTKIIDCYKDFFDKYEKDGFKYRNFNFRFLKSTEYEKLSDFFKDVERQRYMIKFRNISADYIDDLVNEGKLYLFQIYNKDFSTGRNERNGSKGKPNMHTIYWKTLFDETNLNDVVYKLNGQAEIFMREPIAENSPVKHGVGSKLVNKRDKDGNTIPEQIYKEIYLFANNKVKKENLSAEAKNYIESEKVKIKEAKYEIVKDNRFYGETKYMFHCPITINFKAGSSSGVNEKITDALQQSDNLQFIGIDRGEKHLVYSCTIDKYGKIIKCNHHDNINGTDYVQKLEAVANERLIAKKNWQQQNRIKDLKSGYISHVVHRLVEETIKDDKTIAPHAYIVLEDLNSEMKRGRQKIEKQVYQNLELALAKKFNFVVDKTAKQGELGSVSMALQLTPPVTNYKDIEGKKRFGIMLYTRANYTSITDPATGWRKTIYIKNGKDEEIKVQIIDKFSNFGFDEKDYYFEYTEENAGHTWRMYSGKDGKPLPRFQNKKQMLQDKNIWVPEQINVKEILDKLFANFDKGRSFKEQVNEEVKLEKIEGRSETAWQSLRYALNMIQQIRNSGVEKTDDNFLYSPVRNENGEHFDTRNHENNGDLSPIVDADANGAFNIARKGLIMDAHIKKWIKEGKPTTKEGDSKTPDLDLFISDREWDLWLLDREEWKKYLPVFASKSKKDADKTTSTKSPKRKKK

SEQ ID NO: 722 - protein, 1248 aa, Unknown
  Description of Unknown: uncultivated organism sequence
  Category: MG58 effectors
  Description: MG58-1 effector
MVKEIFYLLFSKKMKSDFFSPFTNLYPIQKTLRRELKPLNENFQHDPALTALRNSEILQRDEQREKDYQAIKPLLDELHNQFITESLQSLEPQDRSDFVDFYQNYQKSKKNKANLSEKELKSLDEEFESRTKALRTAIGTSFSNTAELRKSNPDYVNEKGKPFLDQKSYKILTEAGVLWLLEKKYASDPEKLALIRRFGNFFTYFTGFNQNRENYYATDEKATAVAYRAINENLLTFANNCELFEKLSVLSLSEREKKIFNPDSYSEYLTQSGIDFYNEMFANIRSKANLYTQEHKTKLPQPKLLYKQIWSPRGNTIPFDLINKDEEFQKMLDTMIAETDQRIPEFKKLLEPIFEGKADLSQIFLSKTALNIISNRYFSSWHTLLEKGVELKLFKFKKNDEESFKLPAYLSLAELKELLEAVPFQTAEKSDTTEGNHHQASLLKLQRENLHLERSNSNWELLLKSMKSDFESFWTWEGEFWSYTSAKKALQSLSSLQSTNQEHKNLIKMLLDNTLYAYRMLKWFKVDTSKLGFVPEGEFYPSLDQILQDYPLPKWYDMIRNYLTRKPYSQAKLKLNFDCSTLLNGRDKNKETQNLSVILRKDGKFYLAIMKKDQNKFFEKSALYEGNLGTMEKMDYKLLPWANKMLPKCLMPGSDKKKYGASDQVLELYAKGSFKKSEKSFNLADLHTLIDFYKSALPKYEDWKVFNFQFQATENYQDISQFYREVEQQGYLLNWRKVNEELIKQGIKDWSLFLFQISSKDFEGKSKTPDLQTLYWQQLFEFSTNVKLNGEAEIFFRPWSMKKEKKNLKVDNYDVFKHKRYTEDKILFHVPITLWFGNNEVSPSAPSKFNQKLNQELIIPHFDDLHVIGLDRWEKHLAFYSVVSVKTGKIVKQGTLNLLNGTDYEAKLSQKAENRLHARQNRDTIEKIADLKNGYISQVVNKLVELVLEYNAVIVFEDLNAGFKRGRQKIEQSVYQKLELALAKKLNFIVKKEKAVGEPWSVTSAYQLAPQINTFWDIKWKQRGIMLYTRANYTSVTDPLTGWRKQHYFKKGSSKEMKAQFFKSFKNLTRDTNQEAYIFDDGTWKLYSNVERRRGKRGDHRERTQIKYDPSLELDTLFSKYQIEKSESLFGQLKNRELPQTFWTSFFRILDLIMQIRNTDDESRDIILSPIGNAQERFDSRKRYDQLPRDEKGVVIEESAFEYPTSGDANGAYNIARKGVMMLERIKENPEKPDLLIRDAEWDRKITN

SEQ ID NO: 723 - protein, 1253 aa, Unknown
  Description of Unknown: uncultivated organism sequence
  Category: MG58 effectors
  Description: MG58-2 effector
MYTDYIDKLVGGFMDNAFSKFTNQYSFSKTLRFELVPQGRTADFLNGELESDQDRAESYQLLKPHFDNFHDGFIEQSLKAYSDSENRFEQLGDLLQKQQKFDKNSSNYEKLEKDIIKLQKSIRTNLSRFFTGFAKKLNQDYGLGDKSIISNAGAMVDFAKILWKDQPEKLVLLSKFDKFSGYFTGYCQNRTNYYVGDDKSTAVSNRIVNQNFTKYTQNFIEINKDEFKSFLKWFNQEDRYIYNQSTKQSQLTHINPETFSFAHYTEHLNQSGIETYNFNIGDINYWINQFNQTKPPKKVKKLLNLYKQIGQIPVDKKELFKFYETDEDLATDLLVTIENLPKYTENANTLFRNLADEEFNLEEINISARGTNSLANKYLIGWESVRELVNSNKKHDSSNKLIKLSEKPKSTTLGSLNEIINQFEPNQIFKPKYLNNLSDEPGQPSEILIWLIKESLLNALKESKDLAANLNLNKQSKLLGEKSITENIKTFLDSLLLSSQIMKTFQVDGALGDSDFYNELDQVLNEIDIFSIYNATRNYLTKKPYSQDKILLKFANSSLLDGWDINKESDNTSVILRDSTGYFLAIMKKSSNKFFDKAKNPLLYQVDSGDLEKMDYKLLPGPNKMIPKCIISVFWNKQEKQIVRDKPTTIKLAKSGISPSDEFIYKYNQGLHTKDPETKKIRDKKYLVEYIDYVKDALNKYEGWQGYIFNFKSSDQYQDTSEFYKDISDGGYSLNWSSIDLDVLNKAVDEGEIYLFKLKNKDLARKSKSNGKPNLHTMYWQNLFIDESSFKLNGSAEMFYRPKTIDKKQKVFTGSGIKKSGIFEKNRFTENKYLFHVPITINRKANNVIKFRDKINQAIIDEKITNVIGVDRGEKHLEFYCLLGKDGEIIEQGSLNVINGADYSKILDQKSSDRNEARKNWKTIDQIKDIKNGHTSLAIKQIIDLAVKHNALIVLEDLNTGFMRGRQKIEKSNYQQFELAMAKKLNYLVSKDTPAQQVGGTNKGLQLTPILNNYSDIEKVKQFGIILYTTAGYTSSTDPVTGWRKTVYLKSLNQDSMKNDISKFSQIYWDNKEKCYIFSYDTKNFNSKANSRVWSLYSSVERLRSERNKNGIWEKKQYSPTDVMRKALVNSGINPQSANLKEDILSMANSRSLKDIIFGFNLICQIRNSGTSVRDSDYILSPVKPFFDSRKQLDEQNLNENPNSNQLPTSGDSNGAYNIARKGQIMLSRVKQNPEKPDLFISDSDWDKYLAED

SEQ ID NO: 724 - protein, 1245 aa, Unknown
  Description of Unknown: uncultivated organism sequence
  Category: MG58 effectors
  Description: MG58-3 effector
MFYLLFSKKMKSDFFAPFTNLYPIQKTLRRELKPLNENFQHDPALTALRNSEIPQRDQQREKDYQAIKPLLDELHNQFITESLQSLEPQDRSDFVDFYQNYQKSKKNKANLSEKELKNLDEEFESRTKALRTAIGTSFSNTAELRKSNPDYVNEKGKPFLDQKSYKILTEAGVLWLLEKKYASDPEKLALIRRFGNFFTYFTGFNQNRENYYATDEKSTAVAYRAINENLLTFANNCELFEKLSVLSLSEREKKIFNPDSYSEYLTQSGIDFYNEMLANIRSKANLYTQEHKTKLPQPKLLYKQIWSPRGNTIPFDLINNDEEFKKMLHTMIAETDQRIPEFNKLLESIFEENADLSQIFLSKTALNIISNRYFSSWHTLLEKGVELKLFKFKKNDEESFKLPAYLSLAELKELLEAVPFQTVEKSDTAEGTHHQVSLLKLQRENLHLESSHSNWELLLKSMKSDFESFWTWEGEFWSYTSAKNTLLSLSTLESTNQEHKNLIKMLLDNALYAYRMLKWFKIDTSKLGFVPEGEFYPSLDQLLQDYPLSKWYDMIRNYLTRKPYSEAKLKLNFDCSTLLNGRDKNKESQNLSVILRKDGKFYLAIMKKDQNKFFEKSALYEGNLGTMEKMDYKLLPWANKMLPKCLMPGSNKKKYGASDQVLELYAKGSFKKSEKSFNLPDLHTLIDFYKLALPKYEDWKVFNFQFQATENYQDISQFYREVEQQGYLLKWRKINEELIKQGIKDWSLFLFQMSSKDFEGKSKTPDLQTLYWQQLFESQTNVKLNGEAEIFFRPWSMKKEKKTLKVDNYDVFNHKRYTEDKILFHVPITLWFGNNEVSPSAPSKFNQKLNQELIIPHFDDLHMIGVDRWEKHLAFYSVISVKTGKIVKQGTLNLLNGTDYEAKLSQKAENRLHARQNRDTIEKIADLKNGYISQVVNKLIELVLEYNAVIVFEDLNAGFKRGRQKIEQSVYQKLELALAKKLNFIVKKEKAVGEPWSVTSAYQLAPQINTFWDIKWKQRGIMLYTRANYTSVTDPLTGWRKQHYFKKGSSEEMKAQFFESFKNLSRDAGQKAYIFDDGTWQLYSNVERRRGKRGDHRERTQIKYDPSLELDTLFSKYQIEKSDSLLDQLKNRDLPQTFWTSFFRILDLIMQIRNTDDEGRDIILSPIGNAEERFDSRKRYDQLPRDEKGLVIEESAFEYPTSGDANGAYNIARKGVMMLQRIKENPEKPDLLIRDAEWDKKITRK

SEQ ID NO: 725 - protein, 1287 aa, Unknown
  Description of Unknown: uncultivated organism sequence
  Category: MG58 effectors
  Description: MG58-4 effector
MKSDFFAPFTNLYPIQKTLRRELKPLNENFEHDPSLSSLRNSDIPQRDEQREKDYQAIKPLLDELHNEFITKSLQSLEPQDRSDFILFYQTYQKSKKNKANLSEKELKSLDEEFESRTKALRAAIGTSFSNTAELRKSNPEYTNEKGKPFLTQKSYKILTEAGVLWLLEKKYASDPESLALIRRFGNFFTYFTGFNQNRENYYATDEKATAVAYRAINENLLTFANNCEVFEKLAVLSLSELEKKVFNPDSYSEYLTQSGIDFYNEMLANIRSKANLYTQEHKTKLPQPKLLYKQIWSPRGNTIPFDLITSEAEFQKMLHTMIRETDQRIPEFKKLLAQIFEEKADLSQIFLSKTALNIISNRYFSSWHTLLEKGVELKLFKFKKNDEESFKLPAYLSLAELKELLEAVPFQAAEKADTAEENHHQISLLKLQRENLHWENSHSNWELLLKSMKSDFESFWTWEGEFWSYTLAKEALQSLSTLESSNQEHKNLIKMLLDNALYAYRMLKWFKVDTSKLGFVPEGDFYPSLDQLLQDYPLPKWYDMIRNYLTRKPYSQAKLKLNFDCSTLLNGRDKNKETQNLSVILRKDGKFYLAIMKKDQNKFFEKSALYEGNLGAMEKMDFKFLPEASKMIPKCSTQLNEVRAAFKKGLPSFIINNEKNFRLPLEVSQRVYNLNNEMYRIENPNKSLISYKKMDKNEKKLYIKSFQKDFLRITWKEDVYKKSLLDWINFCKVFLLSFQSTQNFDFSWLKESSLYGSLEEFYADVDRACYFISWRNVNEELIKQGIKDCSLFLFQISSKDFEGKSKTPDLQTLYRNQIFAPQPNVKLNGEAEIFFRPWSMGKEKKTLKVDNYDVFKHKRYTEDKILFHVPITLWFWNNEVSPSAPSKFNQKLNQELIIPHFDDLHVIGVDRWEKHLAFYSVVSVKTGKIVKQGTLNLLNGTDYEAKLSQKAENRLYARQNRDTIEKIADLKNGYISQVVNKLVELALEYNAVIVFEDLNAGFKRGRQKIEQSVYQKLELALAKKLNFIVKKEKAVGKPWSVTSAYQLAPQINTFWDIKWKQRGIMLYTRANYTSVTDPLTGWRKQHYFKKGSSEEMKAQFFKSFKNLTRDAGQEAYIFDDGTWQLYSNVERRRGKRGDHRERTQIKYDPSLELDTLFSKNQIKKTESLFDQLKNRELPQTFWTSFFRIMDLIMQIRNTDDEGRDIILSPIGNAQERFDSRKRYNQLPCDKNGAVLEESAFEYPTSGDANGAYNIARKGVMMLERIKENPEKPNLLIRDAERDSWVK

SEQ ID NO: 726 - protein, 1234 aa, Unknown
  Description of Unknown: uncultivated organism sequence
  Category: MG58 effectors
  Description: MG58-5 effector
MKSDFFAPFTNLYPIQKTLRRELKPLNENFEHDPSLSSLRNSEIPQRDEQREKDYQAIKPLLDELHNQFITESLQSLETQDRSDFVLFYQTYQKKKKNKADFSEKELKSLDEEFESRTKASRTAIGNSYAKLAELRKSNPDYVNEKGKPFLDQKSYKILTEAGVLWLLEKKYASDPEKLALIRRFGNFFTYFTGFNQNRENYYATDEKATAVAYRAINENLLTFANNCELFEKISVLSLSEREKKIFNPDSYSEYLTQSGIDFYNEMLANIRSKANLYTQEHKTKLPQPKLLYKQIWSPRGNTIPFDLINKDEEFQKMLHTMIAETDQRIPEFNKLLESIFEENADLSQIFLSKTSLNIISNRYFSSWHTLLEKGVELKLFKFKKNDEESFKLPAYLSLAELKELLEAVPFQTAEKSDTTEGNHHQASLLKLQRENLHLESSHSNWELLLKSMKSDFESFWTWEGEFWSYTSAKKALQSLSTLESSNQEHKNLIKMLLDNALCAYRILKWFKIDTSKLGFVPEGEFYPSLDQLLQDYPLPKWYDMIRNYLTRKPYSQAKLKLNFDCSTLLNGRDKNKETQNLSVILRKDGKFYLAIMKKDQNKFFEKSALYEGNLGTMEKMDYKLLPWANKMLPKCLMPGSDKKKYRASDQVLELYAKGSFKKSEKSFNLADLHTLIDFYKSALPKYEDWKVFNFQFQATENYQDISQFYREVEQQGYLLNWRKVNEELIKQGIKDWSLFLFQISSKDFEGKSKTPDLQTLYWQQLFKNQTNVKLNGEAEIFFRPWSMKKEKKTLKVDNYDVFKHKRYTEDKILFHVPITLWFGNNEVSPSAPSKFNQKLNQELIIPHFDDLHVIGVDRWEKHLAFYSVVSVKTGKIVKQGTLNLLNGTDYEAKLSQKAENRLHARQNRDTIEKIADLKNGYISQVVNKLVELVLEYNAVIVFEDLNAGFKRGRQKIEQSVYQKLELALAKKLNFIVKKEKAVGESWSVTSAYQLAPQINTFWDIKWKQRGIMLYTRANYTSVTDPLTGWRKQHYFKKGSSEEMKAQFFKSYKNLTRDAGQKAYIFDDGTWLLYSNVERRRGKRGDHRERTQIKYDPSLELDTLFSKYQIEKSHSLFDQLKNREFPQTFWTSFFRILDLIMQIRNTDDKGRDIILSPIGNAQERFDSRKRYDQLPCDEKGLIIEESEFEYPTSGDANGAYNIARKGMMMLERIKENPEKPDLLIRDAEWDSWSK

SEQ ID NO: 727 - protein, 1234 aa, Unknown
  Description of Unknown: uncultivated organism sequence
  Category: MG58 effectors
  Description: MG58-6 effector
MKSDFFSPFTNLYPIQKTLRRELKPLNENFEYDPSLSLLRNSEIPQRDEQREKDYQAIKPLLDELHNQFIAESLQSLETQNRSDFVDFYQTYQKKKKNKVDLSEKELKMLNEEFESRTKALRTAIGNSYAKLAELRKSNPDYVNEKGKPFLTQKSYKILTEAGVLWLLEKKYASDPEKLALIRRFGNFFTYFTGFNQNRENYYATDEKATAVAYRAINENLLTFANNCELFEKLSVLSLSEREKKIFNPDSYSEYLTQSGIDFYNEMLANIRSKANLYTQEYKTKLPQPKLLYKQIWSPRGNTIPFDLINNDEEFKKMLHTMIAETDQRIPEFNKLLESIFEENADLSQIFLSKTSLNIISNRYFSSWHTLLEKGVELKLFKFKKNDEESFKLPAYLSLAELKELLEAVPFQTIEKADTAEGNHHQVSLLKLQRENLHLKNSHSNWELLLKSMKSDFESFWAWDEEFWSYTSAKNVIQSLSSLQSTNQEHKNLIKMLLDNALYAYRMLKWFKIDTSKLGFIPEGEFYPSLDQLLQDYPLPKWYDMIRNYLTRKPYSQAKLKLNFDCSTLLNGRDKNKETQNLSVILRKDGKFYLAIMKKDQNKFFEKSALYEGNLGTMEKMDYKLLPWANKMLPKCLMPGSDKKKYGASDQVLELYAKGSFKKSEKSFNLADLHTLIDFYKSALPKYEDWKVFNFQFQATENYQDISQFYREVEQQGYLLNWRKVNEELIKQGIKDWSLFLFQISSKDFEGKSKTPDLQTLYWQQLFESPTNVKLNGEAEIFFRPWSMKKEKKALKVDNYDVFKHKRYTEDKILFHVPITLWFGNNEVSPSAPSKFNQKLNQELIIPHFDDLHVIGVDRWEKHLAFYSVVSVKTGKIVKQGTLNLLNGTDYEAKLSQKAENRLHARQNRDTIEKIADLKNGYISQVVNKLVELVLEYNAVIVFEDLNAGFKRGRQKIEQSVYQKLELALAKKLNFIVKKEKTVGEPWSVTSAYQLAPQINTFWDIKWKQRGVMLYTRANYTSVTDPLTGWRKQHYFKKGSSEEMKAQFFKSFKNLTRDINQEAYIFDDGTWKLYSNVERRRGKRGDHRERTQIKYDPSLELDTLFFKNQIEKYDSLFDQLKNRELPQTFWTSFFRILDLIMQIRNTDDEGRDIILSPIGNVQERFDSRKRYDQLPRDEKGLIIEESEFEYPTSGDANGAYNIARKGVMMLERIKENPEKPDLLIRDAEWDSWAK

SEQ ID NO: 728 - protein, 1236 aa, Unknown
  Description of Unknown: uncultivated organism sequence
  Category: MG58 effectors
  Description: MG58-7 effector
MKSDFFSPFTNLYPIQKTLRRELKPLNENFQHDPALTALRNSEILQRDEQREKDYQAIKPLLDELHNQFITESLQSLEPQDRSDFVDFYQNYQKSKKNKANLSEKELKSLDEEFESRTKALRTAIGTSFSNTAELRKSNPDYVNEKGKPFLTQKSYKILTEAGVLWLLEKKYASEPENLALIRRFGNFFTYFTGFNQNRENYYATDEKVTAVAYRAINENLLTFANNCELFEKLSVLSLSDLEKKIFNPDSYSEYLTQSGIDFYNEMLANIRSKANLYTQEHKTKLPQPKLLYKQIWSPRGNTIPFDLINKDEEFQKMLDTMIAETDQRIPEFKKLLVQIFEGKADLSQIFLSKTSLNTISNRYFSSWHTLLEKGVELKLFKFKKNDEESFKLPAYLSLAELKELLEAVPFQTAEKSDTAEGTHHQVSLLKLQRENLHLESSHSNWELLLKSMKSDFESFWTWEGEFWSYTSAKNTFLSLSTLESTNQEHKNLIKMLLDNALYAYRMLKWFKVDTSKLGFVPEGEFYPSLDQLLQDYSLPKWYDMIRNYLTRKPYSQAKLKLNFDCSTLLNGRDKNKETQNLSVILRKDGKFYLAIMKKDQNKFFEKSALYEGNLGTMEKMDYKLLPWANKMLPKCLMPGSDKKKYGASDQVLELYAKGSFKKSEKSFNLPDLHTLIDFYKSALPKYEDWKVFNFQFQATENYQDISQFYREVEQQGYLLNWRKVNEELIKQGIKDWSLFLFQISSKDFEGKSKTPDLQTLYWQQLFEFPTNVKLNGEAEIFFRPWSMKKEKKTLKVDNYDVFKHKRYTEDKILFHVPITLWFGNNEVSPSAPSKFNQKLNQELIIPHFDDLHVAWVDRGERNLWYFSIISVKTGKIVKQGTLNLLNGTDYEAKLSQKAENRLHARQNRDTIEKIADLKNGYISQVVNKLIELVLEYNAVIVFEDLNAGFKRGRQKIEQSVYQKLELALAKKLNFIVKKEKAVGEPWSVTSAYQLAPQINTFWDIKWKQRGIMLYTRANYTSVTDPLTGWRKQHYFKKDSSEEMKTQFFKSFKNLTRDAGQEAYILDDGTWKLYSNVERRRGKRGDHRERTQIKYDPSLELDTLFSKYQIEKSDSLLDQLKNRDLPQTFWTSFFRILDLIMQIRNTDDEGRDIILSPIGNAEERFDSRKRYDLLPRDEKGLVIEESAFEYPTSGDANGAYNIARKGVMMLQRIKENPEKPDLLIRDAEWDKKITRK

SEQ ID NO: 729 - protein, 1236 aa, Unknown
  Description of Unknown: uncultivated organism sequence
  Category: MG58 effectors
  Description: MG58-8 effector
MKSDLFSPFTNLYPIQKTLRRELKPLNENFQHDLALSALRNSEIPQRDQQREKDYQAIKPLLDELHNQFITESLQSLEPQHRSDFVLFYQTYQKKKKNKADLPEKELKSLDEEFESRTKALRAAIGTSFSATAELRKSNPDYVNEKGKPFLDQKSYKILTESGVLWLLEKKYTSDPEKLALIRRFGNFFTYFTGFNQNRENYYATDEKSTAVAYRAINENLLTFANNCELFEKLAVLSLSELEKKVFNPDFYSEYLTQSGVDFYNEMLGNIRSKANLYTQEHKTKLPQPKLLYKQIWSPRGNTIPFDLINNDEEFKKMLHMMIAETDQRIPEFNRLLEPIFEGKADLSQVFLSKTSLNIISNRYFSSWHTLLEKGVELKLFKFKKNDEESFKLPAYLSLAELKELLEAVPFQTVEKSDTAEGTHHQVSLLKLQRENLHLESSHSNWELLLKSMKSDFESFWTWEGEFWSYTSAKNTLLSLSTLESTNQEHKNLIKMLLDNVLYAYRMLKWFKIDTSKLGFVPEGEFYLSLDQLLQDYPLPKWYDMIRNYLTRKPYSQAKLKLNFDCSTVLNGRDKNKETQNLSVILRKDGKFYLAIMKKDQNKFFEKSALYEGNLGTMEKMDYKLLPWANKMLPKCLMPGSDKKKYGASDQVLELYAKGSFKKSEKSFNLPDLHTLIDFYKSALPKYEDWKVFNFQFQATENYQDISQFYREVEQQGYLLNWRKVNEELIKQGIKDWTLFLFQISSKDFEGKSKTPDLQTLYWQQLFKNQTNVKLDGEAEIFFRPWSMKKEKKTLKVDNYDVFKHKRYTEDKILFHVPITLWFGNNEVSPSAPSKFNQKLNQELIIPYFDDLHVIGVDRWEKHLAFYSVVSVKTGKIVKQGTLNLLNGTDYEAKLSQKAENRLHARQNRDTIEKIADLKNGYISQVVNKLVELVLEYNAVIVFEDLNAGFKRGRQKIEQSVYQKLELALAKKLNFIVKKEKAVGEPWSVTSAYQLAPQINTFWDIKWKQRGIMLYTRANYTSVTDPLTGRRKHYYFKKGSSEEMKAQFFKSFKNLTRDASQEAYIFDDGTWQLYSNVERRRGKRGDHRERMQIKYDPSLELDTLFSKYQIEKSEALLDQLKNRELPQTFWTSFFRILDLIMQIRNTDDEGRDIILSPIGNAEERFDSRKRYDQLPYDENRVVIEESTFEYPTSGDANGAYNIARKGVMMLERIKENPEKPDLLIRDAEWDSWVWNF

SEQ ID NO: 730 - protein, 1234 aa, Unknown
  Description of Unknown: uncultivated organism sequence
  Category: MG58 effectors
  Description: MG58-9 effector
MKSDLFSPFTNLYPIQKTLRRELKPLNENFQHDPALSALRNSEIPQRDQQREKDYQAIKPLLDELHNQFITESLQSLEPQDRSDFVLFYQTYQKKKKNKADLSEKDLKTLDEEFESRTKALRNAIGASFSVTAELRKSNPDYVNEKGKPFLDQKSYKILTESGVLWLLEKKYASDPEKLALIRRFGNFFTYFTGFNQNRENYYATDEKSTAVAYRAINENLLTFANNCELFEKLSMLSLSELEKKVFNPDSYSEYLAQSGIDFYNEMFANIRSKANLYTQEHKTKLPQPKLLYKQIWSPRGNTIPFDLITSEAEFQEMLHTMIRETDQRLPEFNKLLAQIFEEKADLSQIFLSKTALNIISNRYFSSWHTLLEKGVELKLFKFKKNDEESFKLPAYLSLAELKELLESVPFQTAENADTAQGSHHQVSLLKLQREKLYLENSHSNWELLLKSMKSDFESFWTWEGEFWSYTSAKKALQSLSTLESTNQEHKNLIKMLLDNALYAYRMLKWFRVDTSKLGFVPEGEFYPSLDQLLQDYPLPKWYDMIRNYLTRKPYSQAKLKLNFDCSTLLKGRDKNKETQNLSVILRKDGKFYLAIMKKDQNKFFEKSALYEGNLGTMEKMDYKLLPWANKMLPKCLMPGSDKKKYRASDQVLELYAKGSFKKSEKSFNLADLHTLIDFYKSALPKYEDWKVFNFQFQATENYQDISQFYREVEQQGYLLNWRKVNEKLIKQGIKDWSLFLFQISSKDFEGKSKTPDLQTLYWQQLFEFSTNVKLNGEAEIFFRPWSMKKEKKKLKVDNYDVFKHKRYTEDKILFHVPITLWFGNNEVSPSAPSKFNQKLNQELIIPHFDDLHVIGVDRWEKHLAFYSVVSVKTGKIVKQGTLNLLNGTDYEAKLSQKAENRLHARQNRDTIEKIADLKNGYISQVVNKLVELALEYNAVIVFEDLNAGFKRGRQKIEQSVYQKLELALAKKLNFIVKKEKAVGEPWSVTSAYQLAPQINTFWDIKWKQRGIMLYTRANYTSVTDPLTGWRKQHYFKKGSSEEMKAQFFKSFKNLSRDAGQKAYIFDDGTWQLYSNVERRRGKRGDHRERTQIKYDPSLELDTLFSKYQIEKSESLFDQFKNREFPQTFWTSFFRILDLIMQIRNTDDEGRDIILSPIGNAQERFDSRKRYDQLPRDEKGLVIEESAFEYPTSGDANGAYNIARKGVMMLERIKENPEKPDLLIRDAEWDSWII

SEQ ID NO: 731 - protein, 1234 aa, Unknown
  Description of Unknown: uncultivated organism sequence
  Category: MG58 effectors
  Description: MG58-10 effector
MKSDLFSPFTNLYPIQKTLRRELKPLNENFQHDPALTALRNSEIPQRDEQREKDYQAIKPLLDELHNQFITKSLQSLEPQDRSDFILFYQTYQKKKKNKADLSEKELKSLDEEFKSRTKALRAAIGTSFSNTAELRKSNPDYTNGKGKSKKPKKSYKILTEAGVLWLLEKKYASDPEKLALIRRFGNFFTYFTGFNQNRENYYATDKKATAVAYRAINENLLTFANNRELFEKLAVLSLSELEKKIFNPDSYSEYLTQSGIDFYNEMLANIRSKANLYTQEHKTKLPQPKLLYKQIWSPRGNTIPFDLINNDEEFQEMLHMMITETDQRIPEFNKLLEQIFEEKTDLSQIFLSKTALNIISNRYFSSWHTLLEKGVELKLFKFKKNDEESFKLPAYLSLAELKELLEAVPFQTAEKSDTDEETHHQVSLLKLQRENLHWENSHSNWELLLKSMKSDFESFWTWEGEFWSYTSAKKALQSLLSLESTNQEHKNLIKMLLDNALYAYRMLKWFRVDTSKLGFVPEGEFYPSLDQLLQDYPLPKWYDMIRNYLTRKPYSQAKLKLNFDCSTLLNGRDKNKETQNLSVILRKDGKFYLAIMKKDQNKFFEKSALYKGNLGTMEKMDYKLLPWANKMLPKCLMPGSEKKKYGASDQVLALYAKGSFQKSEKSFNLPDLHTLIDFYKSALQKYEDWKVFNFQFQATENYQDISQFYREVEQQGYLLNWRKVNEELIKQGIKDWSLFLFQISSKDFEGKSKTPDLQTLYWCQLFESQTNVKLNGEAEIFFRPRSMKKEKKKLKVDNYDVFKHKRYTEDKILFHVPITLWFWNNEVSPSAPSKFNQKLNQELIIPHFDDLHVIGVDRWEKHLAFYSVVSVKTGKIVKQGTLNLLNGTNYEEKLSQKAENRLHARQNRDTIEKIADLKNGYISQVVNKLVELVLEYNAVIVFEDLNAGFKRGRQKIEQSVYQKLELALAKKLNFIVKKEKAVGEPWSVTSAYQLAPQINTFWDIKWKQRGIMLYTRANYTSVTDPLTGWRKQHYFKKGSSEEMKAQFFRSFKNLTRDAGQKAYIFDDGTWQLYSNVERRRGKRGDHRKRTQIKYDPSLELDTLFSKCQIEKSDSLFDQLKNRELPQTFWTSFFRILDLIMQIRNTDDEGRDVILSPIGNTQERFDSRQRYDQLPRDENGLVIEESVFEYPTSGDANGAYNIARKGVMMLQRIKENPEKPDLLIRDAEWDSWVW

SEQ ID NO: 732 - protein, 1236 aa, Unknown
  Description of Unknown: uncultivated organism sequence
  Category: MG58 effectors
  Description: MG58-11 effector
MKSDLFSPFTNLYPIQKTLRRELKPLNESFEHDPSLSSLRNSDIPQRDEQREKDYQAIKPLLDELHNQFITESLQSLETQNRSDFVLFYQTYQKKKKNKAELSEKELKSLDEEFESRTKALRAAIGTSFSNTAELRKSNPDYVSEKGKPFLTQKSYKILTEAEVLWLLEKKYASDPEKLALICRFGNFFTYFTGFNQNRENYYATDEKATAVAYRAINENLLTFANNCEVFEKLAVLSLSELEKKVFNPDSYSEYLTQSGIDFYNEMLENIRSKANLYNQEHKTKLPQPKLLYKQIWSPRGNTIPFDLITSEAEFQKMLHMMIAETDQRIPEFKRLLAQIFEQKADLSQIFLSKTALNIISNRYFSSWHTLLEKGVELKLFKFKKNDEESFKLPAYLSLAELKELFEAVPFQTAEKSDTDEETHHQVSLLKLQRENLHWENSHSNWELLLKSMKSDFESFWTWEGEFWSYTLAKKALQSLSTLESTNQEHKNLIKMLLDNALYAYRMLKWFKVDTSKLGFVPEGEFYPSLDQLLQDYPLPKWYDMIRNYLTRKPYSQAKLKLNFDCSTLLNGRDKNKETQNLSVILRKDGKFYLAIMKKDQNKFFEKSVLYEGNLGTMEKMDYKLLPWANKMLPKCLMPGSDKKKYGASDQVLELYAKGSFKKSEKSFNLVDLHTLIDFYKSALPKYEDWKVFNFQFQATENYQDISQFYREVEQQGYLLNWRKVNEELIKQGIKDWSLFLFQISSKDFEGKSKTPDLQTLYWQQLFKNQTNVKLNGEAEIFFRPWSMKKEKKTLTVDNYDVFKHKRYTEDKILFHVPITLWFWNNEVSPSAPSKFNQKLNQELIIPHFDDLHVIGVDRWEKHLAFYSVVSVKTGKIVKQGTLNLLNGTDYEVKLSQKAENRLHARQNRDTIEKIADLKNGYISQVVNKLVELVLEYNAVIVFEDLNAGFKRGRQKIEQSVYQKLELALAKKLNFIVKKEKAVGEPWSVTSAYQLAPQINTFWDIKWKQRGIMLYTRANYTSVTDPLTGWRKQHYFKKGSSEEMKTQFFKNFKNLTRDAGQEAYIFDDGTWKLYSNVERRRGKRGDHRERTQIKYDPSLELDTLFSKYQIENSDSLLDQLKNRDLPQTFWTSFFRILDLIMQIRNTDDEGRDIILSPIGNAQERFDSRKRYNQLPRDEKGLVIEESAFEYPTSGDANGAYNIARKGVMMLQRIKENPEKPDLLIRDAEWDKKITRK

SEQ ID NO: 733 - protein, 1250 aa, Unknown
  Description of Unknown: uncultivated organism sequence
  Category: MG58 effectors
  Description: MG58-12 effector
MLSFNWVLFFFFSKMSRSIFSPFTNLYPIQKTLRRELKPLNENFQHDPALSALRNSEIPQRDEQREKDYQAIKPLLDEFHNQFITESLHSLEPQDRSDFILFYQTYQKKKKNKAEISEKELKSLDEEFESRTKALRNAIGTSFSVTAELRKSNPDYVSEKGKPFLTQKSYKILTEAGVLWLLEKKYTSDPEKLALIRRFGNFFTYFTGFNQNRENYYATDEKSTAVAYRAINENLLTFANNCELFEKLSVLSLSELEKKTFNPDSYSEYLTQSGIVFYNEMLANIRSKANLYTQEHKAKLPQPKLLYKQIWSPRGDTIPFDLIASEAEFQETLHTMIRETDQRIPEFNKLLEQIFEEKVDLSQIFFSKTSLNIISNRYFSSWHTLLEKGVELKLFKFKKNDEESFKLPAYLSLAELKELLESAPFQMAEKADADEEKHHQASLFKLQRENLHLEKSHSNWELLLKSMKSDFESFWTWEGEFWSYTLAKKALQSLSALESTNQEHKNLIKMLLDNALYAYRMLKWFKVDTSKLGFVPEGEFYPSLDQLLQDYPLPKWYDMIRNYLTRKTYSQAKLKLNFDCSTLLNGRDKNKEIQNLSVILRKDGKFYLAIMKKDQNKFFENSALYEGNLGTMEKMDYKLLPWANKMLPKCLMPGSDKKKYGASDQVLELYAKGSFKKSEKSFNLADLHTLIDFYKLALPKYEDWKVFNFQFQATENYQDISQFYREVEQQGYLLNWRKVNEKLIKQGIKDWSLFLFQISSKDFEGKSKTPDLQTLYWQQLFEFSTNVKLNGEAEIFFRPWSMKKEKKKLKVDNYDVFKHKRYTEDKILFHVPITLWFGNNEVSPSAPSKFNQKLNQELIIPHFDDLHVIGVDRWEKHLAFYSVVSVKTGKIVKQGTLNLLNGTDYEAKLSQKAENRLYARQNRDTIEKIADLKNGYISQVVNKLVELVLEYNAVIVFEDLNAGFKRGRQKIEQSVYQKLELALAKKLNFIVKKEKAVGEPWSVTSAYQLAPQINTFWDIKWKQRGIMLYTRANYTSVTDPLTGWRKQYYFKKGSSEEMKAQFFKSFKNLTRDAGQEAYIFDDGTWLLYSNVERRRGKRGDHRERTQIKYDPSLELDTLFSKYQIEKSDSLFDQLKNRELPQTFWTSFFRIIDLIMQIRNTDDEGRDIILSPIGNPQERFDSRKRYNQLPRDEKGGIIEESAFEYPTSWDANGAYNIARKGVMMLERIKENPEKPDLLIRDAEWDKKITRK

SEQ ID NO: 734 - protein, 1236 aa, Unknown
  Description of Unknown: uncultivated organism sequence
  Category: MG58 effectors
  Description: MG58-13 effector
MSRSIFSPFTNLYPIQKTLRRELKPLNENFQHDPALSALRNSEIPQRDEQREKDYQAIKPLLDEFHNQFITESLHSLEPQDRSDFILFYQTYQKKKKNKAEISEKELKSLDEEFESRTKALRNAIGTSFSVTAELRKSNPDYVSEKGKPFLTQKSYKILTEAGVLWLLEKKYTSDPEKLALIRRFGNFFTYFTGFNQNRENYYATDEKSTAVAYRAINENLLTFANNCELFEKLSVLSLSELEKKTFNPDSYSEYLTQSGIVFYNEMLANIRSKANLYTQEHKAKLPQPKLLYKQIWSPRGDTIPFDLIASEAEFQETLHTMIRETDQRIPEFNKLLEQIFEEKVDLSQIFFSKTSLNIISNRYFSSWHTLLEKGVELKLFKFKKNDEESFKLPAYLSLAELKELLESAPFQMAEKADADEEKHHQASLFKLQRENLHLEKSHSNWELLLKSMKSDFESFWTWEGEFWSYTLAKKALQSLSALESTNQEHKNLIKMLLDNALYAYRMLKWFKVDTSKLGFVPEGEFYPSLDQLLQDYPLPKWYDMIRNYLTRKTYSQAKLKLNFDCSTLLNGRDKNKEIQNLSVILRKDGKFYLAIMKKDQNKFFENSALYEGNLGTMEKMDYKLLPWANKMLPKCLMPGSDKKKYGASDQVLELYAKGSFKKSEKSFNLADLHTLIDFYKLALPKYEDWKVFNFQFQATENYQDISQFYREVEQQGYLLNWRKVNEKLIKQGIKDWSLFLFQISSKDFEGKSKTPDLQTLYWQQLFEFSTNVKLNGEAEIFFRPWSMKKEKKKLKVDNYDVFKHKRYTEDKILFHVPITLWFGNNEVSPSAPSKFNQKLNQELIIPHFDDLHVIGVDRWEKHLAFYSVVSVKTGKIVKQGTLNLLNGTDYEAKLSQKAENRLHARQNRDTIEKIADLKNGYISQVVNKLVELVLEYNAVIVFEDLNAGFKRGRQKIEQSVYQKLELALAKKLNFIVKKEKAVGEPWSVTSAYQLAPQINTFWDIKWKQRGIMLYTRANYTSVTDPLTGWRKQYYFKKGSSEEMKAQFFKSFKNLTRDAGQEAYIFDDGTWLLYSNVERRRGKRGDHRERTQIKYDPSLELDTLFSKYQIEKSDSLFDQLKNRELPQTFWTSFFRIIDLIMQIRNTDDEGRDIILSPIGNPQERFDSRKRYNQLPRDEKGGIIEESAFEYPTSWDANGAYNIARKGVMMLERIKENPEKPDLLIRDAEWDKKITRK

SEQ ID NO: 735 - protein, 178 aa, Unknown
  Description of Unknown: uncultivated organism sequence
  Category: MG58 effectors
  Description: MG58-14 effector
MVKEIFYLLFSKKMKSDFFSPFTNLYPIQKTLRRELKPLNENFQHDPALTALRNSEILQRDEQREKDYQAIKPLLDELHNQFITESLQSLEPQDRSDFVDFYQNYQKSKKNKANLSEKELKSLDEEFESRTKALRTAIGTSFSNTAELRKSNPDYVNEKGKPFLDQKSYKILTEAGVL

SEQ ID NO: 736 - protein, 129 aa, Unknown
  Description of Unknown: uncultivated organism sequence
  Category: MG58 effectors
  Description: MG58-15 effector
MEKKYASDPEKLALIHRFGNFFTYFTGFNQNRENYYATDEKVTAVAYRAINENLLTFANNCELFEKLSVLSLSDLEKKIFNPDSYSEYLTQSGIDFYNEMLANIRSKANLYTQEHKTKLPQPKLLYKQI

SEQ ID NO: 737 - protein, 178 aa, Unknown
  Description of Unknown: uncultivated organism sequence
  Category: MG58 effectors
  Description: MG58-16 effector
MVKEIFYLLFSKKMKSDFFAPFTNLYPIQKTLRRELKPLNENFQHDPALTALRNSEIPQRDQQREKDYQAIKPLLDELHNQFITESLQSLETQDRSDFVLFYQTYQKKKKNKADFSEKELKSLDEEFESRTKSLRTAIGNSYAKLAELRKSNPDYVNEKGKPFLDQKSYKILTEAGVL

SEQ ID NO: 738 - protein, 141 aa, Unknown
  Description of Unknown: uncultivated organism sequence
  Category: MG58 effectors
  Description: MG58-17 effector
MIAETDQRIPEFKKLLEPIFEGKADLSQIFLSKTALNIISNRYFSSWHTLLEKGVELKLFKFKKNDEESFKLPAYLSLTELKELLEAVPFQTAEKSGTAEGTHHQVSLLKLQRENLHLERSNSNWELLLKSMKSDFESFWT

SEQ ID NO: 739 - protein, 132 aa, Unknown
  Description of Unknown: uncultivated organism sequence
  Category: MG58 effectors
  Description: MG58-18 effector
MLLDNALYAYRMLKWFKVDTSKLGFVPEGEFYPSLDQLLQGYPLPKWYDMIRNYLTRKPYSQAKLKLNFDCSTLLNGRDKNKETQNLSVILRKDGKFYLAIMKKDQNKFFEKSALYEGNLGTMEKMDYKLLP

SEQ ID NO: 740 - protein, 141 aa, Unknown
  Description of Unknown: uncultivated organism sequence
  Category: MG58 effectors
  Description: MG58-19 effector
MIAETDQRIPEFNKLLESIFEENADLSQIFLSKTSLNIISNRYFSSWNTLLEKGVELKLFKFKKNDEESFKLPTYLSLAELKELLEAVPFQTAEKSDTAEGTHHQVSLLKLQRENLHLESSHSNWELLLKSMKSDFESFWT

SEQ ID NO: 741 - protein, 99 aa, Unknown
  Description of Unknown: uncultivated organism sequence
  Category: MG58 effectors
  Description: MG58-20 effector
MPGSDKKKYGASDQVLELYAKGSFKKSEKSFNLADLHTLIDFYKSALPKYEDWKVFNFQFQATENYQDISQFYREVEQQGYLLNWRKVNEELIKQGIKD

SEQ ID NO: 742 - protein, 132 aa, Unknown
  Description of Unknown: uncultivated organism sequence
  Category: MG58 effectors
  Description: MG58-21 effector
MLLDNTLYAYRMLKWFKVDTSKLGFVPEGEFYPSLDQLLQDYPLPKWYDMIRNYLTRKPYSQAKLKLNFDCSTLLNGRDKNKETQNLSVILRKDGKFYLAIMKKDQNKFFEKSALYEGNLGTMEKMDYKLLP

SEQ ID NO: 743 - protein, 105 aa, Unknown
  Description of Unknown: uncultivated organism sequence
  Category: MG58 effectors
  Description: MG58-22 effector
MLPKCLMPGSDKKKYGASDQVLELYAKGSFKKSEKSFNLADLHTLIDFYKSALPKYEDWKVFNFQFQATENYQDISQFYREVEQQGYLLNRRKVNEELIKQGIKD

SEQ ID NO: 744 - protein, 115 aa, Unknown
  Description of Unknown: uncultivated organism sequence
  Category: MG58 effectors
  Description: MG58-23 effector
MKTGKIVKQGTLNLLNGTDYEAKLSQKAENRLHARQNRDTIEKIADLKNGYISQVVNKLVELVLEYNALIVFEDLNAGFKRGRQKIEQSVYQKLELALAKKLNFIVKKEKAVGEP

SEQ ID NO: 745 - protein, 115 aa, Unknown
  Description of Unknown: uncultivated organism sequence
  Category: MG58 effectors
  Description: MG58-24 effector
MKTGKIVKQGTLNLLNGTDYEAKLSQKAENRLHARQNRDTIEKIADLKNGYISQVVNKLVELVLEYNAVIVFEDLNAGFKRGRQKIEQSVYQKLELALAKKLNFIVKKEKAVVEP

SEQ ID NO: 746 - protein, 867 aa, Unknown
  Description of Unknown: uncultivated organism sequence
  Category: MG58 effectors
  Description: MG58-25 effector
MKSDLFSPFTNLYPIQKTLRRELKPLNENFQHDPALTALRNSEIPQRDEQREKDYQAIKPLLDELHNQFITESLQSLETQDRSDFVLFYQTYQKKKKNKAALSEKDLKTLDEEFESRTKALRNAIGTSFLNTAELRKSNPDYVNEKGKPFLTQKSYKILTEAGVLWLLEKKYASDPENLALIRRFGNFFTYFTGFNQNRENYYATDEKSTAVAYRAINENLLTFANNCELFEKLSVLSLSELEKKTFNPDSYSEYLTQSGIVFYNEMLANIRSKANLYTQEHKAKLPQPKLLYKQIWSPRGDTIPFDLIASEAEFQETLHTMIRETDQRIPEFNKLLEQIFEEKVDLSQIFFSKTSLNIISNRYFSSWHTLLEKGVELKLFKFKKNDEESFKLPAYLSLAELKELLESVPFQMAEKADADEEKHHQASLFKLQRENLHLEKSHSNWELLLKSMKSDFESFWTWEGEFWSYTLAKKALQSLSALESTNQEHKNLIKMLLDNALYAYRMLKWFKIDMSKLGFVPEGEFYPSLDQLLQDYPLPKWYDMIRNYLTRKPYSQAKLKLNFDCSTLLNGRDKNKETQNLSVILRKDGKFYLAIMKKDQNKFFEKSALYEGNLGTMEKMDYKLLPWAHKMLPKCLMPGSDKKKYGASDQVLELYAKGSFKKSEKSFNLADLHTLIDFYKSALQKYEDWKVFNFQFQATENYQDISQFYREVEQQGYLLKWRKVNEELIKQGIKDWSLFLFQISSKDFEGKSKTPDLQTLYWQQLFESPTNVKLNGEAEIFFRPWSMKKEKKTLKVDNYDVFKHKRYTEDKIFFHVPITLWFWNNEVSPSAPSKFNQKLNQELIIPYFDDLHVIGVDRWEKHLETI

SEQ ID NO: 747 - protein, 1294 aa, Unknown
  Description of Unknown: uncultivated organism sequence
  Category: MG58 effectors
  Description: MG58-26 effector
MVERESPKLRVASSILASPELSWKCWIKSVFFLAKTFYLLDFYNKKNMVKEIFYLLFSKKMKSDFFAPFTNLYPIQKTLRRELKPLNENFEHDPSLSSLRNSEIPQRDEQREKDYQAIKPLLDELHNQFITESLQSLETQDRSDFVLFYQTYQKKKKNKADFSEKELKSLDEEFESRTKASRTAIGNSYAKLAELRKSNPDYVNEKGKPFLDQKSYKILTEAGVLWLLEKKYASDPEKLALIRRFGNFFTYFTGFNQNRENYYATDEKATAVAYRAINENLLTFANNCELFEKISVLSLSEREKKIFNPDSYSEYLTQSGIDFYNEMLANIRSKANLYTQEHKTKLPQPKLLYKQIWSPRGNTIPFDLINKDEEFQKMLHTMIAETDQRIPEFNKLLESIFEENADLSQIFLSKTSLNIISNRYFSSWHTLLEKGVELKLFKFKKNDEESFKLPAYLSLAELKELLEAVPFQTAEKSDTTEGNHHQASLLKLQRENLHLESSHSNWELLLKSMKSDFESFWTWEGEFWSYTSAKKALQSLSTLESSNQEHKNLIKMLLDNALCAYRILKWFKIDTSKLGFVPEGEFYPSLDQLLQDYPLPKWYDMIRNYLTRKPYSQAKLKLNFDCSTLLNGRDKNKETQNLSVILRKDGKFYLAIMKKDQNKFFEKSALYEGNLGTMEKMDYKLLPWANKMLPKCLMPGSDKKKYRASDQVLELYAKGSFKKSEKSFNLADLHTLIDFYKSALPKYEDWKVFNFQFQATENYQDISQFYREVEQQGYLLNWRKVNEELIKQGIKDWSLFLFQISSKDFEGKSKTPDLQTLYWQQLFKNQTNVKLNGEAEIFFRPWSMKKEKKTLKVDNYDVFKHKRYTEDKILFHVPITLWFGNNEVSPSAPSKFNQKLNQELIIPHFDDLHVIGVDRWEKHLAFYSVVSVKTGKIVKQGTLNLLNGTDYEAKLSQKAENRLHARQNRDTIEKIADLKNGYISQVVNKLVELVLEYNAVIVFEDLNAGFKRGRQKIEQSVYQKLELALAKKLNFIVKKEKAVGESWSVTSAYQLAPQINTFWDIKWKQRGIMLYTRANYTSVTDPLTGWRKQHYFKKGSSEEMKAQFFKSYKNLTRDAGQKAYIFDDGTWLLYSNVERRRGKRGDHRERTQIKYDPSLELDTLFSKYQIEKSHSLFDQLKNREFPQTFWTSFFRILDLIMQIRNTDDKGRDIILSPIGNAQERFDSRKRYDQLPCDEKGLIIEESEFEYPTSGDANGAYNIARKGMMMLERIKENPEKPDLLIRDAEWDSWSK

SEQ ID NO: 748 - protein, 105 aa, Unknown
  Description of Unknown: uncultivated organism sequence
  Category: MG58 effectors
  Description: MG58-27 effector
MLPKCLMPGSNKKKYGASDQVLELYAKGSFKKSEKSFNLPDLHTLIDFYKLALPKYEDWKVFNFQFQATENYQDISQFYREVEQQGYLLKWRKINEELIKQGIKD

SEQ ID NO: 749 - protein, 132 aa, Unknown
  Description of Unknown: uncultivated organism sequence
  Category: MG58 effectors
  Description: MG58-28 effector
MLLDNALYAYRMLKWFKIDTSKLGFVPEGEFYPSLDQLLQDYPLSKWYDMIRNYLTRKPYSEAKLKLNFDCSTLLNGRDKNKESQNLSVILRKDGKFYLAIMKKDQNKFFEKSALYEGNLGTMEKMDYKLLP

SEQ ID NO: 750 - protein, 141 aa, Unknown
  Description of Unknown: uncultivated organism sequence
  Category: MG58 effectors
  Description: MG58-29 effector
MIAETDQRIPEFNKLLESIFEENADLSQIFLSKTALNIISNRYFSSWHTLLEKGVELKLFKFKKNDEESFKLPAYLSLAELKELLEAVPFQTVEKSDTAEGTHHQVSLLKLQRENLHLESSHSNWELLLKSMKSDFESFWT

SEQ ID NO: 751 - protein, 141 aa, Unknown
  Description of Unknown: uncultivated organism sequence
  Category: MG58 effectors
  Description: MG58-30 effector
MIAETDQRIPEFNKLLESIFEENADLSQISLSKTSLNIISNRYFSSWNTLLEKGVELKLFKFKKNDEESFKLPTYLSLAELKELLEAVPFQTAEKSDTAEGTHHQVSLLKLQRENLHLESSHSNWELLLKSMKSDFESFWT

SEQ ID NO: 752 - protein, 129 aa, Unknown
  Description of Unknown: uncultivated organism sequence
  Category: MG58 effectors
  Description: MG58-31 effector
MEKKYASDPEKLALIRRFGNFFTYFTGFNQNRENYYATDEKSTAVAYRAINENLLTFANNCELFEKLSVLSLSEREKKIFNPDSYSEYLTQSGIDFYNEMLANIRSKANLYTQEHKTKLPQPKLLYKQI

SEQ ID NO: 753 - protein, 165 aa, Unknown
  Description of Unknown: uncultivated organism sequence
  Category: MG58 effectors
  Description: MG58-32 effector
MTKPFFSQFTNLYPIQKTLRRELKPLNKNFEHDPSLSSLRNSEIPQRDEQREKDYQAIKPLLDKLHNQFITEGLQSLEPQDRSDFILFYQTYQKKKKNKANLSEKELKSLDEEFESRTKAFRAAIGTSFSNTAELRKSNPNYVNEKGKPFLTQKSYKILTEAGVL

SEQ ID NO: 754 - protein, 129 aa, Unknown
  Description of Unknown: uncultivated organism sequence
  Category: MG58 effectors
  Description: MG58-33 effector
MEKKYASEPENLALIRRFGNFFTYFTGFNQNRENYYATDEKVTAVAYRAINENLLTFANNCELFEKLSVLSLSDLEKKIFNPDSYSEYLTQSGIDFYNEMLANIRSKANLYTQEHKTKLPQPKLLYKQI

SEQ ID NO: 755 - protein, 165 aa, Unknown
  Description of Unknown: uncultivated organism sequence
  Category: MG58 effectors
  Description: MG58-34 effector
MTKPFFSQFINLYPIQKTLRRELKPLNENFQHDPSLSALRNSEIPQRDEQREKDYQAIKPLLDELHNEFITESLQSLEIQNRSGFVDFYQNYQKSKKNKAELSEKELKSLDEEFESRTKALRNAIGTSFSATAELRKSNPDYVNEKGKPFLTQKSYKILTEAGVL

SEQ ID NO: 756 - protein, 141 aa, Unknown
  Description of Unknown: uncultivated organism sequence
  Category: MG58 effectors
  Description: MG58-35 effector
MIAETDQRIPEFNKLLESIFEENADLSQIFLSKTSLNIISNRYFSSWHTLLEKGVELKLFKFKKNDEESFKLPAYLSLAELKELLEAVPFQTIEKADTAEGNHHQVSLLKLQRENLHLKNSHSNWELLLKSMKSDFESFWA

SEQ ID NO: 757 - protein, 117 aa, Unknown
  Description of Unknown: uncultivated organism sequence
  Category: MG58 effectors
  Description: MG58-36 effector
MIRETDQRIPELKKLLAQIFEEKADLSQIFLSKTALNIISNRYFSSWHTLLEKGVELKLFKFKKNDEESFKLPAYLSLAELKELLEAVPFQTAEKSDTDEETHHQVSLLKLQRENLH

SEQ ID NO: 758 - protein, 1234 aa, Unknown
  Description of Unknown: uncultivated organism sequence
  Category: MG58 effectors
  Description: MG58-37 effector
MKSDFFAPFTNLYPIQKTLRRELKPLNENFEHDPSLSSLRNSEIPQRDEQREKDYQAIKPLLDELHNQFITESLQSLETQGRSDFVLFYQTYQKKKKNKVDLSEKDLKTLDEEFESRTKALRTAIGNSYAKLAELRKSNPDYVNEKGKPFLDQKSYKILTEAGVLWLLEKKYTSDPEKLALIRRFGNFFTYFTGFNQNRENYYATDEKSTAVAYRAINENLLTFANNCELFEKLSVLSLSEREKKIFNPDSYSEYLTQSGIDFYNEMLANIRSKANLYTQEHKTKLPQPKLLYKQIWSPRGNTIPFDLINKDEEFQKMLHTMIAETDQRIPEFNKLLESIFEENADLSQIFLSKTSLNIISNRYFSSWHTLLEKGVELKLFKFKKNDEESFKLPAYLSLAELKELLEAVPFQTAEKSDTTEGNHHQASLLKLQRENLHLESSHSNWELLLKSMKSDFESFWTWEGEFWSYTSAKKALQSLSTLESSNQEHKSLIKMLLDNALCAYRMLKWFKIDTSKLGFVPEGEFYPSLDQLLQDYPLPKWYDMIRNYLTRKPYSQAKLKLNFDCSTLLNGRDKNKETQNLSVILRKDGKFYLAIMKKDQNKFFEKSALYEGNLGTMEKMDYKLLPWANKMLPKCLMPGSDKKKYGASDQVLELYAKGSFKKSEKSFNLADLHTLIDFYKSALQKYEDWKVFNFQFQATENYQDISQFYREVEQQGYLLNWRKVNEELIKQGIKDWTLFLFQISSKDFEGKSKTPDLQTLYWQQLFKNQTNVKLNGEAEIFFRPWSMKKEKKKLKVDNYDVFKHKRYTEDKILFHVPITLWFGNNEVSPSAPSKFNQKLNQELIIPHFDDLHVIGVDRWEKHLAFYSVVSVKTGKIVKQGTLNLLNGTDYEAKLSQKAENRLHARQNRDTIEKIADLKNGYISQVVNKLVELVLEYNAVIVFEDLNAGFKRGRQKIEQSVYQKLELALAKKLNFIVKKEKAVGEPWSVTSAYQLAPQINTFWDIKWKQRGIMLYTRANYTSVTDPLTGWRKQHYFKKGSSEEMKAQFFKSFKNLTRDTNQEAYIFDDGTWKLYSNVERRRGKRGDHRERTQIKYDPSLELDTLFSKYQIEKSESLFGQLKNRELPQTFWTSFFRILDLIMQIRNTDDEGRDIILSPIGNAQERFDSRKRYNQLPRDENGLVLEESAFEYPTSGDANGAYNIARKGVMMLERIKENPEKPDLLIRDAEWDSWVK

SEQ ID NO: 759 - protein, 132 aa, Unknown
  Description of Unknown: uncultivated organism sequence
  Category: MG58 effectors
  Description: MG58-38 effector
MLLDNALYAYRMLKWFKIDTSKLGFIPEGEFYPSLDQLLQDYPLPKWYDMIRNYLTRKPYSQAKLKLNFDCSTLLNGRDKNKETQNLSVILRKDGKFYLAIMKKDQNKFFEKSALYEGNLGTMEKMDYKLLP

SEQ ID NO: 760 - protein, 1253 aa, Unknown
  Description of Unknown: uncultivated organism sequence
  Category: MG58 effectors
  Description: MG58-39 effector
MYTDYIDKLVGGFMDNAFSKFTNQYSFSKTLRFELVPQGRTADFLNGELESDQDRAESYQLLKPHFDNFHDGFIEQSLKAYSDSENRFEQLGDLLQKQQKFDKNSSNYEKLEKDIIKLQKSIRTNLSRFFTGFAKKLNQDYGLGDKSIISNAGAMVDFAKILWKDQPEKLVLLSKFDKFSGYFTGYCQNRTNYYVGDDKSTAVSNRIVNQNFTKYTQNFIEINKDEFKSFLKWFNQEDRYIYNQSTKQGQLTHINPEMFSFAHYTEHLNQSGIETYNFNIGDINYWINQFNQTKPPKKVKKLLNLYKQIGQIPVDKKELFKFYETDEDLATDLLVTIENLPKYTENANTLFRNLADEEFNLEEINISARGTNSLANKYLIGWESVRELVNSNKKHDSSNKLIKLSEKPKSTTLGSLNEIINQFEPNQIFKPKYLNNLSDEPGQPSEILIWLIKESLLNALKESKDLAANLNLNKQSKLLGEKSITENIKTFLDSLLLSSQIMKTFQVDGALGDSDFYNELDQVLNEIDIFSIYNATRNYLTKKPYSQDKILLKFANSSLLDGWDINKESDNTSVILRDSTGYFLAIMKKSSNKFFDKAKNPLLYQVDSGDLEKMDYKLLPGPNKMIPKCIISVFWNKQEKQIVRDKPTTIKLAKSGISPSDEFIYKYNQGLHTKDPETKKIRDKKYLVEYIDYVKDALNKYEGWQGYIFNFKSSDQYQDTSEFYKDISDGGYSLNWSSIDLDVLNKAVDEGEIYLFKLKNKDLARKSKSNGKPNLHTMYWQNLFIDESSFKLNGSAEMFYRPKSIDKKQKVFTGSGIKKSGIFEKNRFTENKYLFHVPITINRKANNVIKFRDKINQAIIDEKITNVIGVDRGEKHLEFYCLLGKDGEIIEQGSLNVINGADYSKILDQKSSDRNEARKNWKTIDQIKDIKNGHTSLAIKQIIDLAVKHNALIVLEDLNTGFMRGRQKIEKSNYQQFELAMAKKLNYLVSKDTPAQQVGGTNKGLQLTPILNNYSDIEKVKQFGIILYTTAGYTSSTDPVTGWRKTVYLKSLNQDSMKNDISKFSQIYWDNKEKCYIFSYDTKNFNSKANSRVWSLYSSVERLRSERNKNGIWEKKQYSPTDVMRKALVNSGINPQSANLKEDILSMANSRSLKDIIFGFNLICQIRNSGTSVRDSDYILSPVKPFFDSRKQLDEQNLNENPNSNQLPTSGDSNGAYNIARKGQIMLSRVKQNPEKPDLFISDSDWDKYLAED

SEQ ID NO: 761 - protein, 132 aa, Unknown
  Description of Unknown: uncultivated organism sequence
  Category: MG58 effectors
  Description: MG58-40 effector
MLLDNALYAYRMLKWFKVDTSKLGFVPEGEFYPSLDLLLQNYPLSKWYDMIRNYLTRKPYSQAKLKLNFDCSTLLNGRDKNKETQNLSVILRKDGKFYLAIMKKDQNKFFEKSALYEGTLGTMEKMDYKLLP

SEQ ID NO: 762 - protein, 141 aa, Unknown
  Description of Unknown: uncultivated organism sequence
  Category: MG58 effectors
  Description: MG58-41 effector
MIRETDQRIPEFNKLLEQIFEEKADLSQIFLLKTALNIVSNRYFSSWHTLLEKGVELKLFKFKKNDEESFKLPAYLSLAELKELLEAVPFQTPEKSDTDEETHHQVSLLKLQRENLHLENSYSNWELLLKSMKSDFESFWT

SEQ ID NO: 763 - protein, 105 aa, Unknown
  Description of Unknown: uncultivated organism sequence
  Category: MG58 effectors
  Description: MG58-42 effector
MLPKCLMPGSDKKKYGASDQVLELYAKGSFKKSEKSFNLADLHTLIDFYKSALPKYEDWKVFNFQFQATENYQDISQFYREVEQQGYLLNWRKVNEELIKQGIKD

SEQ ID NO: 764 - protein, 1240 aa, Unknown
  Description of Unknown: uncultivated organism sequence
  Category: MG58 effectors
  Description: MG58-43 effector
MKSDLFSPFINLYHIQKTLRRELKPLNENFEHDPSLTALRNSEIPQRDEQREKDYQAIKPLLDELHNQFITESLQSLETQNRSDFVDFYQNYQKSKKNKAHLSEKELKSLDEEFESRTKAFRAAIGTSFSNTAELRKSNPDYVNEKGKPLLTQKSYKILTEAGVLWLLEKKYASEPETLALIRRFGNFFTYFTGFNQNRENYYATDEKSTAVAYRAINENLLTFANNCELFEKFSVLSLSDLEKKIFNPDSYSEYLTQEWIDFYNEMLANIRSKANLYTQEHKTKLPQPKLLYKQIWSPRGNTIPFDLINNDKEFQEMLHTMIAETDQRIPEFNKLLEQIFEEKADLSQIFLSKTALNIISNRYFSSWHTLLEKGVELKLFKFKKNDEESFKLPAYLSLAELKELLEAVPFQTVEKSDTAEEKHHQVSLLKLQRENLYLENSHSNWELLLKSMKSDFESFWTWEGEFWSYTSAKNALQSLLSLESTNQEHKNLIKKLLDNALYAYRMLKWFRVDTSKLGFVPEGEFYPSLDQLLQDYPLPKWYDMIRNYLTRKPYSQAKLKLNFDCSTLLNGRDKNKETQNLSVILRKDGKFYLAIMKKDQNKFFEKSALYEGNLGTMEKMDYKLLPWANKMLPKCLMPGSDKKKYGASDQVLELYAKGSFKKSEKSFNLADLHTLIDFYKSALPKYEDWKVFNFQFQATENYQDISQFYREVEQQGYLLNWRKVNEELIKQGIKDWSLFLFQISSKDFEGKSKTPDLQTLYWCQLFESPTNVKLNGEAEIFFRPWSMKKEKKTLKVDNYDVFKHKRYTEDKILFHVPITLWFGNNEVSPSAPSKFNQKLNQELIIPHFDDLHVIGVDRWEKHLAFYSVVSVKTGKIVKQGTLNLLNGTDYEAKLSQKAENRLHARQNRDTIEKIADLKNGYISQVVNKLVELALEYNAVIVFEDLNAGFKRGRQKIEQSVYQKLELALAKKLNFIVKKEKAVGEPWSVTSAYQLAPQINTFWDIKWKQRGIMLYTRANYTSVTDPLTGWRKQHYFKKGSSEEMKAQFFKSFKNLTRDAGQEAYIFDDGTWQLYSNVERRRGKRGDHRERTQIKYDPSLELDTLFSKYQIEKSDSLFDQLKNREFPQTFWTSFFRILDLIMQIRNTDDKGRDIILSPIGNAKERFDSRKQYNQLPRDEKGMIIEESVFEYPTSGDANGAYNIARKGVMMLERIKENPEKPDLLIRDAEWDSWVKLNNIII

SEQ ID NO: 765 - protein, 105 aa, Unknown
  Description of Unknown: uncultivated organism sequence
  Category: MG58 effectors
  Description: MG58-44 effector
MLPKCLMPGSDKKKYGASDQVLELYAKGSFKKSEKSFNLADLHTLIDFYKLALPKYEDWKVFNFQFQATENYQDISQFYREVEQQGYLLNWRKVNEELIKQGIKD

SEQ ID NO: 766 - protein, 132 aa, Unknown
  Description of Unknown: uncultivated organism sequence
  Category: MG58 effectors
  Description: MG58-45 effector
MLLDNALYAYRMLKWFKVDTSKLGFVPEGEFYPSLDRLLQDYPLPKWYDMIRNYLTRKPYSEAKLKLNFDCSTLLNGRDKNKETQNLSVILRKDGKFYLAIMKKDQNKFFEKSALYEGNLRTMEKMDYKLLP

SEQ ID NO: 767 - protein, 115 aa, Unknown
  Description of Unknown: uncultivated organism sequence
  Category: MG58 effectors
  Description: MG58-46 effector
MKTGKIVKQGTLNLLNGTDYEAKLSQKAENRLHARQNRDTIEKIADLKNGYISQVVNKLVELVLEYNAVIVFEDLNAGFKRGRQKIEQSVYQKLELALAKKLNFIVKKEKTVGEP

SEQ ID NO: 768 - protein, 115 aa, Unknown
  Description of Unknown: uncultivated organism sequence
  Category: MG58 effectors
  Description: MG58-47 effector
MKTGKIVKQGTLNLLNGTDYEAKLSQKAENRLHARQNRDTIEKIADLKNGYISQVVNKLVELVLEYNAVIVFEDLNAGFKRGRQKIEQSVYQKLELALAKKLNFIVKKEKAVGEP

SEQ ID NO: 769 - protein, 34 aa, Unknown
  Description of Unknown: uncultivated organism sequence
  Category: MG58 effectors
  Description: MG58-48 effector
MKKEKKTLTVDNYDVFKHKRYTEDKILFHVPITL

SEQ ID NO: 770 - protein, 165 aa, Unknown
  Description of Unknown: uncultivated organism sequence
  Category: MG58 effectors
  Description: MG58-49 effector
MSRSIFSPFTNLYPIQKTLRRELKPLNENFQHDPALSALRNSEIPQRDEQREKDYQAIKPLLDELHNQFITESLQSLETQDRSDFVLFYQTYQKKKKNKAALSEKDLKTLDEEFESRTKALRTAIGNSYAKLAELRKSNPDYVNEKGKPFLNQKSYKILTEAGVL

SEQ ID NO: 771 - protein, 155 aa, Unknown
  Description of Unknown: uncultivated organism sequence
  Category: MG58 effectors
  Description: MG58-50 effector
MITSEAEFKKILHTVIRETDQRIPEVKKLLESIFEEKTDLSQIFLSKTAFNIISNRYFSSWHTLLEKGVELKLFKFKKNDEESFQLPAYLSLAELKELLESVPFETAEKVDAAEGNHHQVSLLKLQRENLHLENSHSNRELLLKSMKSDFESFWT

SEQ ID NO: 772 - protein, 1236 aa, Unknown
  Description of Unknown: uncultivated organism sequence
  Category: MG58 effectors
  Description: MG58-51 effector
MKSDFFAPFTNLYPIQKTLRRELKPLNENFEHDPSLSSLRNSEIPQRDEQREKDYQAIKPLLDELHNQFITESLQSLEPQDRSDFVLFYQTYQKKKKNKAELSEKELKSLDEEFESRTKALRAAIGTSFSNTAELRKSNPDYVSEKGKPFLTQKSYKILTEAGVLWLLEKKYASDHEKIALIRRFGNFFTYFTGFNQNRENYYATDEKSTAVAYRAINENLLTFANNCELFEKLSVLSLSDLEKKIFNPDSYSEYLTQSGIDFYNEMLANIRSKANLYTQEHKVKLPQPKLLYKQIWSPRGNTIPFDLITSEEEFQEMLHAMIRETDQRIPEFNKLLEQIFEQKADLSQIFLSKTALNIISNRYFSSWHTLLEKGVELKLFKFKKNDEESFKLPAYLSLAELKELLEAVPFQTVEKSDTAEGNHHQVSLLKLQRENLHLEKSHSNWELLLKSMKSDFESFWTWEGEFWSYTSAKKALQSLSSLQSTNQEHKNLIKMLLDNTLYAYRMLKWFKVDTSKLGFVPEGEFYPSLDQLLQDYPLPKWYDMIRNYLTRKPYSQAKLKLNFDCSTLLNGRDKNKETQNLSVILRKDGKFYLAIMKKDQNKFFEKSALYEGNLGTMEKMDYKLLPWANKMLPKCLMPGSDKKKYGASDQVLELYAKGSFKKSEKSFNLADLHTLIDFYKSALPKYEDWKVFNFQFQATENYQDISQFYREVEQQGYLLKWRKVNEELIKQGIKDWSLFLFQISSKDFEGKSKTPDLQTLYWQQLFESQTNVKLNGEAEIFLRPWSMKKEKKTLKVDNYDVFKHKRYTEDKILFHVPITLWFGNNEVSPSAPSKFNQKLNQELIIPHFDDLHVIGVDRWEKHLAFYSVVSVKTGKIVKQGTLNLLNGTDYEAKLSQKAENRLHARQNRDTIEKIADLKNGYISQVVNKLVELALEYNAVIVFEDLNAGFKRGRQKIEQSVYQKLELALAKKLNFIVKKEKAVGEPWSVTSAYQLAPQINTFWDIKWKQRGIMLYTRANYTSVTDPLTGWRKQHYFKKGSSEEMKTQFFKNFKNLTRDAGQEAYIFDDGTWKLYSNVERRRGKRGDHRERTQIKYDPSLELDTLFSKYQIEKSDSLLDQLKNRDLPQTFWTSFFRILDSIMQIRNTDDEGRDIILSPIGNAQERFDSRKRYNQLPRDEKGLVIEESAFEYPTSGDANGAYNIARKGVMMLQRIKENPEKPDLLIRDAEWDKKITRK

SEQ ID NO: 773 - protein, 178 aa, Unknown
  Description of Unknown: uncultivated organism sequence
  Category: MG58 effectors
  Description: MG58-52 effector
MVKEIFYLLFSKKMKSDLFSPFTNLYPIQKTLRRELKPINENFEHDPFLTTLRNSKIPQRDKQREKDYQEIKPLLDKLHNQFITESLQSLETQDRSDSVLFYQTYQKKKKNKADLSEKDLKTLDEEFESRTKALRNAIGASFSVTAALRKSNPDYVNEKGKPFLDQKSYKILTEAGVL

SEQ ID NO: 774 - protein, 309 aa, Unknown
  Description of Unknown: uncultivated organism sequence
  Category: MG58 effectors
  Description: MG58-53 effector
MVKEIFYLLFSKKMKSDLFSPFTNLYPIQKTLRRELKPINENFEHDPFLTTLRNSKIPQRDKQREKDYQEIKPLLDKLHNQFITESLQSLETQDRSDFVLFYQTYQKKKKNKAALSEKDLKTLDEEFESRTKALRNAIGTSFLNTAELRKSNPDYVNEKGKPFLTQKSYKILTEAGVLWLLEKKYASDPENLALIRRFGNFFTYFTGFNQNRENYYATDEKSTAVAYRAINENLLTFANNCELFEKLSVLSLSELEKKTFNPDSYSEYLTQSGIVFYNEMLANIRSKANLYTQEHKAKLPQPKLLYKQI

SEQ ID NO: 775 - protein, 658 aa, Unknown
  Description of Unknown: uncultivated organism sequence
  Category: MG58 effectors
  Description: MG58-54 effector
MLDLSLEEKNIFNPDSYSDYLVQEGIQDYNTQIASIKSKINLYSGAHKTKLPQPKLLYKQIWSPRGNTIPFDLITSEAEFQKMLHTMIAETDQRIPEFKKLLAQIFEEKADLSQIFLSKTALNIISNRYFSSWHTLLEKGVELKLFKFKKNDEESFKLPAYLSLAELKELLEAVPFQTPEKSDTDEETHHQVSLLKLQRENLHLENSYSNWELLLKSMKSDFESFWTWEGEFWSYTLAKNALQSLSTLESTNQEHKNLIKMLLDNALYAYRMLKWFKVDTSKLGFVPEGEFYPSLDLIFQDYPLPKWYDMIRNYLTKKPYSQAKLKLNFDCSTLLNGRDKNKETQNLSVILRKDGKFYLAIMKKDQNKFFEKSALYEGNLGTMEKMDYKLLPWANKMLPKCLMPGSDKKKYGAFDQVLELYAKGSFKKSEKSFNLPDLHTLIDFYKSALPKYEDWKVFNFQFQATENYQDISQFYREVEQQGYLLNWRNVNEELIKQGIKDWSLFLFQISSKDFEGKSRTPDLQTLYRNQSFAPQTNVKLNGEAEIFFRPWSMKKEKKKLKVDNYDVFKHKRYTEDKILFHVPITLWFWNNEVSPSAPSKFNQKLNQELIIPHFDDLHVIGVDRWEKHLNLYKISTFVDIVEFSFLRLFRTYIRFLLL

SEQ ID NO: 776 - protein, 130 aa, Unknown
  Description of Unknown: uncultivated organism sequence
  Category: MG58 effectors
  Description: MG58-55 effector
MDNALYAYRMLKWFKVDTSKLGFLPEGEFYPSLDQLLQDYPLPKWYDMIRNYLTRKPYSQAKLKLNFDCSTLLNGRDKNKETQNLSVILRKDGKFYLAIMKKDQNKFFEKSALYEGNLGTMEKMDYKLLP

SEQ ID NO: 777 - protein, 1234 aa, Unknown
  Description of Unknown: uncultivated organism sequence
  Category: MG58 effectors
  Description: MG58-56 effector
MTKPFFSQFINLYPIQKTLRRELKPLNENFQHDPSLSALRNSEIPQRDEQREKDYQAIKPLLDELHNEFITESLQSLEIQNRSGFVDFYQNYQKSKKNKAELSEKELKSLDEEFESRTKALRNAIGTSFSATAELRKSNPDYVNEKGKPFLTQKSYKILTEAGVLWLLEKKYASDPERLALIRRFGNFFTYFTGFNQNRENYYSTEEKSTAVAYRTINENLLTFANNCELFEKLSVPSLSELEKKIFNPDSYSEYLTQEWIDFYNEMLANIRSKANLYTQEHKTKLPQPKLLYKQIWSPRANTIPFDLIASEAEFQEMLHTMIRETDQRIPEFNKLLEQIFEEKADLSQIFLLKTALNIVSNRYFSSWHTLLEKGVELKLFKFKKNDEESFKLPAYLSLAELKELLEAVPFQTPEKSDTDEETHHQVSLLKLQRENLHLENSYSNWELLLKSMKSDFESFWTWEGEFWSYTSAKKALQSLSTLESTNQEHKNLIKMLLDNALYAYRMLKWFKVDTSKLGFVPEGEFYPSLDRLLQDYPLPKWYDMIRNYLTRKPYSEAKLKLNFDCSTLLNGRDKNKETQNLSVILRKDGKFYLAIMKKDQNKFFEKSALYEGNLRTMEKMDYKLLPWANKMLPKCLMPGSDKKKYGASDQVLELYAKGSFKKSEKSFNLADLHTLIDFYKSALPKYEDWKVFNFQFQATENYQDISQFYREVEQQGYLLNWRKVNEELIKQGIKDWSLFLFQISSKDFEGKSKTPDLQTLYWQELFESPTNVKLNGEAEIFFRPWSMKKEKKTLTVDNYDVFKHKRYTEDKILFHVPITLWFGNNEVSPSAPSKFNQKLNQELIIPHFDDLHVAWVDRGERNLWYFSIISVKTGKIVKQGTLNLLNGTDYEAKLSQKAENRLHARQNRDTIEKIADLKNGYISQVVNKLVELVLEYNAVIVFEDLNAGFKRGRQKIEQSVYQKLELALAKKLNFIVKKEKAVGEPWSVTSAYQLAPQINTFWDIKWKQRGIILYTRANYTSVTDPLTGWRKQHYFKKSSSEEMKAQFFKSFKNLTRDAGQEAYIFDDGTWQLYSNVERRRGKRGDHRERTQIKYDPSLELDTLFSKYQIEKSDSLFDQLKNRELPQTFWTSFFRILDLIMQIRNTDDEGRDIILSPIGNPQERFDSRKRYDQLPRDEKGLVIEESEFEYPTSGDANGAYNIARKGVMMLERIKENPEKPDLLVRDAEWDSWVI

SEQ ID NO: 778 - protein, 1237 aa, Unknown
  Description of Unknown: uncultivated organism sequence
  Category: MG58 effectors
  Description: MG58-57 effector
MTKPLFSQFTNLYPIQKTLRRELKPLNENFEHDPALSALRNSEIPQRDEQREKDYQAIKPLLDELHNQFITESLQSLETQNRSGFIDFYQNYQKSKKNKADLSEKELKSIDEEFESRTKALRTAIGNSYAKLAELRKSNPDYVNEKGKPFLDQKSYKILTESGVLWLLEKKYASDPENLALIRRFGNFFTYFTGFNQNRENYYATDEKSTAVAYRAINENLLTFANNCGLFEALQVLDLSLEEKNIFNPDSYSDYLVQEGIQDYNTQIASIKSKINLYSGAHKTKLPQPKLLYKQIWSPRANTIPFDLIASEAEFQEMLHTMIRETDQRIPEFKKLLAQIFEEKADLSQIFLSKTALNIVSNRYFSSWHTLLEKGVELKLFKFKKNDEESFKLPAYLSLAELKELLEAVPFQTPEKSDTDEETHHQVSLLKLQRENLHLENSYSNWELLLKSMKSDFESFWTWEGEFWSYTSAKNALQSLSTLESANQEQKNLIKMLLDNALYAYRMLKWFKVDTSKLGFVPEGEFYPSLDQLLQDYPLPKWYDMIRNYLTRKPYSQAKLKLNFDCSTLLNGRDKNKETQNLSVILRKDGKFYLAIMKKDQNKFFEKSALYEGNLGAMEKMDYKLLPWANKMLPKCLMPGSDKKKYGASDQVLELYTKGSFKKSEKSFNLPDLHTLIDFYKSALPKYEDWKVFNFQFQATENYQDISQFYREVEQQGYLLNWRKVNEELIKQGIKEWSLFLFQISSKDFEGKSKTPDLQTLYWQQLFKNQTNVKLNGEAEIFFRPWSMKKEKKTLTVDNYDVFKHKRYTEDKILFHVPITLWFGNNEVSPSAPSKFNQKLNQELIIPHFDDLHVIGIDRWEKHLAFYSVVSVKTGKIVKQGTLNLLNGTDYEAKLSQKAENRLHARQNRDTIEKIADLKNGYISQVVNKLVELVLEYNAVIVFEDLNAGFKRGRQKIEQSVYQKLELALAKKLNFIVKKEKAVGEPWSVTSAYQLAPQINTFWDIKWKQRGIMLYTRANYTSVTDPLTGWRKQHYFKKGSSEEMKAQFFRSFKNLTRDAGQEAYIFDDGTWKIYSNVERRRGKRGDHRERTQIKYDPSLELDALFSKYQIEKSDSLLDQLKNRELPQTFWTSLFRILDLIMQIRNTDDEGRDIILSPIGNPQERFDSRKRYDQLSRDEKGVVIEESAFEYPTSGDANGAYNIARKGVMMLERIKKNPEKPDLLIRDAEWDKENNKLT

SEQ ID NO: 779 - protein, 1247 aa, Unknown
  Description of Unknown: uncultivated organism sequence
  Category: MG58 effectors
  Description: MG58-59 effector
MVKEIFYLLFSKKMKSDFFSPFTNLYPIQKTLRRELKPLNENFEYDPSLSLLRNSEIPQRDEQREKDYQAIKPLLDELHNQFIAESLQSLETQNRSDFVDFYQTYQKKKKNKVDLSEKELKMLNEEFESRTKALRTAIGNSYAKLAELRKSNPDYVNEKGKPFLTQKSYKILTEAGVLWLLEKKYASDPEKLALIRRFGNFFTYFTGFNQNRENYYATDEKATAVAYRAINENLLTFANNCELFEKLSVLSLSEREKKIFNPDSYSEYLTQSGIDFYNEMLANIRSKANLYTQEYKTKLPQPKLLYKQIWSPRGNTIPFDLINNDEEFKKMLHTMIAETDQRIPEFNKLLESIFEENADLSQIFLSKTSLNIISNRYFSSWHTLLEKGVELKLFKFKKNDEESFKLPAYLSLAELKELLEAVPFQTIEKADTAEGNHHQVSLLKLQRENLHLKNSHSNWELLLKSMKSDFESFWAWDEEFWSYTSAKNVIQSLSSLQSTNQEHKNLIKMLLDNALYAYRMLKWFKIDTSKLGFIPEGEFYPSLDQLLQDYPLPKWYDMIRNYLTRKPYSQAKLKLNFDCSTLLNGRDKNKETQNLSVILRKDGKFYLAIMKKDQNKFFEKSALYEGNLGTMEKMDYKLLPWANKMLPKCLMPGSDKKKYGASDQVLELYAKGSFKKSEKSFNLADLHTLIDFYKSALPKYEDWKVFNFQFQATENYQDISQFYREVEQQGYLLNWRKVNEELIKQGIKDWSLFLFQISSKDFEGKSKTPDLQTLYWQQLFESPTNVKLNGEAEIFFRPWSMKKEKKALKVDNYDVFKHKRYTEDKILFHVPITLWFGNNEVSPSAPSKFNQKLNQELIIPHFDDLHVIGVDRWEKHLAFYSVVSVKTGKIVKQGTLNLLNGTDYEAKLSQKAENRLHARQNRDTIEKIADLKNGYISQVVNKLVELVLEYNAVIVFEDLNAGFKRGRQKIEQSVYQKLELALAKKLNFIVKKEKTVGEPWSVTSAYQLAPQINTFWDIKWKQRGVMLYTRANYTSVTDPLTGWRKQHYFKKGSSEEMKAQFFKSFKNLTRDINQEAYIFDDGTWKLYSNVERRRGKRGDHRERTQIKYDPSLELDTLFFKNQIEKYDSLFDQLKNRELPQTFWTSFFRILDLIMQIRNTDDEGRDIILSPIGNVQERFDSRKRYDQLPRDEKGLIIEESEFEYPTSGDANGAYNIARKGVMMLERIKENPEKPDLLIRDAEWDSWAK

SEQ ID NO: 780 - protein, 1281 aa, Unknown
  Description of Unknown: uncultivated organism sequence
  Category: MG59 effectors
  Description: MG59-1 effector
MNLDSFTRKYKLAKTLRFELRPVGRTLETFKEQFFEGDKRRAEDYPIVKELLDGEHKALLERALSNPPSDLDWTALAQAHEDYRTSDKSKEAKDALAAKQAEFRKKIVALFKKDDAFSNLTAPTPKDIFAAMRQRYEDAGEEVPEALVTFSRFAGFFKGYQENRRNIYSDEAQATSAANRAVNENFPKFLEDVRIFRHIADAYPAILSGAEKELAPLLKGRTLASLFDPAAYGSFLSQSNIDFFNSVLGGFVPEEGEKTRGINEFVNLYRQQHEDARTDRSLSALHSLYKQILSDRETRSLVPRALETDEDVLVSLRAMLEERLLGLATESGRVNVLDDLQALLSKIPAADDIWIDGAEISRVSMNLLGSWNALGSLMESAAEVRFASESTEKKRLSAIDKWMKRSVYALSELADLRQETDTGSVIVDVSKLWKGPAAAQRFDAARAAVAAALPLLSSPIPENGPKLRERKDDVEIIKAALDAVLDVLHFVKPLHAGEGLDRDEAFYSAFDPLYTALDGFVPLYNKVRNYLTKKPGETERIKLMFDNPTLADGWDQNKEKDNTCVLFFRDGLYYLGVMNPEEKTDFSKLSGPKTPGCYRKMVYKLLPGPNKMLPKVFFSKKGLELFHPSANLLERYHAGAYKKGPSFDLAFCRRLIDFYKASIAAHPDWSKFGFRFSPTSSYNGIDEFYREVSEQGYRISFENIPVETVDRLVEEGKLCLFQLWNKDFSRASTGRPNLHTQYWNAVFAPENLQDVVIKLNGEAELFYRPRSIKEHVFRHKVGEKMVNRRGADGSPMPESVHGELFRHFNGSPEPLSDEARAWIESGNLVVKDVTHEIVKDRRYTEDKFSFHVPLTINFKQPDAPARFNEQVRDFLRGNPDVNVIGIDRGERNLIYLTLVDRQGNLLEQRSFNVVSRTRRDGVEMRTDYQSKLAQAEKDRAAARLTWSEIGAIKDLKEGYLSAVVHEIAKMMVERNAIVVLEDLNFGFKRGRFRIERQVYQKFEKALIDKLNYLVFKDRGLAEPGGTLRGYQLTDAFESFERIGKQTGFLFYVPAGYTSKIDPTTGFTNLFNTKRCTNAAGIRDFFAAFDSIRWDAARRAFAFAFDYRNFKTSQESHRTAWTVYSANRRLVFDKDARTEKEIDPTAILLDALKKHGVSVTDGFDLKALLADTEPSKANAGFFRNVFYAFDRTLQMRNSRAGEDYIESPVLNGRGEFFDSRKADATLPKDADANGAYHIALKGVQLLEENIAENRTANGSADLKIEHKDWFRFAQELAARKFK

SEQ ID NO: 781 - protein, 1245 aa, Unknown
  Description of Unknown: uncultivated organism sequence
  Category: MG59 effectors
  Description: MG59-2 effector
MTAMTDFTKLYNLSHTLTFELHPIGKTAEKLQESGLLNQDFKRSQDYAEVKSVLDEIHKKFLQEVLSDCDLSWQELADALKIFRINKDRRALEGIQKKYRKSLADKFSKNKFFKILTEATPSKLFRYLLDQPDMVERKVETFGKFACYFKGYQENRKNIYSAEEQQTAAAYRAVNVNFQKYLRVVELYGDFVKNFPELTEDIKQRTAELTKEDLSQVLQIENYNKFIAQSGIEYLNSLIAQINLSVNWYRQAHNVRLSFAPLLFKQILSDREQAFVVERIEKDDDLYEKLKAFCEQHICSVEIRGETGDLFSRLKGLFATLNDDSDLYVDAASLSGIGNVLTGNWSCFRDAMDAYANETLKSKILREKYCKQPVYSFSEIKSWRIVRTDDDGNTTPVRLTDYWNGKKVQEMFATEKTLRNRVLEMVRVSHDKNFRERNHDVALVKEYLDAVQGILHLLKPLNVGSENGGGFYDALSPIIPLYNQVRNYVTQKPSDIGKIKLMFNNPTLADGWDFNKEKANTSVIFCRNGEYYLGIMNPKSKTDFDKLAVDDPANCYQKMVYKLLPGPNKMLPKVFFADKNIDFFAPSGDLLRRYEAKEHLKGEKFDLAYCHELINFFKESIARHKDWSKFGFKFSETSAYSGIDEFYREVAEQGYKMSFANIPVGTIDKLVEDGNLFLFQIWNKDFSEKSTGIPNKFTLYWKALFDRRNLSDVIFKLNGEAELFLREPAITEPVVHRPGEKLVNKTVVMEVGGDHQAIRNSIPDVVYTEIYKYVNGMEEGPLSSAAKEHLNKFPRLDWEPGMGLEATLKRTVVKDVKFQLVKDRRFAKRFFSFHVPITVNFKSPDPKGVRLNDRVWVFLKDNPDVNIIGIDRGERNLIYVNCIDQKGRILLQKSFNVVGGFDYHQKLDMREKERAQARKSWSEIGSIKELKSGYLSGVIYEIARMMIKYNAIVVMEDLNGGFKRSRTGIEKQVYQKFEKALIDKLNYLVFKNESDWSAPGGLLNGYQLTEHLESFSKLGRQCGWLFYVPAAYTSKIDPSTGFVSLFKLKDYTNSEKRKAFFENFKSIVYQAELDAFVFAFDYKKFKDVQSCWQSSWEVCSAKRRLVYSSRSQQIEEVNPTQLIKRALDKRDVALSDGFDLKHYISTVEAVDENAAFFKALLDAFGMTLQMRNSSKTEDYIESPVLNSKGLFFDSRKADENWPQDADSNGAYHIALKGLLCLKKGKVDLKLKDWFEFVQRRDFMVK

SEQ ID NO: 782 - protein, 1312 aa, Unknown
  Description of Unknown: uncultivated organism sequence
  Category: MG59 effectors
  Description: MG59-3 effector
MKHHHALFAPISDSSGSAEAAPKSIRDFTGLFAVSETLQFELRPLDADFKPKSPELALADMDKYLEKDRERAGQYSNLKLILDEEHKKLIERVFSDVSASIRRLPASASGRKLLNDAGTGICWSKLAEAERQESFEKVQESFRKLIAELLNTDEKKKSLLEATPSKYIKGMLSSPDLSDSDRKTLSAFEKFACYLKGFQENRANLYSDEAKITAISNRIVNQNFPKFLIGCQIMKHIGEQYPEIIQSAERNLASILHGLSLKDVFRPDAFDRCLSQSGIDAYNNLLGGFTADGGAQKIQGINETINLYRQQHPDVVKKDKLFAPLPSLFKQILSERSSISYIPEMFDSDHAVCETIRTFLAEADLAKALQSITDLLSSIAPDDSGVFVTANELNWISNKVFGAWNMIERALDNYAETLKTKKEQEKWLKKKYYSLAELGALDFRAITTEDAAIPAVADFWRGQVFGQTAATLTNAVAEVQSVLNSPAYLPGNRDPLMRENADDVKRIKALFDSLLDLLHFLKPLRVDAPDANQVFYTGFNAVYDRLDTVVPLYNRVRNYLTRKPSEMKKTKLMFDCATLADGWDRNKESSNNAVLLLKDGNYYLAIIQPAKSRTDRKVDFASLESDRQGDCFRKMVYKYLPGPNKMLPKVIFSDRNRDLFAPSAELKRKYDAKMHTKGDNFDLGFCHELIDYFKACIAKHEDWSKFGFKFSDTAKYRGIDEFYNEISAQGYKMSFTPIPASSISDLIRQDKILLFQIYNKDFAPGATGRPNKFTLYWKQLFDEKNLNDVVFKLNGEAELFLRDPSIRKPFRHRKGEKLVNRTQKDGTPIPESVHRELCKLANGQLNESALSPEARSIWLSGQALVKTATHDIVKDRRFTVPKILFHVPITINFKSPDGKYGINQRVNDYLRGNSDVKIIGIDRGERNLIYITLVDQSGRILLQKSFNTIPQKRPDKTIELDYHAKLDLREKERDEARKNWTEINRIKDMKAGYLSQVVHEIARLMVEHNAIVVMEDLNAGFKRGRTAFEKQVYQNFERALITKLNYLVFKDAEESAPGFVRKGLQLANFFDSFEKLGKQSGFLFYVPPSYTSGIDPATGFVSLFQFGKYTNAAARKQFFESFESIRFDAGRNAFTFEFDYSKFPVPKNSEPSKVRRWTVFSVGDRIVHRMKDAQTVKPTAVILGELQKRGIQVTDGFDLLEYIRGTDADSRNASFFNAIFDAFRWTVQLRNSDKENDYILSPVLSPDGTFFDSRKATDGMPKDADANGAYHIAMKGLYLLQNRFPATDSKKIDLFISNRDWLDFMQTRSRAN

SEQ ID NO: 783 - protein, 1317 aa, Unknown
  Description of Unknown: uncultivated organism sequence
  Category: MG59 effectors
  Description: MG59-4 effector
MKHHHALFAPNSDSSGSAEAAPKSIRDFTGLFAVSETLQFELRPLDADFNPKSPELALADMEKYLEKDRERAAQYSNLKSILDEEHKKLIERVFSDVSASIRRLPASAPGRKLLNETGTGILWSKLVEAEGQESFEKVQESFRKLIAELLNTDEKKKSLLEATPSKYIKDMLSSPDLADSDRKTLSAFEKFACYLKGFQENRTNLYSAEAKITAISNRIVNQNFPKFLIGCRIMAHIWKQYPEIIQSAEKNLASILHGRSLHDVFRPDGFDRCLSQSGIDAYNNLLGGFTAEGGAQKIQGINETINLYHQQHPEEVKKDKMFAQLPSLFKQILSERSTISYIPEMFDSDHAVCEAIRTFLAEADLTQTMQTISDLLNSITPADSGIFVAANELNWISSKVFGSWNQIERALDDYAETLKSKKEQEKCLKKKYYSLAELGTLDFRSLTAEDAAVPAVADFWHGQFFNQTADAVTNAVAEVQSVLNSPDYQPGNRDPLMRENADDVKKIKALFDSLLDLLHFLKPLRVDAPDADQVFYTGFNAVYDRLDTVVPLYNRVRNYLTRKPSEMKKTKLMFDCATLADGWDKNKESDNNAVILLKDENFYLAVIQPAQKKVDGKREQKVDFAKLETTDSGACFRKMIYKYLPTPSRMLPKVVFGKSNEALFHPSAELLRKYRADMHKKTSPNFDLGFCHELIDYFKACIAKHEDWSKFGFKFTDTAKYRGIDEFYNEISAQGYKMSFTSIPASSISDLIRQDKILLFQIYNKDFAPGATGRPNKFTLYWKQLFDENNLNDVVFKLNGEAELFLRDPSIRKPFRHRKGEKLVNRTQKDGTPIPEPVHIELCKLANGQLNENTLSPEALSIWQSGQAVVKAATHDIVKDRRFTVPKFLFHVPITINFKSPDGKYGINQRVNDYLRGNPDVKIIGIDRGERNLIYITLVDQSGRILLQKSFNTIPQKRPDKTIELDYHAKLDLREKERDAARKNWTEINRIRDLKAGYLSQVVHEIAKLMVEHNAIVVMEDLNAGFKRGRTAFEKQVYQNFERALITKLNYLVFKDAEESAPGFVRKGLQLANFFDSFEKLGKQSGFLFYVPPSYTSGIDPATGFVSLFQFGKYTNAAARKQFFESFESIRFKAGRSAFAFEFDYSRFPVPKNAEPSKVRRWTVFSVGDRIVHRMKDTQTVRPTCVILGELQKRGVQVTDGFDLLEYIRGTDEDSRNASFFNAVFDAFRWTVQLRNSDKENDYILSPFLSPDGTFFDSRKATDGMPKDADANGAYHIAMKGLYLLQNRFPSTDSKKIDLFISNRDWLDFMQTRSRAN

SEQ ID NO: 784 - protein, 1276 aa, Unknown
  Description of Unknown: uncultivated organism sequence
  Category: MG59 effectors
  Description: MG59-5 effector
MNNSFTHQYSISKTLSFELRPIGRTEETVRSIFLPQDEKRAKDYFEVKELLDAEHKAFLNHALQNVPNLDWEDLENAHEAYRKSEKSAKDKKVLEEVQGKFRKEIARAFKADGERYAEITATTPSRIFARLIEQHENANEKIPDSLLSFVNFGGYFIWFQNNRKNIYSEEAQSTSAANRAINENFPRFLHDVKTFLHLVENYPSIIKDAENELLELLNGETFACLFDVSSYGRFLPQDGIDLFNQILGGYTKNDGTKIRGLNEFVNLYRQQHKEVQNDKGLLPLIPFYKQILSDRTTLSNRIKPFENDSEVIEILKYMLTDGLAFETESGRIKIGDALKKLFACISNSEGIWIDRRQLSNLSKMMFDSWGTIKTIMESEAVKMFSNEKTEKKKQSAIDKWMRRNAYSLHELFGMKIETDNEERFVDVAAFFQSDALMKHLKSIEEAKAKALVALSVENAENIPLREQEETKQKIQSALDSILELFQFIKPLYVDNSMERDESFYSQFDKIYSALDEFVPFFNKIRNYLTKKHDGSEPIRLMFGNPTLAAGWDKNKELDNTCVLFIKDGLYYLGIMNPKAKTDFSKFAVGDSQDCYQKMVYKFLPEPHKMLPKVFFSEKGKSIYNPPPSLIKKYQLGFHRHGETFDLEFCHELIDFFKKSIGAKTEWQTFNFKFSPTESYDGIDKFYNEIKEQGYKISFENIPVKVIDSLVDDGKLCLFKLWHRDFSDKFTGKPDPYTFYWKAAFSPENLRDYIIKLNGNARVFYRPASIKKPFSHKTGENMLNRRGKSGKAIPGEIYGELFRHFNGDKTPLSAEAQHWIDSGELTIKKATYEIVKDRRFTKDQFKLEVPIVINFKQPESPNNFNEKVNQYLRENTDVNIIGLDRGERNLIYLTVVNQNGDILEQRSLNSIGNTNPNGTEILTNYKEKLSDIEKERQQQRKSWQSLSAIADLKSGYISMVVHEIAKLMIKYNAIVVLEDLNVGFKQTRTKVERQVYQNFEIALIKKLNYLCFKDKKALEVGGVLAGLQLANKFETFEKVGKQTGFIFYVPAGYTSKIDPTTGFTNLFNTKKCTNAQATQRFFNSFDSIIWDEKSKSFALAFDYNNFKTGIKSPRSKWVVYSAIRRLVFSKEKKSTVELNPTQIIIDAVKKMGLALTDGFDLKAVLSNLEPSRENAWFFRSVFYAFDKTLHLRNSNEIEDYIESPVLNAAGEHFDSRNAPKSLPQDADANGAYHIALKGIMLINSIRSSEKPNLAIKNEDWFKFAQELAERKIGGIAK

SEQ ID NO: 785 - protein, 1255 aa, Unknown
  Description of Unknown: uncultivated organism sequence
  Category: MG59 effectors
  Description: MG59-6 effector
MTKMTDFTKLYQLSHTLKFELRPIGKTSENLQNSGLLEEDFKRSQDYVEVKLVLDEVHKKFLQDVLSDCDLSWQELADALKIFQVNKDRKVLEDVQKKYRKLLVDRFNKNKFFKTLTEATPSKLFKSLLAEPDMAERKVETFKRFACYFKGYQETRKNIYSAEAQQTAAAYRAVNENFVKYLRVVELYENFRKNFPELAEEIGRRTAELTDGELSQILRIENYNRFIAQSGIEYLNSLIAQINSAVNLYRQAHNVKLSFVPLLFKQILSDREQAFSLERIEKDADLDEKLRAFCERHIGNVEIRGETGDLFSRLKVLLTTLNDDCELYIDAASLSAIGNALTGNWSCFRDAMAAYANETLKNKSLREKYCKQPVYSFSEIKSWRVVRTDDDGNVQPVCLSDYWHGEKTLELFAAEKILRNRILEMVRVPHDKNFRERKNDVALVKDYLDAVVEILHLLKPLNVGSENGGDLDLLGTLTEFYEALSPVIPLYNQIRNYVTQKPSDIGKIKLMFNNPTLADGWDLNKEKDYTAVIFCRNGMYYLGIMNPKSKTDFNSLATDSSSDCYQKMVYKQLQNPNQMLPKVFFSAEKIKFFAPSEELLRRYKAGEYKKGEKFDLAYCHELIDFFKRSIDRHEKWSKFEFKFSETSAYSGINEFYREVAEQGYKMSFVNIPVKAVDQLVEDGKLFLFQIWNKDFLEKSTGTPNKFTLYWKALFDRQNLSDVVFKLNGEAELFLREPAITEPVVHRSGEKLVNKTVVAAVDGNGVAIRNSIPDSVYMEIYNHVNGMEDGTLSPAAREHLNRFPRLDWEPGMGLEATVKRTVVKDVKFQLVKDKRFTERKFSFHVPITVNFKSPGLKGAKLNEMVWEFLKDNPDVNVIGIDRGERNLIYVNCIDQKGRILLQKSFNIVGGFDYHQKLDLREKERGQARKSWTEIGTIKELKAGYLSGVVYEIARLMVEYNAIVVMEDLNGGFKRSRTGIEKQIYQKFEKALIDKLNYLVFKNESDWHVPGGLLNGYQLTGPLESFAKLGKQCGWLFYVPAAYTSKIDPSTGFVSLFKLSNYTNTEKRKAFFENFESIVYQAERDAFVFAFDYKKFKDVQSCWKTSWEIYSAKRRLVYSSRSRQIGEINPTRFIKRALDKRGVVLSDGFDLKHYITSVEAVNENAAFFKDIFDAFGTTLQMRNSSGEEDYIESPVLNENGQFFDSRKAGKEWPRDADSNGAYHIALKGLLRMKSGQTAKLKRLDWFEFVQRRGFITE

SEQ ID NO: 786 - protein, 1255 aa, Unknown
  Description of Unknown: uncultivated organism sequence
  Category: MG59 effectors
  Description: MG59-7 effector
MTKMTDFTKLYQLSHTLKFELRPIGKTSENLQNSGLLEEDFKRSQDYVEVKSVLDEVHKKFLQDVLSDCDLSWQELADALKIFQVNKDRKVLEDVQKKYRKLLADRFNKNKFFKTLTEATPSKLFKSLLAEPDMAERKVETFKRFACYFKGYQETRKNIYSAEAQQTAAAYRAVNENFVKYLRVVELYENFRKNFPELAEEIGRRTAELTDGELSQILRIENYNRFIAQSGIEYLNSLIAQINSAVNLYRQAHNVKLSFVPLLFKQILSDREQVFTLERIEKDADLDEKLRAFCEQHIGNVEIRGETGDLFSRLKVLLTTLNDDCELCIDAASLSAIGNALSGNWSCFRDAMTAYANETLKNKSLREKYCKQPVYSFSEIKSWRVVRTDDDGNVQPVCLSDYWHGEKALELFATEKILRNKILEMVRVPHDKNFRERKNDVALVKDYLDAVVEILHLLKPLNVGSENGGDLDLLGILTEFYEALSPVIPLYNQIRNYVTQKPSDIGKIKLMFSNPTLADGWDLNKEKDNTAVIFYRNGMYYLGIMNPKSKTDFDNLATDSSSDCYQKMVYKLLPGPNKMLPKVFFADKNIDFFAPSEELLRRYKAGEHLKGEKFDLAYCHKLIDFFKRSITRHEEWSKFDFQFSETSAYAGIDEFYREVAEQGYKMSFVNIPVKAVDQLVEDGKLFLFQIWNKDFSEKSTGTPNKFTLYWKALFDRQNLSDVVFKLNGEAELFLREPAITEPVVHRSGEKLVNKTVVAAVDGNGMAIRNSIPDAVYTEIYKHVNGMEEGTLSPAAREHLNRFPRLDWEPGMGLEATVKRTVVKDVKFQLVKDKRFTERKFSFHVPITVNFQSPGLKGAKLNEMVWEFLKDNPDVNVIGIDRGERNLIYVNCIDLKGRILLQKSFNIVGGFDYHQKLDMRERERGQARKSWNEIGTIKELKAGYLSGIVYEIARLMVEYNAIVVMEDLNGGFKRSRTGIEKQIYQKFEKALIDKLNYLVFKSESDWHVPGGLLNGYQLTGPLESFAKLGKQCGWLFYVPAAYTSKIDPSTGFVSLFKLSNYTNTEKRKAFFENFESIVYQTEQDAFVFAFDYKKFKDVESCWKTSWEVYSARRRLVYGRRSRQIEAINPTRLIKRALEQRGVVLSDGFDLKHYITSVEAVNENAAFFKDIFDAFGTTLQMRNSSGEEDYIESPVLNENGQFFDSRKAGKEWPRDADSNGAYHIALKGLLRMKSGQTAKLKRLDWFEFVQRRGFITE

SEQ ID NO: 787 - protein, 1255 aa, Unknown
  Description of Unknown: uncultivated organism sequence
  Category: MG59 effectors
  Description: MG59-8 effector
MTKMTDFTKLYQLSHTLKFELRPIGKTSENLQNSGLLEEDFKRSQDYVEVKSVLDEVHKKFLQDVLSDCDLSWQELADALKIFQVNKDRKVLEDVQKKYRKLLADRFNKNKFFKTLTEATPSKLFKSLLAEPDMAERKVETFKRFACYFKGYQETRKNIYSAEAQQTAAAYRAVNENFVKYLRVVELYENFRKNFPELAEEIGRRTAELTDGELSQILRIENYNRFIAQSGIEYLNSLIAQINSAVNLYRQAHNVKLSFVPLLFKQILSDREQVFTLERIEKDADLDEKLRAFCERHIGNVEIRGETGDLFSRLKVLLTTLNDDCELYIDAASLSAIGNALTGNWSCFRDAMAAYANETLKNKSLREKYCKQPVYSFSEIKSWRVVRTDDDGNVQPVCLSDYWHGEKALELFATEKILRNKILEMVRVPHDKNFRERKNDVALVKEYLDAVVEILHLLKTLNVGSENGGDLDLLGTLTEFYEALSPVIPLYNQIRNYVTQKPSDIGKIKLMFNNPTLADGWDLNKEKDYTAVIFCRNGMYYLGIINPKSKTDFNSLATDSSTDCYQKMVYKQLQNPNQMLPKVFFSAEKIKFFAPSEELLRRYKAGEYKKGEKFDLAYCHELIDFFKRSIDRHEKWSKFEFKFSETSAYSGINEFYREVAEQGYKMSFVNIPVKAVDQLVEDGKLFLFQIWNKDFSEKSTGTPNKFTLYWKALFDRQNLSDVVFKLNGEAELFLREPAITEPVVHRPGEKLINKTVVVAIDGNGVAVRNSIPDSVYMEIYNHVNGMEDGTLSPAAREHLNRFPRLDWEPGMGLEATVKRTVVKDVKFQLVKDKRFTERKFSFHVPITVNFKSPGLKGAKLNEKVWEFLKDNPDVNVIGIDRGERNLIYVNCIDLKGRILLQKSFNIIGGFDYHQKLDLRERERGQARKSWNEIGTIKELKAGYLSGVVYEIARLMVEYNAIVVMEDLNGGFKRSRTGIEKQIYQKFEKALIDKLNYLVFKNESDWHVPGGLLNGYQLTGPLESFAKLGKQCGWLFYVPAAYTSKIDPSTGFVSLFKLSNYTNTEKRKAFFENFESIVYQTEQDAFVFAFDYKKFKDVESCWKTSWEVYSARRRLVYGRRSRQIEEINPTRLIKRALDKRGVVLSDGFDLKHYITSVEAVNENAAFFKDIFDAFGTTLQMRNSSGEEDYIESPVLNENGQFFDSRKAGKEWPRDADSNGAYHIALKGLLRMKSGQTAKLKRLDWFEFVQRRGFITE

SEQ ID NO: 788 - protein, 1255 aa, Unknown; identical to SEQ ID NO: 786
  Description of Unknown: uncultivated organism sequence
  Category: MG59 effectors
  Description: MG59-9 effector

SEQ ID NO: 789 - protein, 1255 aa, Unknown; identical to SEQ ID NO: 786
  Description of Unknown: uncultivated organism sequence
  Category: MG59 effectors
  Description: MG59-9 effector

SEQ ID NO: 790 - protein, 1280 aa, Unknown
  Description of Unknown: uncultivated organism sequence
  Category: MG59 effectors
  Description: MG59-10 effector
MFKNFVGLYKMSKTLRFELKPVGATLANMKKSGVLERDFVRAEKYKMMKDILDLQHKALLERTLSSVDNFTRCMGEKERKKYAVILAENGVLNWEILAKAFEDFRTSSKDKESRDKLESVCASYRTLIAEIIKSDDKYKCLAASTPKDFIKEFLANEGSGDAAEKLAVETFNGFACYFTGFQENRSNIYSDKAQKTSAANRAVNENFPRYLKCCSLYDYVVKKYPDIIAEVELALGEKAKEFSASKCLTVGKYSDFLSQRGIEKINTLIGIFNQQINLKKQSDESARQDKKLGQMPVLYKQILSDRESASFSIEKFESDADVFSSIKNFGEFLKNNNVLTKLYNLIATVRIEDTIFVKRESLSEISNNLYGDWHELSAAIERVAEEKFSNITAKGHREKAIKQWISRNEYPLTDFVDAVRYDEKNNNWVTIDICDYWKNEKSKVLFELVESSWKALLPILDTDEKIGLRDRKDDVKAIKEYLDSILNVIRLVKPLSVGAELERDTDFYGQFDELYDILDDVVPLYNQARNYITSKPSEEKKLKLMFDSPTLADGWDQNQEEANKAVLLEKGGQFYLGIVNAKLGKKERPDFLKLRSRDSSNCYRKMVYKLLPGPNKMLPKVFFSNKGLPIYKPSPRLLERYKNGDYKKGATFDLQFCHQLIDFFKKSIAIHPDWSKFGFEFSPTSSYGGIDDFYREISNQGYKISFDSIDEKVIDSFVDSGALYLFKLHNKDFSSGSTGRQNLHTIYWRMLFASENLEDVIYKLNGEAELFYRRASIKNPYIHKFGKKLVNRIDREGKRIPDVAFGQLVKFADGEIAVGELSGVAKDLYDAGKVVMKDVKHEIIKDRRFAEDKFFFHVPITINAKANDKASRFNDFVNDAVRNFEDVNIIGIDRGERHLLYVTVIDNNGKILEQRSFNTIDIDRYDGKRIDVDYHAKLDQMEKDRDKARKSWSEIGKIKDLKSGYLSMVVHEIAKLMVKYNAIVVLEDLNGGFKRGRSAIEKQVYQKFEKAMIDKLNYLVFKDSEPLCLGGSLRGYQLADKFESFEKLGKQTGFIYYVPAAYTSKIDPTTGFTNIFDFKECTSAEGIKRFFNLFDSIKYSETDKAFIFAFDYNKFNTRFPSWNSKWEVYSASRRLVYSKDQKTDVEINPTDVIIDALVKRGVAITDEFNLGLYLKEMDATRENASLFKSVFYAFERTLQMRNSSAKTGEDYIESPVKNSSDGFFDSRKCGKELPENADANGAYHIALKGLMMVNELKTNETPKLAIKNEAWLEFVQRMRK

SEQ ID NO: 791 - protein, 1262 aa, Unknown
  Description of Unknown: uncultivated organism sequence
  Category: MG59 effectors
  Description: MG59-11 effector
MAKNTKLSQFTGLYPVSKTLRFELKPMGKTLEKIKETGIIENDKKRHNDYFDAKKIIDKYHKYFIDAALSKFPRIDWNPLKEAIERSLDRSDASKKKLEKTQTEFRKKIAKALTTHDHYKELTASTPKELFLKVFPDHFGKQPAIDTFDGFSSYFTGFQENRQNIYSDEAISTAIPYRLVHDNFPKFLSNIEVYKTLKDNAPSVLSDAENELKDFLNGKSLANIFELNAYNDVLTQSGIDFFNQVIGGISGEGGEKKTRGINEFSNLYRQQHPEFAQKRLATKMIPLYKQILSDRETKSFILESYSTDSQVQESVKEFFESQILNCDIAGRKVNVLKELSSLIKRITEFDLGSIYVNQEELSNISLELFKSWNTINAILFKNAENRIGSAEKAANKKKIDAWMKNNEFSIATLNLAIAESDSEEISRVKIESYWNNFEAKVQSILCGDNRRNLDEFLSATFNENNALREDSKIIEKLKAFLDALIEIMHSIKPLISDAENRDLSFYNELTPLYDQLSLVVPLYNKIRNYATQKLTESEKFKLNFDNPTLADGWDQNKEDANTAILLLKNGLYYLGIMNAKNKPKIKDFKTSESEDCYDKMVYKLLPGPNKMLPKVFFSEKGLATFKPPKDILDGYNAGKHKKGDLFDIGFCHQLIDFFKESIAKHPDWKKFDFNFSDTSSYEDISGFYKEVTDQGYKITFSKIPTFQIDEWVNEGKLFLFQIYNKDFAPGAKGSPNLHTLYWKSVFSPENLKDVVVKLNGEAELFYRPSSVKKPYSHKVGEKLVNRIGKDGLPLPESVFGELFRYFNGKLDGELSDEAKRYLDVAVVKDVKHEIVKDRRYTQDKFEFHVPLTLNFKADSKNEYMNERVRQFLKDNPDVNIIGIDRGERHLLYMTLINQKGEILKQKSFNIVESVNYQAKLVQREKERDAARRSWSSVGKIKDLKEGFLSQVIHEITTTMIENNAIVVLEDLNFGFKRGRFCVERQVYQKFEKMLIDKLNYLVFKNKPEGDVGGVLKGYQLAEKFDSFQKLGKQSGFLFYIPAAYTSKIDPTTGFANLFNMTELTSAEKKKEFLSHFKDITYDGQNDRFSFSFDYKDFKCFQTDYIKKWTVYTQGKRIVYDKESKSAKEIFPVEIIKAALEKQNIALTDQLDVLSVINSVEASSKSASFFGDICYAFEKTLQMRNSIPNTDEDYLVSPVMNKRGEFYDSRSCGDTLPKNADANGAYHIALKGLYLIKNVFDAGGKDLKISHEDWFKFAQSRNC

SEQ ID NO: 792 - protein, 1271 aa, Unknown
  Description of Unknown: uncultivated organism sequence
  Category: MG59 effectors
  Description: MG59-12 effector
MFEKFTGIYKVSKTLRFELKPIGKTAENMKKFNVLESDRVRDSQYERMKDILDAQHRALLERTLERVGKEEDVEDWVKLAEAYRKFRVGKKDKAARASLDKVLEAMRKSIVAAFGEDDLYKELVTESTPSKFIKRLVKDEMFKDSDEGRALDTFNGFACYFTGYQENRRNIYSDKPQTTATAYRAIDVNFPKFLDAVEVVRHIQDEYPKIIKLVEDELGDKLGGKRLATIFSVESYGSYLSQTGIDFFNLVLGGYAPKVGEKKRGLNEFINLELQQNECAASDAKLHKVAPLFKQILSDRESESFRFVAFEKDCDVIDAVKDFANRLEGDEIVGRLRKKLATLTKSEKIYVNGDASLTMVSKNLCGNWGALESCMRDAAEAKYKVLGTEKKIAKAVEEWMKSKAFALADLPDVTVADDKSEDGVKVYRVLDCWRGEPATAIFEALVTASAAVKGLPDNADDDEATLREDSKRVAVLKSYLDAVQDLLHLVKPLAVSAELDRDMNFYSEFDELYERLDEVVPLYNKVRNYVTKKVGEVEKMKLMFDCATLGDGWDLNKEQSNRCVILVKDGAYYLGIMRPRCKVSLDSLQSNSGADYKKMVYKYLPGPNKMLPKVVFSEKGKAKYKPSKELLDKYDKKCHIKSSPAFDIDFCHQLIDFFKDAINKNNDWSVFNFKFSPTKSYASIDGFYKEVTEQGYKIDFINVAIKDIDALVDRGDLFLFQIYNKDFAEGAKGRPNLHTLYWNAVFSPENLLNPIAQLNGGAELFCRPAAIKTPYAHEVGEKMLNRWTTAGEPIPETVFGELFKYINGRLSEIKLSAEAKSLLERKQLIIKPVKHRIVKDARYTCEKFFLHVPVAFNAFAGETYRFNDCVNAAVAANNNVNVIGLDRGERHLIYLTLINQKGEILLQKSFNTITGAAYDGHVREVDYQKKLTAMEKGRDAARKSWSEIGQIKDLKAGYISLVVHEIVSLMLKYDAIVVMEDLNFGFKRGRFKVERQVYQKFEKALIDKLNYLAFKDADTTSPGGVLKGYQLAAKFESFEKLGKQTGFVYYVPAGYTSKIDPTTGFTNLFNTKKCTSAAGIAEFFSRFDAITYDAGRNSFAFKFDYSNFKTSQTSWKKDWIVYSADRRLVFDVKTRVETEIHPTQIIFDALKKAGEKVADGYDLRAFLASVEPSKSNATIFRDIFYSFDRTLQMRNSCAATGEDYIASPVMNASGKFFDSRESGDDLPKNADANGAYHIALKGLYLVKNRLGKEKIDLKLTHEQWFEFVQNR

SEQ ID NO: 793 - protein, 1128 aa, Unknown
  Description of Unknown: uncultivated organism sequence
  Category: MG60 effectors
  Description: MG60-1 effector
MVNLESFKNLYEVRKTVRFELKPYKKTREILKWDNNYQSLDSYIKHIKDWEFEDGFDWNDFCLWKYEDFLKESKKYYWFLLQINAEIQKWRNETTKKNIYFDFKKSKGIFKNIPSLKKIQWFEWLKSKLLEIQDEYQNYFNFFDQLQDKQHKNEKKSDISIHLRKIAYLNRNLFTIFNFFDIYKTHKEILDEYKEIIDYDFEKLNNSIIASHENEISGACFWKFTFNKFALFRREASPLKENFEANKQVLQKAVATMVENGEIVNDNWTIAGINTNQIHSLTLQKKNCYSLKFEEEIWTLQGRLEKFNFNRNLDEVISELDDINGQLLNQYIQNFVNGYKNDENVLEVSFYTDHEGNKIFDKSKKYDSYENGQKKEKFYPSLVKLDLEQFVEAQKRNQIKIQPGQTLKWYQYLNLLWKADLTDEEKEQKKIVNKFLQILFKQKFINPDYNTIKEFRDTLAKHRWKLRQNVRTSEREFIQEAMVRYYGQILEKNGCYFVALFDKDKLQNDIKNIVTDSQIKDKWMEGNYFKIYKYSQLSFSALEKLCLSKDWDLLSNSSLQKAWDKYKNQKKDIEWRCDFHKNWQDKSCTSCKSNEMQMRRSFLKAFKMHILQALEKLKNDEKYKWEDWSYLYWELKQKNSVEDIVSFINQKFYKLEEKYIEQEEVFKLADTWEILLFQVYSKDFNIFNSDFVSDEENLRDYEKDTWESQKTIGTSKREDGKQENLFTTYFKNIFKDDWETFLGQEWGIFFRKADSESDKKRFRSDKFFISLDILFNKGKQNNNAKLCESKEEKSKKHVKNTTLNIFNSIKNKDEITIMWIDRGSLSDELSVKNTKISMLWYVIITLRKEDKQYVLKEIKKSWDINWFIRGKGGGWKIVGKGQNMSSETNAKDYIDFKKILSNLKEEIQKELEKNNVKRNILKIIDKKEWITSLLISAISQLIQEYNVDYIALENLDNIYEDDKSFKKIMEERTLSTYLYQNLEVQLFKKLNYIYLKNEKVQDRQIFPICSIDEVKNLDSKNFFKIKESSNYDDYKMIWNIVFVKTSGTSSTCFNCENTIKKHGVVCKNCKISVKHDGSKLDLKDYKAKFVSKNILEKQNIQQDFNNDARAWLYIAKKAKEYLEYLFSH

SEQ ID NO: 794 - protein, 770 aa, Unknown
  Description of Unknown: uncultivated organism sequence
  Category: MG60 effectors
  Description: MG60-2 effector
LVKESKNNKNIKLFNLAYEWPLLNFVNENYRISNLEKKYLNLVQKLLIDLKDKDYKIWKNHKTWKYNLKNLSFLWDNFGLWDNSENKKIKNLEDLKIYFNDSWYKVIQKDVDLEKILKQVKAWELEIFQIKSKDMPFHKDFINDKNCWIIEEAKNEKSDGFKKDLNTLYFEQFFQDIAEWNKKTRIGADFKIRWINSSENNDYGSFWGKEKNQLRHLSNKENIEKFQNRFKRDRYSIEFSINLNATNHLTEEDFNTELSNKLKEKRETWSLRILSLDHGESSFLTYKIFEFSGENLEDIQIINTWWNFDNFQQEWNWPNRLQKNIQIDEKLVSYEGQEILDNYITKYHLMIQDQKRERQVEEAIKHFAKKSISKIKEIISADTVDKNKEWVSDMTKENVKKFIQYTIGYKEVFSLSNEENSIRNKNKGSNKSIENKKNGVEYSKRIEEFFQNKRLDVISLWEDTIRFDKINIFHILDYEFHFSYIKQEEWFIQKFPDQENIKEKIDTYLKQIQELLHDESKLIAFCNEVKKSFDWVSLADIDKLYNTPFYSYKTNFSLQLEQINNLKKWYVSALIGTISKWVRNWDVDVIALENNLLYYGVDNSKSFQKHMWAENHATFVEALINKLSFCLDKETNESYQFCYPIKVAERSQKFKNKNNGILIFVDEGITSLICPKCGQKLNRSKQDGDDHLHHNDKNPAWDKCQKEPFEIQKSKNIVGEYQGMRFHDWDDLATYNIAKKAKEYLESLPKKEDSEWSWKISGNITFTQSK

SEQ ID NO: 795 - protein, 1122 aa, Unknown
  Description of Unknown: uncultivated organism sequence
  Category: MG60 effectors
  Description: MG60-3 effector
MEDLKNLFEVKKTVRFELKPYIETRKYLKWNNDYSTLNSYISHIKMEEFEKWFDWNEFCKSQYSDFLDKTEYISEFLEEVINELNKKNNDKKRKSIQFNFKWFKWVFKNIPSLKNIESFPRLKEKIEEMTESYKSSITFFDFKKDNDDKQSNQKQSDVSKELRKLAYLNRNFLTIFKYLWSNNGNETDEGILKKYEEVKNKLWENFKKLNSSIIASHQNETSGACIWKYTLNKYSLFRRETRKLKEKSRKSKKAIDKDVDFIIKNWIYDDKWFEIKLKKEDITNITLKTDFSDNFEKHIESLWLQYKLENFNFNRSLDEVIEELDLINAQLLNTYITYFKEEYEEFWESLLDIEFQTEFKIDNEWNNKPFNIYNNKSKPPKIRKLWYFSNEEGKYITLNQWQTLEWYEYLNLLDLEQKDLTDEEKYQKKLANKFLQIIFKQDFINRDYNNIKQFRDKLSKYRGKLRQDVKNSEREFISEGMIRYFWSILEKDWNYFLALTEKVDINWENKIDSIENIEIENTLNDNCIEWYFKIYKYHQLSFSAIEKLCLLKDWPDADNEKLIKYWDKYKYQKKDFKDYKDKSDFLSLFKKQIIDLVYLLKSDNKYNWYDFSSFLPKIEKFNSVEQIIEFIDHNFYKLEEKYISEEKLFKLADNKDILLFQIYNKDFNIYDEIFLSNEENIKEEKYSEKRKLLEIIDRKKDAKPNLFTLYWKDIFKNEAFLGQEWGVFFRKADLEKEEKRFRNNKFLVSFDVRFYKWKTIWDVKICDKKAQKTEKSYKKITLNYFNEIINKDKITILGIDRWSISSAINEKTKIAMLWFCVITLKKEKSNYILEDIVRTWDINWLIKETIKERNVNYIEFWKPVKKASGIKIDIDFKNVLLELKNNIMQEIEKKWQDRRDLQRILDKKIWLTSFLVNEIQKVIVEYDVNYVALENLDNIFNSTNKISFKKELEINTLSNYLYQNFETQLLNKLQLFTTKTNYNNKKQFIPNFKIDELKELPSNNWFLHTKTWKTIEHDFKDFKILWNTIFVWTAGTSSECFNCWEKIKKHWLICKNCNIDDRLKLKDYQENFVSKSILQNMDLQSDSKWKKLFNNDVRAWLVIAKKAKEYLEFLEKQKNNNS

SEQ ID NO: 796 - protein, 1165 aa, Unknown
  Description of Unknown: uncultivated organism sequence
  Category: MG60 effectors
  Description: MG60-4 effector
MLQFADLKKKQITICQKLIPIGKTRENIDTFNAMANDEYVSDNKNEIKKLIKEMARFEIDEKLSNIKGSLDFTNLFTLMNKVDESENKEEILQELFFERAALAKTISSELNFKYTSAKTITEKLPKFISNNYDGDEKEKYLELVDKVKSRQAMFNRFEESIDFIAGELIKKNTLVYRLLVENSQIFLSNYKRIKEQDISSIITNLDVDDSIKTVLQNQCISFTPDNYNELLTQAKIDKYNYCISMINSELNVFCSVNKLSYSSYELKKLYKMILCEKDLLFEKINKFTDDEQVIDTYNDFITNVNDSNLFEKINSSAMDYDNIYIRPNFINAYSNITYGKWNIVSDCIKAHVEDLRLAGKNKITYEKYVENISIVKIDTIVNDYSSELGVKVNGRDYIEIIKEQLLHKYKEVTNDNISLKSDASIVSETIRKELDYALGTIRLLKLFDFENENFNSANEMALNEILDTLNPANLLYNMARNYITQKPSQKSKLNLVFDTNGFAGGWSESVESQKRVTLLKDDEGNKYLGIYNLNGCRANNTSVAAVVKNIQENLDTNSTKYYEKMIYSAVPDAAKDIPRLFINKSENNELIKKFKNKEHKENEEFKNELIEFIKRQIALHPTWSKYEFVYKDNYGSYKDFCNDINKQGYMLNWEKIDKSIIDNYVESGCIYLFRIHNNDYSKYKKTYSKVKAHTQYLDYLFSDENSKTKLIKLLGGAEVFYREPQIKNPYMHKKGSVLVNKKYKNGSPIGNEYKDLVIKAQTTALDNVFTKVSSRYIVKDNRYRKEQFELHFPILIGEERATDYEKICKNYIKNSNHTIVIGRGKNHLLYVSIYENNKVINAFPLDTVNGTNFKAKLEQIEELKNEQRKTWKNISSNRELLNGYVSAAIAPITDMVLKYKATVVIEIGDSSSKSRNLLPNRAYKIFKEALMKKLAFLTDKNKEMDEPGGLLHPYHLVNIDTRNPNRSINAAQNGIVMQVPAFYCALTDPESNLCNLTYAKTLKEKKQVLKKIGEIKYNKDEDIFTFIYDISKFNKDMKGVYECNSNGLRLIYNNNSEEKINLSQYLKNMLQCKSIDYKSGIINYDSEDKESIEAMFLIIRYTLQMLNKTFYISPVTNLTVQSNDCTESMINQNMYNRFLLLKDNLLLNKPTKYLSIKDVYSKLKP

SEQ ID NO: 797 - protein, 1165 aa, Unknown
  Description of Unknown: uncultivated organism sequence
  Category: MG60 effectors
  Description: MG60-5 effector
MLQFADLKKKQITICQKLIPIGKTRENIDTFNAMANDEYVSDNKNEIKKLIKEMARFEIDEKLSNIKGSLDFTNLFTLMNKVDESENKEEILQELFFERAALAKTISSELNFKYTSAKTITEKLPKFISNNYDGDEKEKYLELVDKVKSRQAMFNRFEESIDFIAGELIKKSTLGYRLLVENSQIFLSNYKRIKEQDILSIMTNLDVDDSIKTVLQNQCISLTPDNYNELLTQAEIDKYNYCISMINSELNVFCSVNKLSYSSYELKKLYKMILCEKDLLFEKINKFTDDEQVIDTYNDFITNVNDSNLFEKINSSAMDYDNIYIRPNFINAYSNITYVKWNIVSDCIKAHVEDLRLAGKNKITYEKYVENISIVKIDTIVNDYSSELGVKVNGRDYIEIIKEQLLHQYKEVTNDNISLKSDASIVSETIRKELDYALGTIRLLKLFDFENENFNSANEMALNEILDTLNPANLLYNMARNYITQKPSQKSKLNLVFDTNGFAGGWSESVESQKRVTLLKDDEGNKYLGIYNLNGCRTNNTSVAAVVKNIQENLDTNSTKYYEKMIYSAVPDAAKDIPRLFINKSENNELIKKFKNKEHKENEEFKNELIEFIKRQIALHPTWSKYEFVYKDNYGSYEDFCNDINKQGYMLNWKKIDKSIIDNYVESGCIYLFRIHNNDYSKYKKTYSKVKAHTQYLDYLFSDENSKTKLIKLLGGAEVFYRKPQIKNPYMHKKGSVLVNKKYKNGSPIGNEYKDLVIKAQTTALDNVFTKVSSRYIVKDNRYRKEQFELHFPILIGEERATDYEKICKNYIKNSNHTIVIGRGKNHLLYVSIYENNKVINAFPLDTVNGTNFKAKLEQIEELKNEQRKTWKNISSNRELLNGYVSAAISPITDMVLKYKATVVIEIGDSSSKSRNLLPNRAYKIFKEALMKKLAFLTDKNKEMDEPGGLLHPYHFVNIDARNPNRSINAAQNGIVMQVPAFYCALTDPESNLCNLTYAKTLKEKKQVLKKIGEIKYNKDEDIFTFIYDISKFNKDMKGVYECNSNGLRLIYNNNSEEKINLSQYLKNMLQCKSIDYKSGIINYDSEDKESIEAMFLIIRYTLQMLNKTFYISPVTNLTVQSNDCTESMINQNMYNRFLLLKDNLLLNKPIKYLSIKDVYSKLKP

SEQ ID NO: 798 - protein, 1174 aa, Unknown
  Description of Unknown: uncultivated organism sequence
  Category: MG60 effectors
  Description: MG60-6 effector
MNNLVKEQMAGLNKKTLTICQKLIPVGKTRENIDRFKAMEEDEFIKANREKVNVLIKKAAFEKIDNDLGSISKDIDFSDMFDLMGKYLECEGEGIEEISDKLFAERINLSTKLTSVFDFKFEGKDTIKVLLPEYLEKHDMDNKEELLELVEKVKSRQSMFNRYEGHIDSMLENVHKKGKFVYRILYENAIIFYNNIKKIKAFDYESVILNLEDEKNIKNNFLTKGFDSYNGFIRQSQINVYNYCVGAINYELNNYCQKNKLNYDKLELKKLNKMPLAETESFFEKIPTFDKDSDVIDAYNSVVCNINKEKITLDDKKAKSDEIIIKGSSIAKYSYNVYGNWKIVRDCLQLHCSDMVTAAKLKKSEKTLYDEYVNEGISVNLIHNIVTEYAPDLNISCTEVPLTQKIDTLMSGSFSECDYPKVSLKMNDCKEANYIRVTLDRILEARRLLCIYNTESVEFDMEFAELIESYLDILSPAILLYNMCRNYILAKPSARKKTSLTFNCTAFAQGWSEGVEYSKRVSLFKDEKENKYLAIYNALGCKESNMSVTGLVSEIYDNMTTEKQDDCYMKLVQNKTGNVSQALPRLFLNPTLSDEDRARFKAKEYNNDKEFLNHIINVVKTKIAEHETWKKYNFSFKDNYESYAEFVNDIQEQGYKTEWRYIKKSIIDDYVDGGMIYFFRIYNQDYSEFKSSDKLDIQTRYLNYLFSEENCDTDIVKLLANAEVFYREPQITNPYVHKQGSILVNKHYKDGKTVGVEYESIVKNIGDYNNVITKVAKHDIIKDKRYTVEQFELHMPLCIDNIRKETKKYDELSRKYIKESKNIITITKSRNHLLYVCVFDEKRNLLEQRSLDIANNVNYKEKIEIKEELKKINMESWKSVGSNQTIIEGYISCAIKDITDLVLKYDAVVVMEEESANADRNLLKNRNYKKFKTALINKLCYLVDNTKEDFEDGGTFKPYNLCNIEKEKDYKKIWNGIVIQVPAYYLSNKDVDSNFIELADTFANTNIQKKNVVKKFSDLRFNRNTKLFELKFESAKFKEDFKEVFICDSSGNRIVQNKKGVNEVNLTGTIKSELKKIGLEYATGENIFDYVDLKNKNHVTTLHKIIRLILQMYNVGANNSYFYSPVSHSLIRTDKDIYEVITCINLYERAMRVKKKISKDGKVKFKNLADIVIG

SEQ ID NO: 799 - protein, 1035 aa, Unknown
  Description of Unknown: uncultivated organism sequence
  Category: MG60 effectors
  Description: MG60-7 effector
VKDSEIWYAIKIVSKLIIDNDFIKKDTELHNRLSQINRYNPNFWNFFELNTLNPFTVNRWKISEIINSYEISLNQYKETLVNLNKEAYTIANAILSDRYFENCRNQKESDGTVRYLFHIFSNCKNSSEKNVWQINHLILLVNKYESLKNGKKKYTNDEIELKIKRLNKELRQLAKVRSELLWYQIHLIDNFQTEKFSFLIQSWKYYFVWMKKMWWENNLSQFQEFIDGLESGDDKLLYLDSMTWGGFKRLFLSKQSDVVFTDGIRIKDLNRTILAKEEEILQLKKWIIEKIEKDINIYISKVTNDIFNEINSKEKIKFIEYLSQKWKKVDNLFKLWKKNRKQLIYGKELKEFGNSLYNFDSIKEQFNLDKLEKEYSDLVQKLLIKIKDKKYEIWKNNFKSLSFLWDNFKDRKFENLDDLKNYFNDSWYKVIVKNVNLEKILKQVKAWELEIFQIKSKDMPFHQDFINDKNCWIIEGVKTEKGGSFKKDLNTLYFEQFFQDIAEWNKNTRIGADFKIRWINSSENNDYKSFWKKEKNQLRHSNNKENIEKFKNRFKRDRYSIEFSINLNATNHLTEEDFNTKISNKLKEKRETWSLRILSLDHGESSFLTYKIYQVEGNKYSIINQWWNFDNFKEVQDWEDKTTKRQENMQIDEEKVLYKDQKILDSYITKYHAMIQDQKRERQVEEAIKHFARKSISKIKEIISADTIDKNKEWVSDTTKANVKKFIQRSIDKTWNKEKDSIVSVLGKFYFDYNKYSFKKYFPDQENIKEKIDTYLKEIQELLDDESKLIAFCNEVKKSFDWVSLADIDKLYNTPFYSYKTNFSLQLEQINNLKKWYVSALIGTISKWVRNWDVDVIALENNLLYYGVDNSKSFQKHMWAENHATFAEALINKLSFCLDKETSESYQFCYPIKVKDRKKLKDKNNGILFFVDQDTTSLICPQCEGKLKRDKADWEDYLYHNDENLAWDGCEEDPFEIKKSEGKKWEYNWIIFENWDDLATYNIGRKGVLMLEKIKENPEETDLLIRDNDWDGLVK

SEQ ID NO: 800 - protein, 1189 aa, Unknown; identical to SEQ ID NO: 690
  Description of Unknown: uncultivated organism sequence
  Category: MG60 effectors
  Description: MG60-8 effector

SEQ ID NO: 801 - protein, 1144 aa, Unknown
  Description of Unknown: uncultivated organism sequence
  Category: MG60 effectors
  Description: MG60-10 effector
MDKYQLTRTIRFKLKRFNGALQTEVDIAKKSTSDQELEKLLEELSMNMNSYNQRWSDFLYKLHEGKKNRRILNRIQVTPKWLELYARPFLYHKTSRPKHGKPLLTDYHGLPDYIENRLEEWQHLRETLDKLRTRPEHHQARRSEYALLIEKINIPQNFPFFYALADYAQDKDNEKYKNELIVIGERIYSLLSSLRKAYAPAQHTGIEIARASLNYFTINKKPKEYDDEIEQWLEEQNQEYTLADIKSKLSLNPIIIKPDIRDSLPDKATLGEWYSHLKTFKAEQRSALDNCMITSKSIEEWPILFKKINTNKAKELISLTSKITSNANKINNLYQILNDKKKSKRAKDVADKELKTIRNNQIQIKRKRGSIISKAPDFKNFVDAYATIAKENGKIKAKIRGLKKERQDSQLLNYWALLLENCKRHELLLIPRKNRKKVYKILEKLPKTNDKGEASVIYFKSLTLRALHKQIFSEDSTLKQNVVQQLKHDFPEMEGAYSMKDWEESKVVSLYQKVLKYCNDGTLSIDVGDFNIEELVSSSYSTIDKFRIALEKQCYIKRCLIDKSLYQELREREEFHLLSIESKDLNSSKPIQAMNEHTQLWKQFWSADNSKEFFPIRLNPEIKIRFREPKDTRIAKYRKKSGKYEKESGNYNPKKKNRYLHDQLTLEVTISENATGLRQELAFTKPHGLKEALDEYNQSFNKSYYPRNKLDDICFFGIDRGHTELATLLIIKKPNDNQASFQKFTTYRLIDLSHSRNYTTPERVEKTKYAKNNISDFIPDIENEDIFEKRETASLDLTTAKLIKGYIIENGDVNSYLNLKMLSAKRRIWEKHSISKIPEDISISLDQETGYFRFDTEIEEFKNPRKLYYFREELSDYLSEEDIKKELNSYLNKLRTKNQERDLLTLEKINHLRDAISSNITGILAYLLRKKEFIPGILVLEDLNTRLLESHFKDKSNEILGRRLEWKIYNKLSKMNLAPPQIKESTLLREDKKYKVKQFGSVLFVDETGTSNECPNCNKKPTDNFKEKSEKDEQKRLFELNKFQYKKYHCYHCGYDTKTNQMEFTDINNPDDLACFNIAKRGYEYILNPPKPKKTILKKTYSPKGKKQQGRKQAKNPPRTRKKPNKAATHNPFANLKDMMKKDN

SEQ ID NO: 802 - protein, 1143 aa, Unknown
  Description of Unknown: uncultivated organism sequence
  Category: MG60 effectors
  Description: MG60-11 effector
MKTFAYKQQKSLTFGLVTKKNDPFIKDKKNNFTIQCREQEIKFNCDAGDRIYGDNLGGLQRIFHYMQNILHTIFTKEPYHRFTFSYEFTLVERKKLQTGRIAEKALKDKIWRKYEKQFQNLLNNISLFDEILEENENNFSKISHIVRIIRYINGDTQKIEHCISNYTYFGDKIEKKSALEEFKNFIQKNGDFGELLEFYSKLDKEQFEEYKIALNPVILNTHSEVNQQNWTQELDNLKMSLEALERKNNFNKNTKRFFEEDLEAYINYILYQKNFFKQSKNVEYKKNTQRIYEKYSNLSSNARYPEELVIDFIEGNEIDLENPYKVAQEELDKYLQQQESINSLKNLKSNINFVQLKTFLYQLTWKRAEIKENNKKSEEKLDYQKLSEYIVIIKGEINSRLKNTNYRYGEFIKSGGIKAQTAQKLGQKYGEYMQKLNFDKELKGYTHFGFIVKKGKRFFIKPYKKQDILNENQGFTLQNAENLLKEKVDVKGEYTAFLFQSLTLKGLLKLIFIKNAFNLDFRKEYKEIYQIWKQKKYIKDKSQSTKLIDFLIKILASNKGKELFPYVDNDFKKGDQYSKFQEFEKDLLKNSYKVKKYQCNFDENELIELDIVDRKFEYNDAVEPRLKRQNDIQILVEGFFSKQNFSFTRLLPEIKIFVRYQKLFDDMKKRVVSGMDNNGDKYKKEINEKKRFYKSVSKASFMLELNPCEIAGNPQKEKKEYQDYIIDLYKKRKDFHIISIDIGENSFATLGVYNSDLAPQKINVKWLPQQNENQNKDIIDITDLKIEKGEIVQINTKNSEKYKSYKNMFENILRSQIYLKDILEQVGEIDLKNENYNNIAKKIGESINRISELRFNTCNIIDEVKQAFPLLKNGLKQFLFSYIKSLHNGQDKAINITQYYHQIFEKLELQKVINFKDAFGANFVGVMKEILNRYPGIIVFESLHIGNNYDSYNDVIKKRLQNTTSEKSKEFRTFGTYIGMYIVQSLVNSFSKIIDIKNEKVNQLIYWEKNYETTIGKEKYSNNGILFFVDEKNTSSVCPICNGNFIQKIEKNGEVIEQENKYIKKLFGHGRGKEFENSMHHINDENDENYQKGKWKSGNLEKGDCDYHIGNKNYPEFEFIKSGDDLATYNIAKKAKEYLEKKQ

SEQ ID NO: 803 - protein, 1174 aa, Unknown
  Description of Unknown: uncultivated organism sequence
  Category: MG60 effectors
  Description: MG60-12 effector
MQNYKITKTIRFKLEANPEQTEALLNQVEKSNQAFDLVFFTSKLKNFADGMRDYLMFQKGKEPEKWQFRKNFTIKKDWLKVYAKEELANIKQKQKEEQDKKSRRQPIQLNEGAKEIIQKSLGEVYAIYQELIQDVSKELNERARRERTGLLLKRLQEKNNLPLLCDLTEHISSGNETDNSIYELLKEKEMLQKELLQGIAEFLPAQSSGLPIAKATFNYYTINKKPTDYAQKIEEQLKELSISDYSKKIQINSKLFLGNDNFKKVMEDIRNRLKKDNITHLLFGHVPASISLGYEYRSLRQILKNIKAEQKKKFNELMMEDDFTYDKLKKEQDLYLFTSIKKEQFDEYLDKTRKIQELADKINDKSLSKEEKENLTSKKQTIAKKRGELLRDKFIDWKKFMEIYRSVAQKHGKILASLKGIEKEKVESQLLKYWALILKVNAQYKLVLIPRDKVQDAKKWIENHKNNKKTDTQELPQLYWFESLTFKSLQKLCWGHAETDNNEFRKNIISIIPKNKNNKPYTGEHEFEGKEQDKINFYKKVLQDKYTRDVVHLPFAQIDKEIISKNFDTLEDFKITLEKICYRRQVILNQDAEETLTKQFKAQILNITSLDLSRKSNESALKPHTQIWKNFWSDSNEKQHFDIRLNPEITITYRKPKPSRVHKYGKNSQNYDEKKKNRYLNPQFTLVTTMSEHCNAPQKNLSFITEEELKKEIDTFNQKFREKNQIKFAIGLDNGETELSTLGIFVPDFNKNTNEERLAQLRKVQEYGFEALTIKNLNYAERDYNGNPRKMIDNPSYFLNKSLYMRTFIKTEQEYERMFAEQFEKKHLLSLDLSAAKVICGHIVTNGDTRALFNLWMRHAERLIYFANDHIKEETAKKVLIKTIQELLPAEKEKLAESISKEKKYAKLSEQEKLRYFTWLFEDRKLYSFNEEENKKFNDILERKGNYAIGTVFSVTYLGEELVDVKSVFDIRLIFKKREEFYSILSEEEIMKELSRYNTNRTSHDLSNQELDLKLKTYKETIVANAIGVIDFLYKQYKQRFGGEGLIVKEDFDTSKIQEDLERFSGNIYRILERKLYQKFQNYGLVPPIKSLLSLRNQKVALDSIFNLGVVSFANPDKTSQQCPVCLEGKLYHGKKCDKCGFRATMMHSNDGIAGYNIAKRGFNNFQSLLPLKQ

SEQ ID NO: 804 - protein, 1147 aa, Unknown
  Description of Unknown: uncultivated organism sequence
  Category: MG60 effectors
  Description: MG60-13 effector
MKTFAYKQQKSVTFGLIGKEGNPFVKEKKNNFKIKYREQEINFNCDARDRIYGDNLGGLQRIFHYMQNILHMIFAKEPYHRFTFSYEFTLVERKKLQTRRIAEKALKDKIWRKYEKQFQKLLNNISLFDEILEEKEDNFSKISHIVRIIRYINGDTQKLEHCISNYTYFGDKIEKKSALEEFKNFIQKNGDFGELLEFYSKLDKEQFEEYKIALNPAILNTHSEVNQQNWTQELDSLKRSLEALERKNNFNKNIKRFFEEDLEAYINYILYQKNFFKQSKNVEYKNKTQRIYEKYSNLSSNARYQEELVIDFIEGNEIDLENPYKVAQEELDKYLQQQESINSLKNLKSNINFVQLKTFLYQLTWKRAEIKENNKKSEEKLDYQKLSEYIVIIKGEINSRLENANYRYGEFIKRDGIKAQTAQKLGQKYGEYMQKLNFDKELKGYTHFGFIVRKGKRFFIRTYKKEDILNKNQGFTLQDAENLLKEKRDVKGEYTAFLFQSLTLKGLLKLIFIKNAFNLDFKEEYKIYQIWKQKKYIKDRFQSTKLIDFLIKILTSNKGKELFPYVDNYFKKGNQYSKFQEFEKDLLKNSYKVKKYQCNFDESELIELDIVDRKFEHNDAVEPRLKRQNDIQILVEGFFSKQNFSFIRLLPEIKIFVRYQKLFNDMKKRVVSGIDSNGDRYEKEINEKERFYKTISKASFMLELNPCRIGGTPQKEKKEYQDYIIDLYEKREDFHIISIDIGENSFATLGVYDRDLMPKKIDVKWLPQQNENQNKDIIDITDLKIEKGEIVQTNTKNSEKYKSYKNMFENILRYQIYLKDILEQVGEIELKKENYNNIAQKIEESINRISELRFNTGNIIDEVKQDFPLLKNGLKQLLFSYIQNLHNGQDKTINITQYYHQIFEKLELQKVINFKDAFGANFVGVMKEILNRYPGIIVFESLHTGNNYDSYNDVIKKRLQNTTSEKSKEFRTFGTYIGMYIVQSLVNSFSKIIDIKNEKVNQLIYWEKNYETTIGKEKYSNNGILFFVDEKNTSSVCPICNGNFIQKIKKNGEVIEQENKNIKKLFGHGRGKEFETSMHHINDENNKNYQRGKWKSGNLEKGDLCDYGIGNKNYPEFEFIKSGDDLATYNIAKKAKEYLESLSKKED

SEQ ID NO: 805 - protein, 1092 aa, Unknown
  Description of Unknown: uncultivated organism sequence
  Category: MG60 effectors
  Description: MG60-14 effector
MLENLTNLYEVIKTLKFELKPSKFTLKRCDFDRAFEADPHALFEKLSSVHRFQEQILDLLKTSSKKIVIHKNLIKLIDADYFYQLKSKAISSNNTIAVLSQDFQEEFFNYIKEKFNRLHSTNYSLDYLLWADYLENPTTIDKKPTKSEIAFATKRYVHAIEKVEEILSNLIYKTNIDREIESLLANYYNNQDLKPLLKVAKSYLQSYSPTSFQVSKFGFNAKAIQKKVDVEKMEQEISLEKKMLDLEEKKIIATQIFDDYAKKFVQEKIKSDPKLLALRENQTASLDEIKRAKEYLKYLKEDFDYQKILKERSKARKEKRDSMIKFTDREYCELKLAKTDASVVYGRAKQAFFAKQQELYSQQALTHYARILRSENYFVAMIDRDDVSFLERLTNDKVNNEKFEILRYASLTARAVEKLIFEKNALKFNIYDKEYKECKMIREKRSYKEKNEDSRSKNEKQKENLKKLVLFLNSAIEQLNKKLEIFDWKPFLINDFDNFSEFQKYITENCYIARREAIDKQTIYDLDQKKLNFYQIFNKDFSVDPYCATTERDRSSTIKNINLQSKKNLFTLYWQSLYTENSTIRLNPESNLYFRPSRVRTEIDLCNDCEASKLRYRQNKIIGDFQLVFYPTKELPFDQLQQKILKNSEKSYAIGIDLGENSLATICLVDNEKKVVLDGNNKPIIKDLSMINNKDFVEVEDCFIDKPYERKQKLLIGTETKPYMLGRHFPKHLQNKVIAEMSQDMLFEVLQILESLAPEKLIVDKQNKVFDYNYAFEHLKAINKIRYHLQVFNHTNDEMRILEKDLLASIKIRFVKIVSYITQMAKKYNAIIVFENLDQEIGRIKRYLFSEQSYAKVSPKEERMYKGISPYQLMQDKIIQKCNYLLTKQEIKGMQISPRLKRQEDIKQLTLLKDKNCAWGKIIFVNEEDSSKECPNCGFVPKYSSNINIKDDIELMANKKDKKVFSFAGNQLLSERREAYQKISDIDKKKALLIETRVKTFLKSYMDIQGDPMICVNCGYDTRKTKRVEKYNLKSCDEIAAYIIAKRLEFMENKYKTQEVSISVGDSYNKPSDGEQDDSCVSGVKLSNISFS

SEQ ID NO: 806 - protein, 341 aa, Unknown
  Description of Unknown: uncultivated organism sequence
  Category: MG60 effectors
  Description: MG60-15 effector
MFENILRYQIYLKDILEQVGEIELKKENYNNIAQKIEESINRISELRFNTGNIIDEVKQDFPLLKNGLKQLLFSYIQNLHNGQDKTINITQYYHQIFEKLELQKVINFKDAFGANFVGVMKEILNRYPGIIVFESLHTGNNYDSYNDVIKKRLQNTTSEKSKEFRTFGTYIGMYIVQSLVNSFSKIIDIKNEKVNQLIYWEKNYETTIGKEKYSNNGILFFVDEKNTSSVCPICNGNFIQKIKKNGEVIEQENKNIKKLFGHGRGKEFETSMHHINDENNKNYQRGKWKSGNLEKGDLCDYGIGNKNYPEFEFIKSGDDLATYNIAKKAKEYLESLSKKED

SEQ ID NO: 807 - protein, 1123 aa, Unknown
  Description of Unknown: uncultivated organism sequence
  Category: MG60 effectors
  Description: MG60-16 effector
MLENLTNLYEVIKTLKFELKPSKFTLKRCDFDRAFEADPHALFEKLRSVHRFQEQILDLLGKTSSKKIVIHKNLIKLIDADYFYQLKSKAISSNNTIAVLSQDFQEEFFNYIKEKFNRLHSTNYSLDYLLWADYLENPTTIDKKPTKSEIAFATKRYVHAIEKVEEILSNLIYKTGNIDREIESLLANYYNNQDLKPLLKVAKSYLQSYSPTSGFQVSKFGFNAKAIQKKVDVEKMEQEIGSLEKKMLDLEEKKIIATQIFDDYAKKFVQEKIKSDPKLLALRENQTASLDEIKRAKEYLKYLKEGDFDYQKILKERSKARKEKRDSMIKFTGDREYCELKLAKTDASVVYGRAKQAFFAKQQELYSQQALTHYARILRSEGNYFVAMIDRDDVSFLERLGTNDKVNNEKFEILRYASLTARAVEKLIFEKNALKFNIYDKEYKECKMIREKRSYKEKGNEDSRSKNEKQKENLKKLVLFLNSAIEQLNKKLEGGIFDWKPFLIGNDFDNFSEFQKYITENCYIARREAIDKQTIYDLDQKGKLNFYQIFNKDFSVDPYCATTERDRSSTIKNINLQSKKNLFTLYWQSLYTENSGTIRLNPESNLYFRPSRVRTEIDLCNDCEASKLRYRQNKIIGDFQLVFYPTKELPFDQLQQKILKNSEKSYAIGIDLGENSLATICLVDNEKKVVLDGNNKPIIKDLSMINNKGDFVEVEDCFIDGKPYERKQKLLIGGTETKPYMLGRHFPKHLQNKVIAEMSQDMLFEVLQILESLAPEKLGIVDKQGNKVFDYNYAFEHLKAINKIRYHLQVFNHTNDEMRILEKDLLASIKIRGGFVGKIVSYITQMAKKYNAIIVFENLDQEIGRIKGRYLFSEQSYAKVSPKEERMYKGISPYQLMQDKIIQKCNYLLTKQEIKGGMQISPRLKRQEDIKQLTLLKDKNCAWGKIIFVNEEDSSKECPNCGFVPGKYSSNINIKDDGIELMANKKDKKVFSFAENQLLSERREAYQKISDIDKKKALLIETRVGKTFLKSYMDIQGDPMICVNCGYDTRKTKRVEKYNLKSCDEIAAYIIAKRGLEFMENKGYETQEVSISVGGDSYNKPSDGEQDDSCVSGVKLSGNISFS

SEQ ID NO: 808 - protein, 1123 aa, Unknown
  Description of Unknown: uncultivated organism sequence
  Category: MG60 effectors
  Description: MG60-17 effector
MLENLTNLYEVIKTLKFELKPSKFTLKRCDFDRAFEADPHALFEKLRSVHRFQEQILDLLGKTSSKKIVIHKNLIKLIDADYFYQLKSKAISSNNTIAVLSQDFQEEFFNYIKEKFNRLHSTNYSLDYLLWADYLENPTTIDKKPTKSEIAFATKRYVHAIEKVEEILSNLIYKTGNIDREIESLLANYYNNQDLKPLLKVAKSYLQSYSPTSGFQVSKFGFNAKAIQKKVDVEKMEQEIGSLEKKMLDLEEKKIIATQIFDDYAKKFVQEKIKSDPKLLALRENQTASLDEIKRAKEYLKYLKEGDFDYQKILKERSKARKEKRDSMIKFTGDREYCELKLAKTDASVVYGRAKQAFFAKQQELYSQQALTHYARILRSEGNYFVAMIDRDDVSFLERLGTNDKVNNEKFEILRYASLTARAVEKLIFEKNALKFNIYDKEYKECKMIREKRSYKEKGNEDSRSKNEKQKENLKKLVLFLNSAIEQLNKKLEGGIFDWKPFLIGNDFDNFSEFQKYITENCYIARREAIDKQTIYDLDQKGKLNFYQIFNKDFSVDPYCATTERDRSSTIKNINLQSKKNLFTLYWQSLYTENSGTIRLNPESNLYFRPSRVRTEIDLCNDCEASKLRYRQNKIIGDFQLVFYPTKELPFDQLQQKILKNSEKSYAIGIDLGENSLATICLVDNEKKVVLDGNNKPIIKDLSMINNKGDFVEVEDCFIDGKPYERKQKLLIGGTETKPYMLGRHFPKHLQNKVIAEMSQDMLFEVLQILESLAPEKLGIVDKQGNKVFDYNYAFEHLKAINKIRYHLQVFNHTNDEMRILEKDLLASIKIRGGFVGKIVSYITQMAKKYNAIIVFENLDQEIGRIKGRYLFSEQSYAKVSPKEERMYKGISPYQLMQDKIIQKCNYLLTKQEIKGGMQISPRLKRQEDIKQLTLLKDKNCAWGKIIFVNEEDSSKECPNCGFVPGKYSSNINIKDDGIELMANKKDKKVFSFAENQLLSERREAYQKISDIDKKKALLIETRVGKTFLKSYMDIQGDPMICVNCGYDTRKTKRVEKYNLKSCDEIAAYIIAKRGLEFMENKGYETQEVSISVGGDSYNKPSDGEQDDSCASGVKLSGNISFS

SEQ ID NO: 809 - protein, 1123 aa, Unknown
  Description of Unknown: uncultivated organism sequence
  Category: MG60 effectors
  Description: MG60-18 effector
MLENLTNLYEVIKTLKFELKPSKFTLKRCDFDRAFEADPHALFEKLRSVHRFQEQILDLLGKTSSKKIIIHKNLIKLIDADYFYQLKSKAISSNNTIAVLSQDFQEEFFNYIKEKFNRLHSTNYSLDYLLWADYLENPTTIDKKPTKSEIAFATKRYVHAIEKVEEILSNLIYKTGNIDREIESLLANYYNNQDLKPLLKVAKSYLQSYSPTSGFQVSKFGFNAKAIQKKVDVEKMEQEIGSLEKKMLDLEEKKIIATQIFDDYAKKFVQEKIKSDPKLLALRENQTASLDEIKRAKEYLKYLKEGDFDYQKILKERSKARKEKRDSMIKFTGDREYCELKLAKTDASVVYGRAKQAFFAKQQELYSQQALTHYARILRSEGNYFVAMIDRDDVSFLERLGTNDKVNNEKFEILRYASLTARAVEKLIFEKNALKFNIYDKEYKECKMIREKRSYKEKGNEDSRSKNEKQKENLKKLVLFLNSAIEQLNKKLEGGIFDWKPFLIGNDFDNFSEFQKYIIENCYIARREAIDKQTIYDLDQKGKLNFYQIFNKDFSVDPYCATTERDRSSTIKNINLQSKKNLFTLYWQSLYTENSGTIRLNPESNLYFRPSRVRTEIDLCNDCEASKLRYRQNKIIGDFQLVFYPTKELPFDQLQQKILKNSEKSYAIGIDLGENSLATICLVDNEKKVVLDGNNKPIIKDLSMINNKGDFVEVEDCFIDGKPYERKQKLLIGGTETKPYMLGRHFPKHLQNKVIAEMSQDMLFEVLQILESLAPEKLGIVDKQGNKVFDYNYAFEHLKAINKIRYHLQVFNHTNDEMRILEKDLLASIKIRGGFVGKIVSYITQMAKKYNAIIVFENLDQEIGRIKGRYLFSEQSYAKVSPKEERMYKGISPYQLMQDKIIQKCNYLLTKQEIKGGMQISPRLKRQEDIKQLTLLKDKNCAWGKIIFVNEEDSSKECPNCGFVPGKYSSNINIKDDGIELMANKKDKKVFSFAENQLLSERREAYQKISDIDKKKALLIETRVGKTFLKSYMDIQGDPMICVNCGYDTRKTKRVEKYNLKSCDEIAAYIIAKRGLEFMENKGYETQEVSISVGGDSYNKPSDGEQDDSCVSGVKLSGNISFS

SEQ ID NO: 810 - protein, 552 aa, Unknown
  Description of Unknown: uncultivated organism sequence
  Category: MG60 effectors
  Description: MG60-19 effector
MEQHNFDFNEKDLVELDMVYRTFEHVKGVEPKLKRNDDFKLFVNGFFDKQDFDLIRMIPETKVFVRYQRNYDEPKKEKRGKKENIIPEERFYNTVIKGAFNFELKPLEADKNIAREKKKILKDILSKYENDDNFYITTIDIGENSLATLGVYDKNLKPQKLEYFSKDGEKITKEILDITNLKIKKGEIIEQDTDFSQKYKAYKYMFENIILWQIYLKEILEAIEEIEVIEQNYGEIKNRIGKAVNGSEIKNFVSKKKDDYDIKYIVGAFPELKEGLNNFLVNFIKKEYEGEKINFAEDKKVYHEIFQKLELQKVVDFKKAFGSNFVGVIKKIFRQYPGIIVFESLHTGDSYDGFNKIIKKKIKKVSSEKSHQFTSFGTYIGTKIVNLLFNKFTKDISENFNKIEQLVILDKNYENSVKLNSKEDKFINNGVLFFVHEKNTSKACPYCNERLTIENKEKGTLENIDDTKNLYGHGKGKEFEHSMCHINDVSDQNYENGKWTSGTLEGGKMCDFRIGNETYEKEFGFIHSGDELATYNIAKKAKEYLDFLKENN

SEQ ID NO: 811 - protein, 1112 aa, Unknown; identical to SEQ ID NO: 137
  Description of Unknown: uncultivated organism sequence
  Category: MG60 effectors
  Description: MG60-20 effector

SEQ ID NO: 812 - protein, 1229 aa, Unknown
  Description of Unknown: uncultivated organism sequence
  Category: MG60 effectors
  Description: MG60-21 effector
MQKTVFNDLKNIFKVTKTIELELKPIDKNNEIMEDKEINEIYGGFINEGCFLDREMPKVKDMIDNTIKRDIDYNLANVKINEDLLRNYYALHVQSISDDNADLLNEAKKKLYSDFGKQFVYNVKEGAKFINFLLSEYSHDETVYNILLPFKGKGTLFDDFIKTRKHIFSNEDKHGTVSFRLLDENINLYIYNIGVFNQALDIITKTSSFNKENANIWSTIEGYNSVLTQSSILSYNASIGEYNMAINEYNSKLGKETKKIPLFKALNKMILSDGESISFYNEVYTNNVAMFKDVRNIYTTLEKSFEKFADTLRGFNNFDLRYVYVSNKSIEGISSKMYGDYSLIGGLLKKNDFSKTESISIDNLNKCLCETDKKFDDYINIVFNWDNNGNSVFKLIKDSFNSLTCLKKGNDEAVLTDEDKVSLNEFMNLINDFKFFIKPFIISDTVLTDDDFYYTLNSLWETYKEYDKVYNKVRNWVTRKPYNDKQYRLYFGKSNLMNGFTHSQNQRQYNAYIFRKKNYIDEYDYYLGVSHNTKLFNETPSSEEDISEFECFNFFQTDNKGFYKIYKSCNNVKYKDEDCPKLFATFNDVIKRYNLSEGASHSKESESLEAYIKRLRNYYSEDFKSLLSIEESRGVYDMVFKHFKNTIAVQASKLSTFENLYKKCDDYTIDLLCEEIEKATKATIKEWTPISKNEMYEARNDINKPLYLMKITNKDLSFAEKLEKGLRQNKRGKDSLYTTYFKKLMNCEDGYKISVGKIFYRPKTEGLNERTFRHKANVAINNKNRNNAKKQSVFPYEIVKDKRFTRNMFKLQLSFDMNSELDSPQKANKIINETVIEKIKNGEIKHILGIDRGERNLLYATLIDFNGNIILQKALDKIGNVDYNELLTYREKDNKLRKKSWQTNGSIKELKNGFLSNAINEIVKIVFEYNAIIVMEDLTNGFKHSRSKVEKQVYENFEQSLTKKLSFCYLKGYNTESNGSRDAYQLSCPKDKIDNNSQNGIIFYVNPSYTSKIDPVSGFINVFNTRYENVKKAISFFEAFDDITYDENNENFIFNADLTKFKNNVTLPSGMKTNWKLSTHGERIRTYCDDKHANHWANENIILSDYFKKTFDELNINYQNNIKEQITSLKEKKDFEKLLDCMKLMLQMRNSIINSKVDYIISPVVDENGNYYDSRRSDGLLPIDADANGAFNIARKGLLTTRNLYNNTKKIMVDKKQWLNFVQNNFCKP

SEQ ID NO: 813 - protein, 771 aa, Unknown
  Description of Unknown: uncultivated organism sequence
  Category: MG60 effectors
  Description: MG60-22 effector
MANKRTDTTINLNKTVIMLTNMLPEVRAMFQAGIRQAQAYADLVNKWICSNLTNKIGEVLLPYIDNKNCVYYELCYKYKEAPLYTIFMKGKFDLNSRNNALYCAVVAQNIDNYSGNIFGFSQSDYRRNGYCKVVFSNYATKMSSLKPSIKKVTINEESTEETIQSQVIYEMFTNGRQWGKPEYFAEHLKYLEMKDNVSDKLMFRMKTLCEYYQTHTDLIDTMAMNAGVEALKQFEGLKLNRDKFSMTITTNSTSPYTLTRVAGTCAYNLHIPCRKRSYDIRLWGNRQTVRWVNGELVDIADIINQHGQTIIFTIKNGNVYVHIPYGLNFEKTEHEIKNVVGVDVNTKHMLMQTSIKDNGWVKGYVNIYKALVEDEEFVKYISKSDLKLYKDLSKYVSFCPLELNLLYTRYLSKKGLPFNEADNNAEKCVEKVLNNLVKQYEGDDVHVVNYIHNVKKLRALCKASFVLYKKYAELQKAFDDAQGYNDQSTETKETMDKRRWENPFIQTREAQELIAKMDNAVAGIIGCRDNIITYAYKVFGDNNYDTVGLENLTTSQFDNYSTVKSPKSLLSYYGLLGQQVDSDKYNAVMTESNKDWYDFKTDGDGNITDITLTAAGEAQKAKSLFNNKVLKNIHFADVKDKFIQLGNNGSIQTVLVPPSYTSQMDSKTHTIYVKETVDPKNKNKKKLKLVDKKLVRHGQEYHKNGLNADINAALNIAYIVENQEMREVMCLHPSKKDGVYDQPFLKATTKYPATVAGILLKMGKTTNWGEK

SEQ ID NO: 814 - protein, 1141 aa, Unknown
  Description of Unknown: uncultivated organism sequence
  Category: MG60 effectors
  Description: MG60-23 effector
MINLENFKNLYEVRKSARFKIVPKKIFKQKEDRGSVYNTEDIVKQYKGIIKDLESILYYENFVPETQPLSNKLWDLFDFSKFESELEENEEISSLKNKESSDLIRIKHAWLQKYFTNDWHENKDSIISKRWDPKRNIEVKMKNWTTIWSVKFLKEFFESFFTDANKYFDVISKLLQVQDFERNRQSDIKLALQTIQWKDHLYKIYQLFEWGYIEHKNDNTSINELQEKLKVFKNNVNNYIENCRINDSFGLPLEYVSLNYYTRRKTQKDYDEEILKKSESLKKKFDWDLWELYWISKELEISDLYNNMKLFKANQKSAFLQLLQSQTPFSKLKNNFEYIDNKWERYSDYKIQLFDDITEENYNEMKDLTFQIEKSDDKKTRKELKEKRWKYFLFYCKKYEKFCDWYFYPKKGEDRKFFNWYKQVAMEFWKRKAEILSLEREKILAERERWYGFLSKDASNNYYINTFDIENTKNAYDFFSNQSQKQWEITYYILSSITLRALEKLCFSKSSNFYKWNIVQKIDGKFLKIQEVTGNKIFKSKRELEEEENLIEFFAEVLRLQNTLWIKFKSEKSLDNLKHCENMSDFEILLKQETYVLDEYKISKEDFEKALEKFKWNSFLIIDKDSDNHNKNSVFSQWWTRFWQKNNTENYILRINPELIISFRKWDTERFKGKISFHRRKNDAYMVSFSFSHFSDKSYITSEFIDDAERKENLKKFNDLYNENVTLEYIYWIDKWTNELVTLWIFKRWKNWLEKVDISEKIPVYRITKKGLKYFEDTETRDSNEKKKRYLSKNVSYFLKDLENNELFEKLDIDSCLWDLTYAKIIKWNIILNADIFTTVNLYKVTAKRFLNDAAFRGKIKNNTVLFDDENKSFYFEYENRWKLQKQNIFYWKDDFDYLPCDDIFQNLKEEVQNELNMYLTSISNEEDISMQRVNNYKNAISANIVWIITELQKHFNGYICYETLDAGQIEKKWFNTFIWNTLNEKIYNKLQLSLEVPPILKKFRTDIWAKETIQHWKIIYVNEKNTSSACPACNKTLLKIDENWILVDKDDKEVFKLFWHLTEFENAMHHINDENDENFQKWKWESGDLEKGGCDYHIGNENYPEFEFIKSWDDLATYNIAKKAKEYLESLSKKVIPQWS

SEQ ID NO: 815 - protein, 1203 aa, Unknown
  Description of Unknown: uncultivated organism sequence
  Category: MG60 effectors
  Description: MG60-24 effector
MKHEITKTISAELKPFGNTNISDLKIYIDKDENLCVQRANAIKVLDERHKAFMSNTINTKLDFTTLESLMQRTGNEKEQNKERKSLCEQLIKFLKSRNEAEFKMLTASTPSKLINCIYKADNTIECLAPFANFSTYLSDYNTARKNIYAENNTSGSLGCRIITENFSIFIKNKHKYQKLVSEYASIIKDVVDNLPELHDFISKFASTNDYMTFSVQDNIVKYNAIVGEINKNINLYIQQHPDENKSPKKLHMKKLFKQILFDSESLFAVAPKITEEAELKELINTLWEEILQNGKVLDEVMELLKNIRQYDLSEIYITKNMATKLMYWKYNDSAYVRFIAKNITSNIVPISDVMEHIGLETYLQPMSGYKKDALLSYSAIKSFNEIMNNRVAVDRVHCFMNSLNDFRRIAEFITIDESLLSDDEFYDTYTELKGIMRLVSKAYDTVRNFINQRPKDISKKMKLVFGYADFMNGWDYDKIVNNVYGGAMFKKGNRIYIGLKPENDLFKKIRDVQEGEETMQFVKYKQLNPNQQIPRLFHKTEWIDKYTRQENPRANIQKILDKKVADKKYEYTEKESAALIKYYIYCLIESDYAEMYNLEFSDATEYKNINNFFETIKKSTYKIEFIDVALSQIEEWIDNKKIFMFSVHTKDYQPGAYGSKELFTMFLEQLFSEDNLKSNIIRLCGASTVMFRKQTIKNPYVHYKGSILLNKRDKDGNPIPSEIYLNLRDYLNGKLTKSELSKEEIAYLDRIKYKTAKEDIIKDRRYTEDKMFINLPITINKGCKLEINEFNKAIRKRAKYIISLDRGERNLLYYTVMDFKGNIIEEGSLNIIDGYNYQMKLSQLEKERKDEQRNWQATSQIKHIKNGYVGKAVYKICRLVIKYEGAIIAMESLNKTFCVKRDAAIGPSVYQYFQNALLKKLSYLVLKDRKPTEEGGILNGYQLTYCPDKIEDKLVQYGIVFFVNAGYTSKIDPVTGLTNQFKFDEYNTNEKATEFVKSFDYIRVNDNDVAEFGFKYSNFESFCGSNKNKKGKKEEADEAGKYCEREWNCIINGSRIISNKNKETKFWEYHNEDMRVELDKFCEKYNISKEHGTDIKSEMLLICESKPAMCKEFVSLIKKVMQLRNSNRNTGEDYIISPAMNRCGTYDSRNPGNAEKSLPTNGDSNGSRNIGIKCIMSLDMLKEQDKFFFNNEYYFCGLKKFSE

SEQ ID NO: 816 - protein, 1197 aa, Unknown
  Description of Unknown: uncultivated organism sequence
  Category: MG60 effectors
  Description: MG60-25 effector
MFKQEITKTLSAALLPYGQTDVSSLQEVIDRDKKRHKYRKDIIKMIDERHKALLSKIKDAPLEFHRLEELLRKRNKDKKDTAARKELEAEQKALCQILIDWLSSNNRMEFAYLTASTPAKIVSEMFAKNPENKKLEVFDKFCTYLSDYSAARNTIYGTANKAGSVGCRLVTENFPIFIKNKDVYAKLSEEYPEILKTVAKNLPEQSGYIGAFASTDDYMMFSVQDGIKNYNAIVGETNKVINLYIQANPDTKTALKKLRMKNFYKQILFDDEALVAAAFPRIYSVKEFASLVHTIWEDVLDSGKVLDDMMVLLKNIRNYDTTGIFIKKNKIAFVSDKLYGEWNRIKDTIGETKDDYTALEALIFSDADFDNLFKDLNKFKSEAVLAYVEVNKFADDEMMSEDAVPHITELMYALNDFRKLVDIIAIPDDNVNSDPDFYNKYKEYSEKTAAIKSAYSTAYTFVTQRPEDISKKFRLSFDYSTFMKGWDIDKITKNEYGATMFSKDGRLFVGVTNKEKCPDFDDIHPANPGEETFRMLSYKKLGNSSRQIKHMFINDSTPDNIRKIVLGKKDDEAYEHSDMVKVIDYYKKCLVSRYSGIYDFNFSETSDYKTINDFFAEVDKFTYKVSFIDIPASQIDEWIAEKKLFMFIVHTKDYKVGAYGTKELFTIFFENLFTEDNLKNDVIRLAGGSSIVMRPKAVENPYRHKVGSILLNKRDKDGKPVPNKIYVSLSKYLNGRLKKKDLSRDALAYLDKVVWHKHQKEHIAVEDIVKDKRYTTDAFILHLPITINPGCRANEYEINEDARKNAKHTIGIDRGERNLLYVNVTDCRTNKVVEHRSLNEIEGYDYQLRLTQLEKERQDQQRNWRTQSQIKHLKKGYVGKAVHIICELMLKYENSIVVMEALPKEMMQKRGSAFGAVYSQFQQALLNKLSYLVVKDRKPLEKGGILNGYQFTIPPKTLEDKPRQYGSVLFVPPGYTSSIDPVTGFTNIFMYKKYDSSNKKAKNFTAKFDSIRINEDGIPELKFDYSNFKTFQKWPDRQWTCIIDGKRILRQKNQKTGVWEYEDVNVREAFNKLFGKYSKLEPGTDVKELIGKIRKTDADIDVKFVKLMKTVFRLRNSNPNTGEDYIISPALDVHGKTFDSRDQRNLELGLPVNGDSNGARNIALKGAMTLHNAGVTGKLVAVGNSEWMQNVQRFSSE

SEQ ID NO: 817 - protein, 1191 aa, Unknown
  Description of Unknown: uncultivated organism sequence
  Category: MG60 effectors
  Description: MG60-26 effector
MLSNMHETTVNINKTSMNQFTNLFQVHKTVKFDLRPIGKTAELINSDGFLVSDDKEKAMAYLVVKCLIDEYYQKEVIAPILDNIKDNKEWNGLLEKYDKAKDGLERNAISKKLAGVIDKSKPTKPTAKALYTPLKDYVLTLKNAELQLILKDLQYDEVVIGGKTLRAAWNKELKEFVELAIDKFKNFTPYFETLATNIEQVFSGKKNGVAHRIVYQNLYTFIRNKKALDDLKIMVDEFSGEKEMLVGDFSYCLHQSGIDKYNKYIGQLVQRLKEYSDAHPKFSMWHKRFKKLNKQILSPQITPSWLPAAFTNDEMMVVAIRAFVNNTSPYLPALEEIIRQIATYDDHIFIYRKSLRSIAAQMTGDYTALDGSFEIPKSSSQKESLSLRWMSNEMKNKYFLYLNNSLSSALQSLKKSSSDAQDFLNLKKAGNNDYRRNNQASVCILRLMESYKQLYRLLRPLTGTGDENDRNEDFYGDFMPIVEALQPINNLFDSVRNWLTKASFSNDSYPVYLGKATLLDNWTNKVVFLKKDGKYFFLMLNGIQKDELQGGSTFDTIVYLPYSQAANRIDANLTRQFVFSKKPNASKGRNEPTMAKFVREHKAELAKEWERIKDGKYKVSDNKEEVEHAIRYFQKCLNMHPDYKNFDFGFLPAEEYDNYTSFVESLKGKLFRIEEKTASWESIIQLVEEGKVYLFQLYNKDYADNRASNSTSNLHTLYWESIFCQKNLLSYDFKLEEPKLYFREKADVVQKTGNIQSVPLRYQKPKIHLHIPILMNANAHKLKDLNLLVLEQIQNGYFSHIIGIDRGERNLLYYSVLDMNGNIVEQNSLNIINGINYHEKLMEKEVELDDERKKWKVRTGIRKLKEGYLGHAIHQLTNLIVEKNAILVLEDLSDSFKRGRQKKDMQIYQLFEKMLIEKLSFMVSKNVCNLNQEGCTFKALQLADPKIEMPKTGVKQNGIVFFVPPEYTSAIDPVTGFCNLFDRDRVKDIRNLLACFKSISYNSDKEWFEFEWDYQEVLQYTRLEQCANSFPWVTCSYGNRIEWSGSKSCHNLKCENVSLTSGFKALLGKYRVDYHSGANLKEMLRTINKKDDIKELKRLFFLMLSLRNKPDKDTDYILSPVQDVNGVFFDSRKMNKETKPQLPKNGDANGAYNIARKGLLSINKLNNGNNETLSIEEWVLSAKSNKVKLQT

SEQ ID NO: 818 - protein, 1200 aa, Unknown
  Description of Unknown: uncultivated organism sequence
  Category: MG60 effectors
  Description: MG60-27 effector
MKKELAKTLSAELKPYGNTDINALKDIIANDETRFNARKEVIKLIDERHKAFLYHIKDVSLSFDKLEALVIEYNKDKKNNDVKKKLETFQKIMCDALINQLSSKYSEEFKRLIAPTPANIIAQLIAEYPDNENIRMFDRFCSYLIDYCTARRTMYSSKNVPNSAGHRLITENFSLFVKNKNAYTKLSNSYPSIVETVSKNLPELSEWSSSFANTSDYMEKFSVQDGITKYNAIVGEFNKAINLHIQNNPDDKKSLKSLRMKTLRKQILFDSESLFQTVAKIYTPAELKSTIQTLWEDVLENGNVLERMIALLGKFDQFDMKGVFFKKNKVGIISKQLFDGEPLKIRTALKEKYGKKDMEKRNYFPFQDIFDSEPESDIQKFFRDLNGYLSEARISFATINSSDDIMSESTLEYVKNFMDNLNDFRRISEVIAITDESTADTEFYNSYVELSEKMFVIKRAYNTVKNFVCQRPKDISKKFPLTFEYPEFMKGWDFDKTIKNIYGVMMFIKDGRIYIGVSNKKDAPNYKNIRPVSAGEESFRMVLYKQFKPNIQFPNMFNKDAPEDINKIFKSKKDKKSYDRKDTLKVIDYYKRRFIEKYVKIYDFKFSETSDYKNINDFYDEVSKFTYRISFIDVPTSQIDEWIDNKNLFMFVVSTKDYALGAHGSKELFTMYLESLFSEDNLKNDIIRLNGNSSIVMRPRVIDNPYKHKAGSVLLNKRDNDGNPIPNEIYTRLVKYLNGNLAKEELSENEASFLDKISHQKKSYDIVKDRRYTEDKFIIHLPITINHGCTISDKDFNTEIRKKFIANPDAHIIGIDRGERHILYVNVMDRNGKTVFEESLNVLDGYDYQMKLTQLEKQRRNQQRNWKTAGQIAHLKEGYVGKAVYEVCRLMLKYNAIVVMESLNKKFTTSRSAAFGPAVYAQFQRALLNKLNYLVLKERSPMEKGGILNGYQLAYLPKEGIGDNPVQFGSVFFVPAGYTSKIDPVTGFTSLFDFSEYETSNEKASKFTSSFDSIRINEENIPEVQFTYPKFKTHVKWPERKWSCAIKGERILSRKNQKTGYWEYNTVDVREEFDKLFENHGKKLEPGTDIKALMTEIRKSDASIDKEFVKLMKTVMHMRNSNPETGEDYILSPALDKYGKTFDSRNKENSSLGRPTNGDSNGARNIALKGLMMLNNEKDSGKFKCIKNEEWFRNIQKFSE

SEQ ID NO: 819 - protein, 1330 aa, Unknown
  Description of Unknown: uncultivated organism sequence
  Category: MG60 effectors
  Description: MG60-28 effector
MEQFTNLYNVQRTLCFELEPVGVLPEKVQELLAIDKERNLLAPQVKEMMNELHKSFITRTLRNIMLIKDDEEEDISNAKSLIKIKDLLHSTCQLYAIPAKNDKDKDELEQKQAEFRNIISLLFTKDDFYAKLFGKDILDELHNHFTNDEGKLEILDKFKGFLGYFDTFRTNRKNMYVDAENETAIPFRIVNQNLPKFCDNLVAYQRLKSSDLAKCIATVYSDFEDMLNVESLDEYFCVDNYLNCLCQTDIQTYNYIIGGREQEGTKQLLKGLNQHINEFNQTHSKAERLPLFKPLFKQILSDKEKVSWLSEEFKTDRDMLQAIDQCYQDLAIILMGNEECSLPVLLKNISSFNQDGIYISNGKALNLISKRLYSGYSVITDALKQVWKANHERGRRESEENYEKKCNDTIKKTSSFSLSAINQALGITTGDGTNTIATYFAKFGSERECGKTYVQELSELYNEALSALHTKDKDIVNDDEKVGAIKALLDHLKCIQHFIEPLHMKNVEENADAEFYNIFDDIYEQLDNKLTGLYNRVRNRMSRKPYNDDKFQIFFENNSQVLRGWMDSKTENSDNGTQYGGYLFRKINEIGEYDYFLGVSKNVNLFRRFNEVAVADYSEYQRLNYCQLKSETFYGACYKSAVGNDFEQDKSRLTDMILKLCYKHGSENLQDAINKERRKSDPKKSKLSSPKSLLELIEKKDSECYEKILKNKSFLELDALVIESIKKTMASVNVKYLQNLANNDYDSFIQAMEVVDKGCKFGKIFDYFTISQSELDAALEDESKRLYLFKITNKDLSYSKNYKQRKSRGTDNLHTMFFKALMEGGYGTYDIGTGSLYYREMTPGLAKYKPTHPQNIPIDKKSDFFRKRGKQSVFEYDIQKDKRFTRNMFKFHLSINANYTCGNANKIMLNMLNTKVIDAIRNGRFKHIIGIDRGERHLLYVTVINLNGDIVEQFSMNIMESEKLIDGEPVVTNYKSLLDAKMNLRTEQKRTWRRQESIKDLKEGYLSQAVHKLTKLIVDKYQAIVVLENLSKGFMQTQIESAVYAKFEQMLITKLNLYIDKQKDKNAIGGLYHPLQLTSPYKSKSTASIQNGIIFYIPAWCTSKIDPVTGFVNYIRPKYENIQAAREFLSKFDDIRYNPEHDYFEFHIKDYTAFNPKAKSSRQDWIICTNGDRIRNFRDPNNNEWTSEKINLTREFKKLFESYKIDYNCNLLALILIQDKKDFFSNSNVKEPSLFPLLQLTLQLRNSFIKSDVDYILSPVADKNGCFYDSSKCGACLPNNADANGAFNIARKGLILVNRILSTPINEKLSLAISNEDWLNYAQSQQLSND

SEQ ID NO: 820 - protein, 767 aa, Unknown
  Description of Unknown: uncultivated organism sequence
  Category: MG60 effectors
  Description: MG60-29 effector
MAHKKQKEENEIIKTISLKVKDYAGYPIVEAMREYTKYYNKISQWINSNLLTINIGELSAFMPDECKTHNYYTYMMSPDWVNEPLYKMFMKGFHTQHCDNILFNVVKTLNIDEYTGNSLGLSASCFRRSGYFQNVVSNYKSKFANPHISIRRKNLSDLPTEDELLEQCIYEIQNGLSSKTKWEEQIEYLKERDDSKQIYLTRLNTLFTYYKANKDFVDEQMQIKSVESLANFGGCVRKNDKLSMNLVFSSNSPYKVVLNEKRNGYILSYSNNFSIELYGNRMGLLNGVEMFNIVDKHSNNITFKMDNDELFVNIPVSVNFVKKANETNKVVGVDVNLKHSIFATNIIDDGKLDGFVNIYRELLSDVDFVKSCHNDLLNFILDVEKYAFFMPLELGLLSSRVMNQCGYSTIGKYEKLFTTEEHFLRVLRQLEKRFQESGENQKRIYIENVIKMRAQLKAYVTLKYAYNKANKDYDLKMGFVDESTANKETMDQRRFENQFVNTDTAQEILGKMRRIANVITSCRNNIICYMYKIFENNGYGVVALEKLQSSQMKKEKRIPSLLSLLKKHKVEGYTINELKDKSVFKFIERGYYTFDFDDDNKITGVQFSDAGEAVNIETELHNLALKTIHFADAKDYFVTLSNNGSVSVALVPSQFTSQMDSTKHVLYAKKNNKGKLGIVSEHEVRPKQERHINGLNGDYNAACNIAYIFENDEWRNAFMKMNPNEYGKALFETNIESTSTIINTLKKINPDNIISFDECEKTKKVAA

SEQ ID NO: 821 - protein, 1180 aa, Unknown
  Description of Unknown: uncultivated organism sequence
  Category: MG60 effectors
  Description: MG60-30 effector
MNQFTNLFQVHKTVKFDLRPIGKTAELINSDGFLVSDDKEKAMAYLVVKCLIDEYYQKEVIAPILDNIKDNKEWNGLLEKYDKAKDGLERNAISKKLAGVIDKSKPTKPTAKALYTPLKDYVLTLKNAELQLILKDLQYDEVVIGGKTLRAAWNKELKEFVELAIDKFKNFTPYFETLATNIEQVFSGKKNGVAHRIVYQNLYTFIRNKKALDDLKIMVDEFSGEKEMLVGDFSYCLHQSGIDKYNKYIGQLVQRLKEYSDAHPKFLMWHKRFKKLNKQILSPQITPSWLPAAFTNDEMMVVAIRAFVNNTSPYLPALEEIIRQIATYDDHIFIYRKSLRSISAQMTGDYITLDGSFEIPKSSSQKESLSLRWMSNEMKNKYFLYLNNSLSSALQSLKKASSDAQDFLNLKKAGNNDYRRNNQASVCILRLMESYKQLYRLLRPLTGTGDEDDRNEDFYGDFMPIVEALLPINNLFDSVRNWLTKASFSNDSYPIYLGKATLLDNWTNKVVFLKKDGKYFFLMLNGIQKDELQGGSTFDTIVYLPYSQAANRIDANLTRQFVFSKKPNASKGRNEPTMAKFVREHKAELANEWECIKDGKYKVSDSKEEVEHAIRYFQKCLNMHPDYKNFDFGFLPVEEYDNYTSFVESLKGKLFRIEEKTASWESIIQLVEEGKVYLFQLYNKDYADNRASNSTSNLHTLYWESIFCQKNLLSYDFKLEEPKLYFREKADVVQKTGNIHSVPLRYQKPKIHLHIPILMNANAHKSKDLNLLVLEQIQNGYFSHIIGIDRGERNLLYYSVLDMNGNIVEQNSLNIINGINYHEKLMEKEVELDDERKKWKVRTGIRKLKEGYLGHAIHQLTNLIVEKNAILVLEDLSDSFKRDRQKIDMQIYQLFEKMLIEKLSFMVSKNVCDVNQEKSTFRALQLADPKIEMSKTGIKQNGIVFFVPPEYTSAIDPVTGFCNLFDRDCVKDIRNLFACFKSISYNSGKDWFEFKWDYHDVMRYTRLAQCATPYSWVACSFGNRIEWSGSKSYHNLKCENVSLTSGFKALLDKYRVEYRSGENLKEMFGAINKKDDIKELKRLFFLTLSLRNKPDGDTDYILSPVQDVNGTFFDSRSVNKESLPQLPENGDANGAYNIARKGLLSINKLNNGNNEAISIEEWIQSAKYVKIKFTGPTLCV

SEQ ID NO: 822 - protein, 1321 aa, Unknown
  Description of Unknown: uncultivated organism sequence
  Category: MG60 effectors
  Description: MG60-31 effector
MKQFTNLYNVQKTLCFELQPEGKLPETVHELLAKDEERYRLAPKVKEMMNDLHKSFITQTLQNIEVTKNGEKEEVSKAKSQIKELLYSIYHLYRRTNKSDEDKDELRQKQAELRYCLSLIFTKDSFYANLFSKSIIGELRNQFSDDRDKTEILDKFKGFWGYFDTFCTNRKNMYVADEQETAIPFRIANQNFPKFCDNLAVYQRIKSSVLVDCMTKVYSDFEDMLNVANLDEYFCIDNYLHCLCQTDIQAYNYIIGGREQEGTKVLLKGLNQYINEYNQTHSKMERLPLFKPLFKQILSGKEKVSWLPEEFKSDAEMLQAIDLCYKQLEVYLFDNENRSLSELLHNIGSFNPDGIYVQNGDSLNLISKRIYGNYSVISDALKQVWKRTHVKGKRESEEKYEKKCSDAIKRISAFSFSTINQALGIKSGNEKRTITDYFANFGSERESGKTYIQELSELYKDAKSALNTKDEDIINDDAKVGAIRGLLDQLKTILHFIEPLHMKNVEENSDADFYNIYDQIYEKLDKVTNLYNRVRNRLSRKPYNNNKYPIYFENNSKLLGGWPDSCTESSDNGTQYGGYLFRKLNEIGEYDYFLGISSNVKLFRRFKKVVPSDRSEFQRLNYYQLKSQTFYGGCYKTAIGHDFDEDKTKLIMCILKVCNHFASPELLDAINKEKLKDPKKSKLNSPKSFLDLIEKKDFECYEKIVVNKSFRKLDAIVTENIKKTMASVNIQFLQDAANNDYNSFLQAMDVVEKGCAAEKIFEFFPISQSELETALNSDSKRLFLFRITNKDLSYSQNYKQRKSRGTDNLHTMFFKALMEGGYGTYDLGTGSLYFREMTPGLAKGDPTHPKNVLIEKKSSFFRKQKKQSIFKYDIQKDRRYTRDMFKFHLSIKANYTCGNANETILNQKVIEAIRNGEVKHIIGIDRGERHLLYVTVIDLNGKLVDKFSMNIMESEKIIDGEKVKTDYKSLLDSRMNLRTEQKRTWRHQDNIKDLKEGYLSQVIHKLTKMIVDNQAIVVLENLSKGFMQTQIESSVYAKFEQMLITKLNLYIDKQKDKNQPGGLYKPLQLTSPYKSRTNARIQNGVVFYIPAWNTSKIDPVTGFVNFIHPKYENIMAAREFIGKFDNICYNVEQDYFEFHIKNYTAFNPKAKSSRQDWVICTKGKRIRNFRDPDNNNEWTSEEIDLTKEFKVLFDDYGIDYHSHLFDYILKQGKKDFFYNDNEKERKQSLFPLLKLMLQLRNSFIKSDIDYIISPVADKNGVFYDSRTCAAYLPDNADANGAFNIARKGLMLVKRILSTPIDKKISLTISNEEWLHYAQPKD

SEQ ID NO: 823 - protein, 1177 aa, Unknown
  Description of Unknown: uncultivated organism sequence
  Category: MG60 effectors
  Description: MG60-32 effector
MEHLTNLFQVHKTVKFELRPIGKTEDLINKNGFLLSDDKERAMAYQVVKCLIDDYYQKEVIAPLLEKVKDNEDWNHNLVAYGDASDSNTRRAISQKLAAIIIKAKPNEPSANLLYTQLHNYLQKQNTGDLCHILKDLQYDEIAIKDRTLKAAWNYKLKDFVQDAIDKFNGFTLYFSALAVNMKQLFSRKKNGLAHRIIYQNLYTFVRNKRALDDLRVVIAEFRDEKDIAVTDFSNYLLQDGIDKYNKYIGQLIQRLKEYEDSHPNSSRWHRRFKQLNKQILSPRIAPDWLPAAFTNDEMMVVAICAFMKSVNPQLSALKEIINQIDTYNGPIFIYRKSLRSIAVQMTGDYKGLDDAFVIPKGYSKSESLSLQWTTPEVKQEFLGFLKDNLSAKLLSIQQASCEADEFLNLKKAEGNDYRRNNKASVSINKLMNAYKQLYNLLRPLTGTGDEEVRDEDFYGSYMPIVDALQPINELFDSVRNWLTKTAYSNESYPTYLGVATILKNWSSKAVYLKKDRKYYFCLASTKGEEKRDIHDILKKIWISNNCPKDAVIYLTRTQSPERITANLPRIFIRSKEADKVNSFVEKHPELKTEWEKLKGGGYKSPELKNEAISYFQKCLQLHDDYKYYKYHFRPAKEYDDYDSFVNSLKKEALFFFEEKPICWNELLQLVDDGKVYLFQLYNKDYADNRPGNSTPNLHTLYWEAVFSQQNRLSYDFKLEEPKLYFREKADVVQRTGDIHSVPLRYQTPKMHLHIPILMNANAQNTVDVNQLVLEQIQAGTFSHIIGIDRGERNLLYYSVLNMNGSIVEQESLNVINDVDYHKLLMEKEADLDDEQRKWKARSGIRKLKEGYLSHALHQLTNLIRKYNAILFVEDLDKAFKHSRQKIDMQIYQLFEKMLIEKLSFWVDKKVSDGNHAGSTFCALQLATPGLKQEEKGVRQNGILFFVPPEYTSAIDPVTGFCNLFDREHVKDVRRIFAHFKRVSYNVDKDWFEFEWDYQDVLQYTRLKECATPQPWVVCSMGERIEWTGSERYRNQKCESVDLTTEFKILFEKYNIQYVNGEDLKDAIASINKKEDINELKRLFFLTVSLRNKPNKDTDYILSPVCDANGVFFDSRLVNSEALAKLPVDGDANGAYNIGRKGLLSINKLKNGINEPLSLEEWVQSARQEIYQTTNQT

SEQ ID NO: 824 - protein, 782 aa, Unknown
  Description of Unknown: uncultivated organism sequence
  Category: MG60 effectors
  Description: MG60-33 effector
MAGHSKIKENHIMKAFLMKVKETRKNQWQSNFIRSEIAKFTNYYNGLSKFIADRLLDDMVTTLAPLIEEKKRDSEYYKYLTNGDWDGKPLYFIFKEGFNSTNADNILANSLVRVYCEQNYTGNGFGLSYSYYVVIGFAKEVIANYRSSFQKPKVKIKKKKLSENPTEDELIEQCIYTIYYEFNEKKDIKKWKDEIKFLKERGESKETRLKRIQTLFEFYKDKNHKELVDERVANLVVDNIKEFGGCKRDIGCPSMGIQIQHNFDISINEKRNGYTICFGPNKKNLTKLEVFGNRMVLLNGEEIVDLPNTHGEKLTLIDRGNAIYAALTAQVPFEKHMPDGNKTVGIDLNLKHSVFATSIVDNGKLAGYISIYKELLKDDEFVKYCPKDLLRFMKDASKYVFFAPIEIELLRSRVIYNKGYACVENYENVYKAEVAFVNVIKRLQSQCEANGDAQGALYMSYLSKMRAQLKNYINLKLAYYDHQSAYDLKMGFNDISAESKETIDERRKLFPFSKEKEAQEILAKMKNISNVIIACRNNIAVYMYKMFERNGYDFIGLEKLESSQMKKRQSRSFPTVKSLLNYHKLAGMTMDEIKKQEVSSNIKKGFYDLEFDADGKLYGAKYSNKGNVHFIEDEFYISGLKAIHFADMKDYFVRLSNNGKVSVALVPPSFTSQMDSVEHKFFMKKNANGKLIVADKKDVRSCQEKHKINGLNADYNAACNIGFIVEDDYMRESLLGSPTGGTYDTAYFDTKIQGSKGVYDKIKENGETYIAVLSDDVITAEE

SEQ ID NO: 825 - protein, 1318 aa, Unknown
  Description of Unknown: uncultivated organism sequence
  Category: MG60 effectors
  Description: MG60-34 effector
MQQFTNLYNVQKTLCFELQPEGTLPEKVQELLANDKERYLLAPIVKEMMNELHKSFITQTLRNIVVEIKSDNEEIRNAKLLTKELLYTIYQLYKKANKSDEEKEELEQKQTELRICLSLVFTKDNFYGNLFNKEIMKELRNQVSNDEEKLNILDKFKGFFGYFDTFCTNRKNMYVADEQETAIPFRIANQNLPKFCDNLAVYQRLKSSSLSNCIATVYTDFEDMLNVASLDEYFCIDNYLHCLCQTDIQAYNYIIGGREQEGTNVLLKGLNQYINEYNQKNPKTERLPLFKPLFKQILSDKEKVSWLPEEFESDAEMLQAIKLCFKELEGFLCDKGSHSLPLLLQNIGSFKQDAIYIQNGEPLNLISKRLYGNYSVISDALKQVWKRDHVKGKRESEEKYEKKCSDAIKKISAFSFSTINQALGIMSGNEKRTIADYFANFGSERECGKTYIQELNELYKDAEPILNTKDKDIINDDTKVGAIKALLDQLKAILHFIEPLHMKNVEENSNTDFYNTYDQIYEQLDKVTSLYNQVRNRLSRKPYSNNKYPIYFENNSKLLGGWPDSCTETSDNGTQYGGYLFRKQNEIGEYDYFLGISANVKLFRRFKEVSPSDRSEYHRLNFYQLKTQTFYGGCYKTAIGHDFDEDKTKLITCILNNCNHYASSVLLDAINKEKSKVNSKLGSPKSLLELIEKKDMECYEKIVTDKQFRILDAMITGNIKKTMASVNIQFLQDAANNGYDSFIQAMNIVEKGCADERGFEYFPISQSELDAALTSNSKRLFLFKITNKDLSYSQNYKQRKSRGTDNLHTMFFKALMEGGYGTYTLGTGSLYFREETPGLAKDKPTHPQNVPIEKKSVFFRKQKKQSVFEYDIQKDRRFTRNMFKLHLSVKANYTCGNANETALNLKVIDAIRRGGIKHIIGIDRGERHLLYVTVIDFNGRLVDKFSMNIIESEKSIDGETVKTDYKNLLDSRMNLRTEQKRTWRRQENIKDLKEGYLSQVVHKLTKMIVDNQAIVVLENLSKGFMQTQIESSVYAKFEQMLITKLNLYIDKQKDKNQPGGLYMPLQLTSPYKSRANASIQNGVVFYIPAWNTSKIDPVTGFVNFLHPKYENIQNARDFISKFDNIYYDSDKGYFVFHISNYTAFNPKARCSRQNWDICTVGKRIRNYRDPDNNNEWKSEEIELTKEFKVLFDEYGIDYHSNLLDSILIQDNKSFFYNEDVRKPSLFPLIKLMVQLRNSFIKSDVDYISSPVADTKGIFYDSNNCGSHLPNNADANGAFNIARKGLMLVERITATPPEKKLSLIITNEEWLHYAQSQNK

SEQ ID NO: 826 - protein, 1197 aa, Unknown
  Description of Unknown: uncultivated organism sequence
  Category: MG60 effectors
  Description: MG60-35 effector
MNKIEIQKTLRAELKPYGKTDVNSFKDVIERDRTRYESKREVMSMIDERHKTFLSCITDAPLDFTHLEDVLSKFNTNKKDTTLKKELESLQKEMCAELVEWIASNNKAEFTRLTAATPAGIITELSLQYPENKKLSLFTNFASYLIDYSNARSNMYSKANKHGSIAHRLITENFQIFVRNKTAYMQLLEKIPNFKSDVQEALPQFADVISAFASTDKYMMFASQDGIMRYNAVAGKINEIINLHIQENPDDKKSFKKLRTKQLYKQLLFDAESVLQKFRKIHDEDELREVMKTLWEETLDFGKTIEELDELLCTIDNYDKNGIFIKKRGLSGLSKYIHDDYLTVSKQLKKKYGKNAMKTHESFQLSDIAEKNVSLNDFFSDLKKYQSIALITYALINSSDDLLSDKSICDIHDFMENLNNFCRLSGIIATTDNPEADAQFYNNYDERAEKTSAIKNAFNAVKSFVCRRPKDIEMKFPLTFNYPHFMEGWDFDKIVNNVYGATLFTKDNRIYVGVLNRKAGMKFDDIRPAKPGEEFFHMVVYKQFGKPDKQLPNLFKSTAPEEIAILMDAKKEGRPYDMAKLIDYYKRCLKERYGNLYDLKFSETSEYKTFDDFTREVVQCTYHISFIDVPASQIDEWIETKKMYMFIVSTKDYAAGAHGSKELFTIFLENIFSKDNMHNDIIRLNGGARIMMRPKVLDKSFTHKKGSILLCKRDVLGNPIPSEAYDLLSRHLNGWTRSDEKNLAQKTMAEYKDIIRYKTAKYDIVKDKRYTRDMFTISLPITINAGYKIHYAEFNREVRRKFMKSDNAHIIGIDRGERNMLYITIIDKNGKTVLQKSLNMMDGYDFHMKLEQLENQRRDNQRNWKASGNIKHLKDGYSGKAVYEIYRLMLEYNAIIVMENLNEKFMTSRNAAFGTAVYTNFQNALINKLSYIVLKERKPMDEGGILNGYQFAYPVKEIGENVNQIGAVFFVPAGYTSKVDPITGFTSLIDFSDYESSDKKAAKFTNSFDSIRINEHGLLETKFKHDKFKTHIKNTGCEYTCIADGQRILTHKNQETGGWEYVDVDVRTEMNNMLEKYGISTSPGTDIKDEITKLRKNNPSIDKDFLTVMKTVMHMRNSNPHTGEDYIISPAVDKHGMTFDSRDIGNDAAGRPVNGDSNGARNIALKALIMLNNEQANGEFRSIKNTEWFSEIPKFSN

SEQ ID NO: 827 - protein, 758 aa, Unknown
  Description of Unknown: uncultivated organism sequence
  Category: MG60 effectors
  Description: MG60-36 effector
MLCQTGKSDTLFAYTVSPGKPERQGAGLAAEAVKEGKNMRIIKRSGTEVAFDITKIVAAVEKANKEVVETDRLSLEQIKEIAKKVTLTCSSMNRTFGVEEIQDLVENEIMEMQAFEVARKYITYRYKRALVRKANSTDEQILSLIECNNEEVKQENSNKNPVVNSVQRDYMAGEVSKDITKRFLLPEKIVKAHEAGIIHFHDSDYFAQHMHNCCLVNLEDMLQNGTVISETMIDRPKSFSTACNIATQSIAQIASSQYGGQSITLSHLAPFVDVSRKKYLKMVKEEYDAAGLQIDDSQIASIAELRVREEIKRGVQMIQYQVITLMTTNGQAPFVTVFMYLDEVPEGRTRDDLALVIEEMLTQRILGVKNEKGVYITPAFPKLIYVLEEDNVREGSKYWALTQLAAKCTAKRMVPDYISEKVMKKLKDGNCYPCMGCRSFLTVYHDESNRPKFYGRFNQGVVTLNLVDVACSSKGDMEQFWNILDERLQLCYEALMCRHNRLKGTPSDVAPILWQYGALARLKKGETIDKLLYNGYSTISLGYAGLCECTRYMTGLSHTNPEATPFALEVMQRLNDACAKWKAETNIDFSIYGTPLESTTYKFAKCLQKRFGKIEGVTDKNYITNSYHVHVTEEIDAFKKLTFESKFQELSPGGAVSYVEVPNMQNNIDAVLSVMQHIYDNIMYAELNTKSDYCQQCGFDGEIQISSDKEGKLIWRCPNCGNTDQDTMNVARRTCGYIGTQFWNQGRTQEIKERVLHL

SEQ ID NO: 828 - protein, 997 aa, Unknown
  Description of Unknown: uncultivated organism sequence
  Category: MG60 effectors
  Description: MG60-37 effector
MNSILDIAAQFLSENTNPIMESFHDESVDQAKKYIENNYDELYKFKGFQKFAPIKPSNLKEFANTKVRDIQRLIISPFIYAPRNELKWMNSYVLGLTRIMYKDLLYDKPKFKKNLLQDLKKIYLTAVYARQDGIANGDKSLMMDKNMNNLSFNELKTKFMPLFNHYYDIYKKNKQEYINIHTRNATTNTNLVANTAIKYDGAGNELNDTEYEEPYHENSFKIGKYNACLIPNHKAAATWNRFTNKTSDSNGCNWCITIPSTDDHWESYECGKTRTVYFCWTDNFLNLNIKDFNDGSAPYNEWGKSLMCVMVNDSDDINKFVCQVTSRYNHCNGKGENASSSLGFGDYFCGDPDSEGLAANLAQILGCSAEDIQEKFLFDGDMDASSEKGEQIYEDIAERINYYLERHNFNNLEVDTILPDNYVLATYSDKDYTVNVLLKNNTLVPNFIYTYIYPIYIGKTIDDCIFEVIDATAEYSDRTKNIAYGPNADTYFDHDMAEIIPIYKLNRSYSSEYNDEKYKTKHRIVALAPYHNHEYNLFDLDKKEFMLNDEFFIQSVFEKDGQLNLAITTGENSAERNISNVCVYNIDTKKTYYIKNEYLTDLQARLGDNYLRFNNAYMYANESNVILFDLLNMKPIEGNYTYVLESRIAFKDYLITLDESAKNFDYTIFYKGNVIDTFPARTHIYCPKDNTRSTDVFIINYNNDSESRIYYKGKLIYASNSETDNIKTSRGPFVIGNVLYVRLKEEKNITNDYSAQAFKLIDINTQKVITEDICMDGEYALETAVRKDIPVLAFKVNPKTNAIEYVVIDNNGKINNLNNEEDEFIDYNILKSGDSTVIASDSEIRINDGDANITMQYIKFYSNAKIKLYNPDGSIFYKPNDDDFQGLNYVSLAPLGYGFWLLTRKIKYSRIGLLEIHDIIDKNGKLIIGNTDSSPVSINIIDNFNENEDLLITATKYAKDIDSRDYSISKNGELKKLPYGWQSANENYIQNLAAYLL

SEQ ID NO: 829 - protein, 758 aa, Unknown
  Description of Unknown: uncultivated organism sequence
  Category: MG60 effectors
  Description: MG60-38 effector
MLCQTGKSDTLFAYTVSPGKPERQGAGLAAEAVKEGKNMRIIKRSGTEVAFDITKIVAAVEKANKEVVETDRLSLEQIKEIAKKVTLTCSSMNRTFGVEEIQDLVENEIMEMQAFEVARKYITYRYKRALVRKANSTDEQILSLIECNNEEVKQENSNKNPVVNSVQRDYMAGEVSKDITKRFLLPEKIVKAHEAGIIHFHDSDYFAQHMHNCCLVNLEDMLQNGTVISETMIDRPKSFSTACNIATQSIAQIASSQYGGQSITLSHLAPFVDVSRKKYLKMVKEEYDAAGLQIDDSQIASIAELRVREEIKRGVQMIQYQVITLMTTNGQAPFVTVFMYLDEVPEGRTRDDLALVIEEMLTQRILGVKNEKGVYITPAFPKLIYVLEEDNVREGSKYWALTQLAAKCTAKRMVPDYISEKVMKKLKDGNCYPCMGCRSFLTVYHDESNRPKFYGRFNQGVVTLNLVDVACSSKGDMEQFWNILEERLQLCYEALMCRHNRLKGTPSDVAPILWQYGALARLKKGETIDKLLYNGYSTISLGYAGLCECTRYMTGLSHTNPEATPFALEVMQRLNDACAKWKAETNIDFSIYGTPLESTTYKFAKCLQKRFGKIEGVTDKNYITNSYHVHVTEEIDAFKKLTFESKFQELSPGGAVSYVEVPNMQNNIDAVLSVMQHIYDNIMYAELNTKSDYCQQCGFDGEIQISSDKEGKLIWRCPNCGNTDQDTMNVARRTCGYIGTQFWNQGRTQEIKERVLHL

SEQ ID NO: 830 - protein, 1255 aa, Unknown
  Description of Unknown: uncultivated organism sequence
  Category: MG60 effectors
  Description: MG60-39 effector
MNKILLTDAVPDIEKYWDYEANEGKKPSDFGASSSEKVWTKCPICGTSVKRNIRYTWEKDKNGVGHVIHCRTCGKRNNNNSLVVLFPDIKKHWIYEKNEHDPEYYSISSGKKVYTRCPSCGEERYIAICDLIVKRNDRYELTQCIECSPKRNVIGSIAKNYPDIDKYWDDSNASNPDEIALNSQEIIFIHCPTCDKVVKRKALNSFRRDDQTGLYMLLDCHKCATQKAGKIRGLNQSGALIDKCPEIEEWWDAENNTIEFKNITRGSHYEAQLKCPACHSSFTRQIHSFVNVKRDGRLLPVACPECGYSSKGDPKDNILKLCPEVEQWWDYEANSPYRPEQFSKGSQFQAHFICPDCGMHLYTGIHSLLKSDENGNLHIRHKGKCLKYRSMESDNNLVKQYPQIKEWWDYEENGKALPEEFTIYSGKRMHFICPQCGAKSYRRITDAFAIEANSGEPILFNCPYCRNKKVLAGKNSLLDTDPELAKEWSPNNNKKANEVLSKSFNRVQWICPNCKGEYSAIIRDRKVGDDACPYCKNDKVLTGFNSLQDKNPELAEEWSANNVLKANEVLPTSSSCVKWVCPTCRGEYSAIIRGRKVGDDACPYCRYDKLLPGYNSLLNTDPELAKEWSNSNDMKADEVLPTSSSRVKWVCPICRGEYSAIIRERKVGDDACPYCRYDKLLPGYNSLLNTDPELAKEWSNSNDMKADEVLPTSSSRVKWVCPTCKGEYSAIIRDRKVGDDACPYCRQTKLLKEQTSLGVINPELAKEWSANNVRKADEVLPTSSFRVKWVCPTCRGEYSAIIRDRKVGDDACPYCRKDKLLPGYNSLLDTNPELAKEWSDSNDLKADEVLPTSSSRALWICPTCRGEYYAAIRDRKVGDDACPYCRNDKLLPGYNSLLDTDPELAKEWSDSNDLKADEVLPTSSSRALWICPTCRGEYYAAIRDRKVGDDACPYCRNDKLLPGYNSLLDTDPELAKEWSDSNDLKADEVLPTSSSRALWICPTCRGEYYAAIRDRKVGDDACPYCRNDKLLPGYNSLLDTDPELAKEWSDSNDLKADEVLPTSSSRALWICPTCRGEYYAAIRDRKVGDDACPYCRNDKLLPGYNSLLDTDPELAKEWSDSNDLKADEVLPTSSSRALWICPTCRGEYYAAIRDRKVGDDACPYCRNDKLLPGYNSLKVRQPELVEREWCYPENILIGVYPDQILESYPGQAWWKCPTCKRKYLMSVKDRLMKQKRGHVACSQCRGRRWVRSFWV

SEQ ID NO: 831 - protein, 768 aa, Unknown
  Description of Unknown: uncultivated organism sequence
  Category: MG60 effectors
  Description: MG60-40 effector
MFCSCKKNLRVVIYIYDATKTYDCAKKLIVYKSIIKGAEVMKIIKRNGAEETFDRQKIKDAIAKANNETDGTPELTDRQIDYISLVIEDHCNEMNRALSVEEIQELVETHIILQGAPETAKRYIRYRFTRNLARASNTTDNQILSLIECNNEEVKQENSNKNPTVNSVQRDYMAGEVSKDLTKRILLPEDIVKAHEEGLIHFHDADYFAQHMHNCDLVNLEDMLQNGTVISGTMIEKPHSFSTACNIATQIIAQVASNQYGGQSISLAHLAPFVQISREKITRQVRAEMEEFGIDADDEQVKSLVEKRVRDEIKRGVQTIQYQVVTLLTTNGQAPFVTVFMYLNEAKNEQEKKDLAIIIEEVLKQRIKGTKNEVGVWVTPAFPKLIYVLEEDNITEDSRFWYLTKLAAECTAKRMVPDYISEKIMLKLKIDKNGNGNCYTCMGCRSFLTPYVDENGKPKYYGRFNQGVVTINLVDVACTAARDGNKSEEKFWQVLDERLELCHRALQCRHERLEGTLSDAAPILWQYGALARLKKGEPIDKLLHGGYSTLSLGYAGLWECVYEITGKKLTEKEGEEFGLRVMQRLNDACAEWKAAENIDYSIYGTPLESTTYKFAKCLQNRFGIIKGVTDRNYITNSYHIHVTEKIDAFSKLELESKFQKLSPGGAISYVEVPNMQQNIPAVLEVMKFIYNNIMYAELNTKSDYCQVCGYDGEIQIVEEDGKLVWRCPNCGNEDQSKMNVARRTCGYIGSQFWNQGRTQEIKERVLHL

SEQ ID NO: 832 - protein, 768 aa, Unknown
  Description of Unknown: uncultivated organism sequence
  Category: MG60 effectors
  Description: MG60-41 effector
MFCSCKKNLCVVIYIYDATKTYDCAKKLIVYKSIIKGAEVMKIIKRNGAEETFDRQKIKDAIAKANNETDGTPELTDRQIDYISLVIEDHCNEMNRALSVEEIQELVETHIILQGAPETAKRYIRYRFTRNLARASNTTDNQILSLIECNNEEVKQENSNKNPTVNSVQRDYMAGEVSKDLTKRILLPEDIVKAHEEGLIHFHDADYFAQHMHNCDLVNLEDMLQNGTVISGTMIEKPHSFSTACNIATQIIAQVASNQYGGQSISLAHLAPFVQISREKITRQVRAEMEEFGIDADDEQVKSLVEKRVRDEIKRGVQTIQYQVVTLLTTNGQAPFVTVFMYLNEAKNEQEKKDLAIIIEEVLKQRIKGTKNEVGVWVTPAFPKLIYVLEEDNITEDSRFWYLTKLAAECTAKRMVPDYISEKIMLKLKIDKNGNGNCYTCMGCRSFLTPYVDENGKPKYYGRFNQGVVTINLVDVACTAARDGNKSEEKFWQVLDERLELCHRALQCRHERLEGTLSDAAPILWQYGALARLKKGEPIDKLLHGGYSTLSLGYAGLWECVYEITGKKLTEKEGEEFGLRVMQRLNDACAEWKAAENIDYSIYGTPLESTTYKFAKCLQNRFGIIKGVTDRNYITNSYHVHVTEKIDAFSKLELESKFQKLSPGGAISYVEVPNMQQNIPAVLEVMKFIYNNIMYAELNTKSDYCQVCGYDGEIQIVEEDGKLVWRCPNCGNEDQSKMNVARRTCGYIGSQFWNQGRTQEIKERVLHL

SEQ ID NO: 833 - protein, 768 aa, Unknown
  Description of Unknown: uncultivated organism sequence
  Category: MG60 effectors
  Description: MG60-42 effector
MFCSCKKNLRVVIYIYNATKTYDCAKKLIVYKSIIKGAEVMKIIKRNGAEETFDRQKIKDAIAKANNETDGTPELTDRQIDYISLVIEDHCNEMNRALSVEEIQELVETHIILQGAPETAKRYIRYRFTRNLARASNTTDNQILSLIECNNEEVKQENSNKNPTVNSVQRDYMAGEVSKDLTKRILLPEDIVKAHEEGLIHFHDADYFAQHMHNCDLVNLEDMLQNGTVISGTMIEKPHSFSTACNIATQIIAQVASNQYGGQSISLAHLAPFVQISREKITRQVRAEMEEFGIDADDEQVKSLVEKRVRDEIKRGVQTIQYQVVTLLTTNGQAPFVTVFMYLNEAKNEQEKKDLAIIIEEVLKQRIKGTKNEVGVWVTPAFPKLIYVLEEDNITEDSRFWYLTKLAAECTAKRMVPDYISEKIMLKLKIDKNGNGNCYTCMGCRSFLTPYVDENGKPKYYGRFNQGVVTINLVDVACTAARDGNKSEEKFWQVLDERLELCHRALQCRHERLEGTLSDAAPILWQYGALARLKKGEPIDKLLHGGYSTLSLGYAGLWECVYEITGKKLTEKEGEEFGLRVMQRLNDACAEWKAAENIDYSIYGTPLESTTYKFAKCLQNRFGIIKGVTDRNYITNSYHIHVTEKIDAFSKLELESKFQKLSPGGAISYVEVPNMQQNIPAVLEVMKFIYNNIMYAELNTKSDYCQVCGYDGEIQIVEEDGKLVWRCPNCGNEDQSKMNVARRTCGYIGSQFWNQGRTQEIKERVLHL

SEQ ID NO: 834 - protein, 768 aa, Unknown
  Description of Unknown: uncultivated organism sequence
  Category: MG60 effectors
  Description: MG60-43 effector
MFCSCKKNLRVVIYIYNATKTYDCAKKLIVYKSIIKGAEVMKIIKRNGAEETFDRQKIKDAIAKANNETDGTPELTDRQIDYISLVIEDHCNEMNRALSVEEIQELVETHIILQGAPETAKRYIRYRFTRNLARASNTTDNQILSLIECNNEEVKQENSNKNPTVNSVQRDYMAGEVSKDLTKRILLPEDIVKAHEEGLIHFHDADYFAQHMHNCDLVNLEDMLQNGTVISGTMIEKPHSFSTACNIATQIIAQVASNQYGGQSISLAHLAPFVQISREKITRQVRAEMEEFGIDADDEQVKSLVEKRVRDEIKRGVQTIQYQVVTLLTTNGQAPFVTVFMYLNEAKNEQEKKDLAIIIEEVLKQRIKGTKNEVGVWVTPAFPKLIYVLEEDNITEDSRFWYLTKLAAECTAKRMVPDYISEKIMLKLKIDKNGNGNCYTCMGCRSFLTPYVDENGKPKYYGRFNQGVVTINLVDVACTAARDGSKNEEKFWQVLDERLELCHRALQCRHERLEGTLSDAAPILWQYGALARLKKGEPIDKLLHGGYSTLSLGYAGLWECVYEITGKKLTEKEGEEFGLRVMQRLNDACAEWKAAENIDYSIYGTPLESTTYKFAKCLQNRFGIIKGVTDRNYITNSYHIHVTEKIDAFSKLELESKFQKLSPGGAISYVEVPNMQQNIPAVLEVMKFIYNNIMYAELNTKSDYCQVCGYDGEIQIVEEDGKLVWRCPNCGNEDQSKMNVARRTCGYIGSQFWNQGRTQEIKERVLHL

SEQ ID NO: 835 - protein, 768 aa, Unknown
  Description of Unknown: uncultivated organism sequence
  Category: MG60 effectors
  Description: MG60-44 effector
MFCSCKKNLCVVIYIYDATKTYDCAKKLIVYKSIIKGAEVMKIIKRNGAEETFDRQKIKDAIAKANNETDGTPELTDRQIDYISLVIEDHCNEMNRALSVEEIQELVETHIILQGAPETAKRYIRYRFTRNLARASNTTDNQILSLIECNNEEVKQENSNKNPTVNSVQRDYMAGEVSKDLTKRILLPEDIVKAHEEGLIHFHDADYFAQHMHNCDLVNLEDMLQNGTVISGTMIEKPHSFSTACNIATQIIAQVASNQYGGQSISLAHLAPFVQISREKITRQVRAEMEEFGIDADDEQVKSLVEKRVRDEIKRGVQTIQYQVVTLLTTNGQAPFVTVFMYLNEAKNEQEKKDLAIIIEEVLKQRIKGTKNEVGVWVTPAFPKLIYVLEEDNITEDSRFWYLTKLAAECTAKRMVPDYISEKIMLKLKIDKNGNGNCYTCMGCRSFLTPYVDENGKPKYYGRFNQGVVTINLVDVACTAARDGNKSEEKFWQVLDERLELCHRALQCRHERLEGTLSDAAPILWQYGALARLKKGEPIDKLLHGGYSTLSLGYAGLWECVYEITGKKLTEKEGEEFGLRVMQRLNDACAEWKAAENIDYSIYGTPLESTTYKFAKCLQNRFGIIKGVTDRNYITNSYHIHVTEKIDAFSKLELESKFQKLSPGGAISYVEVPNMQQNIPAVLEVMKFIYNNIMYAELNTKSDYCQVCGYDGEIQIVEEDGKLVWRCPNCGNEDQSKMNVARRTCGYIGSQFWNQGRTQEIKERVLHL

SEQ ID NO: 836 - protein, 768 aa, Unknown
  Description of Unknown: uncultivated organism sequence
  Category: MG60 effectors
  Description: MG60-45 effector
MFCSCKKNLRVVIYIYDATKTYDCAKKLIVYKSIIKGAEVMKIIKRNGAEETFDRQKIKDAISKANNETDGTPELTDRQIDYISLVIEDHCNEMNRALSVEEIQELVETHIILQGAPETAKRYIRYRFTRNLARASNTTDNQILSLIECNNEEVKQENSNKNPTVNSVQRDYMAGEVSKDLTKRILLPEDIVKAHEEGLIHFHDADYFAQHMHNCDLVNLEDMLQNGTVISGTMIEKPHSFSTACNIATQIIAQVASNQYGGQSISLAHLAPFVQISREKITRQVRAEMEEFGIAADDEQVKSLVEKRVRDEIKRGVQTIQYQVVTLLTTNGQAPFVTVFMYLNEAKNEQEKKDLAIIIEEVLKQRIKGTKNEVGVWVTPAFPKLIYVLEEDNITEDSRFWYLTKLAAECTAKRMVPDYISEKIMLKLKIDKNGNGNCYTCMGCRSFLTPYVDENGKPKYYGRFNQGVVTINLVDVACTAARDGSKSEEKFWQVLDERLELCHRALQCRHERLEGTLSDAAPILWQYGALARLKKGEPIDKLLHGGYSTLSLGYAGLWECVYEITGKKLTEKEGEEFGLRVMQRLNDACAEWKAAENIDYSIYGTPLESTTYKFAKCLQNRFGIIKGVTDRNYITNSYHIHVTEKIDAFSKLELESKFQKLSPGGAISYVEVPNMQQNIPAVLEVMKFIYNNIMYAELNTKSDYCQVCGYDGEIQIVEEDGKLVWRCPNCGNEDQSKMNVARRTCGYIGSQFWNQGRTQEIKERVLHL

SEQ ID NO: 837 - protein, 760 aa, Unknown
  Description of Unknown: uncultivated organism sequence
  Category: MG60 effectors
  Description: MG60-46 effector
MLVVIYIYNATKTYDCAKKLIVHKSIIKGAEVMKIIKRNGAEETFDRQKIKDAIAKANNETDGTPELTDRQIDYISLVIEDHCNEMNRALSVEEIQELVETHIILQGAPETAKRYIRYRFTRNLARASNTTDNQILSLIECNNEEVKQENSNKNPTVNSVQRDYMAGEVSKDLTKRILLPEDIVKAHEEGLIHFHDADYFAQHMHNCDLVNLEDMLQNGTVISGTMIEKPHSFSTACNIATQIIAQVASNQYGGQSISLAHLAPFVQISREKITRQVRAEMEEFGIDADDEQVKSLVEKRVRDEIKRGVQTIQYQVVTLLTTNGQAPFVTVFMYLNEAKNEQEKKDLAIIIEEVLKQRIKGTKNEVGVWVTPAFPKLIYVLEEDNITEDSRFWYLTKLAAECTAKRMVPDYISEKIMLKLKIDKNGNGNCYTCMGCRSFLTPYVDENGKPKYYGRFNQGVVTINLVDVACTAARDGNKSEEKFWQVLDERLELCHRALQCRHERLEGTLSDAAPILWQYGALARLKKGEPIDKLLHGGYSTLSLGYAGLWECVYEITGKKLTEKEGEEFGLRVMQRLNDACAEWKAAENIDYSIYGTPLESTTYKFAKCLQNRFGIIKGVTDRNYITNSYHIHVTEKIDAFSKLELESKFQKLSPGGAISYVEVPNMQQNIPAVLEVMKFIYNNIMYAELNTKSDYCQVCGYDGEIQIVEEDGKLVWRCPNCGNEDQSKMNVARRTCGYIGSQFWNQGRTQEIKERVLHL

SEQ ID NO: 838 - protein, 768 aa, Unknown
  Description of Unknown: uncultivated organism sequence
  Category: MG60 effectors
  Description: MG60-47 effector
MFCSCKKNLCVVIYIYDATKTYDCAKKLIVYKSIIKGAEVMKIIKRNGAEETFDRQKIKDAIAKANNETDGAPELTDRQIDYISLVIEDHCNEMNRALSVEEIQELVETHIILQGAPETAKRYIRYRFTRNLARASNTTDNQILSLIECNNEEVKQENSNKNPTVNSVQRDYMAGEVSKDLTKRILLPEDIVKAHEEGLIHFHDADYFAQHMHNCDLVNLEDMLQNGTVISGTMIEKPHSFSTACNIATQIIAQVASNQYGGQSISLAHLAPFVQISREKITRQVRAEMEEFGIDADDEQVKSLVEKRVRDEIKRGVQTIQYQVVTLLTTNGQAPFVTVFMYLNEAKNEQEKKDLAIIIEEVLKQRIKGTKNEVGVWVTPAFPKLIYVLEEDNITEDSRFWYLTKLAAECTAKRMVPDYISEKIMLKLKIDKNGNGNCYTCMGCRSFLTPYVDENGNPKYYGRFNQGVVTINLVDVACTAARDGSKSEEKFWQVLDERLELCHRALQCRHERLEGTLSDAAPILWQYGALARLKKGEPIDKLLHGGYSTLSLGYAGLWECVYEITGKKLTEKEGEEFGLRVMQRLNDACAEWKAAENIDYSIYGTPLESTTYKFAKCLQNRFGIIKGVTDRNYITNSYHIHVTEKIDAFSKLELESKFQKLSPGGAISYVEVPNMQQNIPAVLEVMKFIYNNIMYAELNTKSDYCQVCGYDGEIQIVEEDGKLVWRCPNCGNEDQSKMNVARRTCGYIGSQFWNQGRTQEIKERVLHL

SEQ ID NO: 839 - protein, 768 aa, Unknown
  Description of Unknown: uncultivated organism sequence
  Category: MG60 effectors
  Description: MG60-48 effector
MFCSCKKNLCVVIYIYNATKTYDCAKKLIVYKSIIKGAEVMKIIKRNGAEETFDRQKIKDAIAKANNETDGTPELTDRQIDYISLVIEDHCNEMNRALSVEEIQELVETHIILQGAPETAKRYIRYRFTRNLARASNTTDNQILSLIECNNEEVKQENSNKNPTVNSVQRDYMAGEVSKDLTKRILLPEDIVKAHEEGLIHFHDADYFAQHMHNCDLVNLEDMLQNGTVISGTMIEKPHSFSTACNIATQIIAQVASNQYGGQSISLAHLAPFVQISREKITRQVRAEMEEFGIDADDEQVKSLVEKRVRDEIKRGVQTIQYQVVTLLTTNGQAPFVTVFMYLNEAKNEQEKKDLAIIIEEVLKQRIKGTKNEVGVWVTPAFPKLIYVLEEDNITEDSRFWYLTKLAAECTAKRMVPDYISEKIMLKLKIDKNGNGNCYTCMGCRSFLTPYVDENGKPKYYGRFNQGVVTINLVDVACTAARDGNKNEEKFWQVLDERLELCHRALQCRHERLEGTLSDAAPILWQYGALARLKKGEPIDKLLHGGYSTLSLGYAGLWECVYEITGKKLTEKEGEEFGLRVMQRLNDACAEWKAAENIDYSIYGTPLESTTYKFAKCLQNRFGIIKGVTDRNYITNSYHIHVTEKIDAFSKLELESKFQKLSPGGAISYVEVPNMQQNIPAVLEVMKFIYNNIMYAELNTKSDYCQVCGYDGEIQIVEEDGKLVWRCPNCGNEDQSKMNVARRTCGYIGSQFWNQGRTQEIKERVLHL

SEQ ID NO: 840 - protein, 768 aa, Unknown
  Description of Unknown: uncultivated organism sequence
  Category: MG60 effectors
  Description: MG60-49 effector
MFCSCKKNLRVVIYIYNATKTYDCAKKLIVYKSIIKGAEVMKIIKRNGAEETFDRQKIKDAIAKANNETDGTPELTDRQIDYISLVIEDHCNEMNRALSVEEIQELVETHIILQGAPETAKRYIRYRFTRNLARASNTTDNQILSLIECNNEEVKQENSNKNPTVNSVQRDYMAGEVSKDLTKRILLPEDIVKAHEEGLIHFHDADYFAQHMHNCDLVNLEDMLQNGTVISGTMIEKPHSFSTACNIATQIIAQVASNQYGGQSISLAHLAPFVQISREKITRQVRAEIEEFGIAADDEQVKSLVEKRVRDEIKRGVQTIQYQVVTLLTTNGQAPFVTVFMYLNEAKNEQEKKDLAIIIEEVLKQRIKGTKNEVGVWVTPAFPKLIYVLEEDNITEDSRFWYLTKLAAECTAKRMVPDYISEKIMLELKIDKNGNGNCYTCMGCRSFLTPYVDENGKPKYYGRFNQGVVTINLVDVACTAARDGNKSEEKFWQVLDERLELCHRALQCRHERLEGTLSDAAPILWQYGALARLKKGEPIDKLLHGGYSTLSLGYAGLWECVYEITGKKLTEKEGEEFGLRVMQRLNDACAEWKAAENIDYSIYGTPLESTTYKFAKCLQNRFGIIKGVTDRNYITNSYHIHVTEKIDAFSKLELESKFQKLSPGGAISYVEVPNMQQNIPAVLEVMKFIYNNIMYAELNTKSDYCQVCGYDGEIQIVEEDGKLVWRCPNCGNEDQSKMNVARRTCGYIGSQFWNQGRTQEIKERVLHL

SEQ ID NO: 841 - protein, 768 aa, Unknown
  Description of Unknown: uncultivated organism sequence
  Category: MG60 effectors
  Description: MG60-50 effector
MFCSCKKNLRVVIYIYDATKTYDCAKKIIVYKSIIKGAEVMKIIKRNGAEETFDRQKIKDAIAKANNETDGTPELTDRQIDYISLVIEDHCNEMNRALSVEEIQELVETHIILQGAPETAKRYIRYRFTRNLARASNTTDNQILSLIECNNEEVKQENSNKNPTVNSVQRDYMAGEVSKDLTKRILLPEDIVKAHEEGLIHFHDADYFAQHMHNCDLVNLEDMLQNGTVISGTMIEKPHSFSTACNIATQIIAQVASNQYGGQSISLAHLAPFVQISREKITRQVRAEMEEFGIDADDEQVKSLVEKRVRDEIKRGVQTIQYQVVTLLTTNGQAPFVTVFMYLNEAKNEQEKKDLAIIIEEVLKQRIKGTKNEVGVWVTPAFPKLIYVLEEDNITEDSRFWYLTKLAAECTAKRMVPDYISEKIMLKLKVDKNGNGNCYTCMGCRSFLTPYVDENGKPKYYGRFNQGVVTINLVDVACTAARDGSKSEEKFWQVLDERLELCHRALQCRHERLEGTLSDAAPILWQYGALARLKKGEPIDKLLHGGYSTLSLGYAGLWECVYEITGKKLTEKEGEEFGLRVMQRLNDACAEWKAAENIDYSIYGTPLESTTYKFAKCLQNRFGIIKGVTDRNYITNSYHIHVTEKIDAFSKLELESKFQKLSPGGAISYVEVPNMQQNIPAVLEVMKFIYNNIMYAELNTKSDYCQVCGYDGEIQIVEEDGKLVWRCPNCGNEDQSKMNVARRTCGYIGSQFWNQGRTQEIKERVLHL

SEQ ID NO: 842 - protein, 768 aa, Unknown
  Description of Unknown: uncultivated organism sequence
  Category: MG60 effectors
  Description: MG60-51 effector
MFCSCKKKLCVVIYIYDATKTYDCAKKLIVYKSIIKGAEVMKIIKRNGAEETFDRQKIKDAIAKANNETDGTPELTDRQIDYISLVIEDHCNEMNRALSVEEIQELVETHIILQGAPETAKRYIRYRFTRNLARASNTTDNQILSLIECNNEEVKQENSNKNPTVNSVQRDYMAGEVSKDLTKRILLPEDIVKAHEEGLIHFHDADYFAQHMHNCDLVNLEDMLQNGTVISGTMIEKPHSFSTACNIATQIIAQVASNQYGGQSISLAHLAPFVQISREKITRQVRAEMEEFGIAADDEQVKSLVEKRVRDEIKRGVQTIQYQVVTLLTTNGQAPFVTVFMYLNEAKNEQEKKDLAIIIEEVLKQRIKGTKNEVGVWVTPAFPKLIYVLEEDNITEDSRFWYLTKLAAECTAKRMVPDYISEKIMLKLKIDKNGNGNCYTCMGCRSFLTPYVDENGKPKYYGRFNQGVVTINLVDVACTAARDGNKSEEKFWQVLDERLELCHRALQCRHERLEGTLSDAAPILWQYGALARLKKGEPIDKLLHGGYSTLSLGYAGLWECVYEITGKKLTEKEGEEFGLRVMQRLNDACAEWKAAENIDYSIYGTPLESTTYKFAKCLQNRFGIIKGVTDRNYITNSYHIHVTEKIDAFSKLELESKFQKLSPGGAISYVEVPNMQQNIPAVLEVMKFIYNNIMYAELNTKSDYCQVCGYDGEIQIVEEDGKLVWRCPNCGNEDQSKMNVARRTCGYIGSQFWNQGRTQEIKERVLHL

SEQ ID NO: 843 - protein, 760 aa, Unknown
  Description of Unknown: uncultivated organism sequence
  Category: MG60 effectors
  Description: MG60-52 effector
MLVVIYIYNATKTYDCAKKLIVYKSIIKGAEVMKIIKRNGAEETFDRQKIKDAIAKANNETDGTPELTDRQIDYISLVIEDHCNEMNRALSVEEIQELVETHIILQGAPETAKRYIRYRFTRNLARASNTTDNQILSLIECNNEEVKQENSNKNPTVNSVQRDYMAGEVSKDLTKRILLPEDIVKAHEEGLIHFHDADYFAQHMHNCDLVNLEDMLQNGTVISGTMIEKPHSFSTACNIATQIIAQVASNQYGGQSISLAHLAPFVQISREKITRQVRAEMEEFGIDADDEQVKSLVEKRVRDEIKRGVQTIQYQVVTLLTTNGQAPFVTVFMYLNEAKNEQEKKDLAIIIEEVLKQRIKGTKNEVGVWVTPAFPKLIYVLEEDNITEDSRFWYLTKLAAECTAKRMVPDYISEKIMLKLKIDKNGNGNCYTCMGCRSFLTPYVDENGKPKYYGRFNQGVVTINLVDVACTAARDGNNSEEKFWQVLDERLELCHRALQCRHERLEGTLSDAAPILWQYGALARLKKGEPIDKLLHGGYSTLSLGYAGLWECVYEITGKKLTEKEGEEFGLRVMQRLNDACAEWKAAENIDYSIYGTPLESTTYKFAKCLQNRFGIIKGVTDRNYITNSYHIHVTEKIDAFSKLELESKFQKLSPGGAISYVEVPNMQQNIPAVLEVMKFIYNNIMYAELNTKSDYCQVCGYDGEIQIVEEDGKLVWRCPNCGNEDQSKMNVARRTCGYIGSQFWNQGRTQEIKERVLHL

SEQ ID NO: 844 - protein, 768 aa, Unknown
  Description of Unknown: uncultivated organism sequence
  Category: MG60 effectors
  Description: MG60-53 effector
MFCSCKKNLCVVIYIYDATKTYDCAKNLIVYKSIIKGAEVMKIIKRNGAEETFDRQKIKDAIAKANNETDGTPELTDRQIDYISLVIEDHCNEMNRALSVEEIQELVETHIILQGAPETAKRYIRYRFTRNLARASNTTDNQILSLIECNNEEVKQENSNKNPTVNSVQRDYMAGEVSKDLTKRILLPEDIVKAHEEGLIHFHDADYFAQHMHNCDLVNLEDMLQNGTVISGTMIEKPHSFSTACNIATQIIAQVASNQYGGQSISLAHLAPFVQISREKITRQVRAEMEEFGIDADDEQVKSLVEKRVRDEIKRGVQTIQYQVVTLLTTNGQAPFVTVFMYLNEAKNEQEKKDLAIIIEEVLKQRIKGTKNEVGVWVTPAFPKLIYVLEEDNITEDSRFWYLTKLAAECTAKRMVPDYISEKIMLKLKIDKNGNGNCYTCMGCRSFLTPYVDENGKPKYYGRFNQGVVTINLVDVACTAARDGSKSEEKFWQVLDERLELCHRALQCRHERLEGTLSDAAPILWQYGALARLKKGEPIDKLLHGGYSTLSLGYAGLWECVYEITGKKLTEKEGEEFGLRVMQRLNDACAEWKAAENIDYSIYGTPLESTTYKFAKCLQNRFGIIKGVTDRNYITNSYHIHVTEKIDAFSKLELESKFQKLSPGGAISYVEVPNMQQNIPAVLEVMKFIYNNIMYAELNTKSDYCQVCGYDGEIQIVEEDGKLVWRCPNCGNEDQSKMNVARRTCGYIGSQFWNQGRTQEIKERVLHL

SEQ ID NO: 845 - protein, 768 aa, Unknown
  Description of Unknown: uncultivated organism sequence
  Category: MG60 effectors
  Description: MG60-54 effector
MFCSCKKNLRVVIYIYNATKTYDCAKKLIVYKSIIKGAEVMKIIKRNGAEETFDRQKIKDAIAKANNETDGTPELTDRQIDYISLVIEDHCNEMNRALSVEEIQELVETHIILQGAPETAKRYIRYRFTRNLARASNTTDNQILSLIECNNEEVKQENSNKNPTVNSVQRDYMAGEVSKDLTKRILLPEDIVKAHEEGLIHFHDADYFAQHMHNCDLVNLEDMLQNGTVISGTMIEKPHSFSTACNIATQIIAQVASNQYGGQSISLAHLAPFVQISREKITRQVRAEMEEFGIAADDEQVKSLVEKRVRDEIKRGVQTIQYQVVTLLTTNGQAPFVTVFMYLNEAKNEQEKKDLAIIIEEVLKQRIKGTKNEVGVWVTPAFPKLIYVLEEDNITEDSRFWYLTKLAAECTAKRMVPDYISEKIMLELKIDKNGNGNCYTCMGCRSFLTPYVDENGKPKYYGRFNQGVVTINLVDVACTAARDGNKSEEKFWQVLDERLELCHRALQCRHGRLEGTLSDAAPILWQYGALARLKKGEPIDKLLHGGYSTLSLGYAGLWECVYEITGKKLTEKEGEEFGLRVMQRLNDACAEWKAAENIDYSIYGTPLESTTYKFAKCLQNRFGIIKGVTDRNYITNSYHIHVTEKIDAFSKLELESKFQKLSPGGAISYVEVPNMQQNIPAVLEVMKFIYNNIMYAELNTKSDYCQVCGYDGEIQIVEEDGKLVWRCPNCGNEDQSKMNVARRTCGYIGSQFWNQGRTQEIKERVLHL

SEQ ID NO: 846 - protein, 768 aa, Unknown
  Description of Unknown: uncultivated organism sequence
  Category: MG60 effectors
  Description: MG60-55 effector
MFCSCKKNLRVVIYIYDATKTYDCAKKLIVYKSIIKGAEVMKIIKRNGAEETFDRQKIKDAIAKANNETDGTPELTDRQIDYISLVIEDHCNEMNRALSVEEIQELVETHIILQGAPETAKRYIRYRFTRNLARASNTTDNQILSLIECNNEEVKQENSNKNPTVNSVQRDYMAGEVSKDLTKRILLPEDIVKAHEEGLIHFHDADYFAQHMHNCDLVNLEDMLQNGTVISGTMIEKPHSFSTACNIATQIIAQVASNQYGGQSISLAHLAPFVQISREKITRQVRAEMEEFGIDADDEQVKSLVEKRVRDEIKRGVQTIQYQVVTLLTTNGQAPFVTVFMYLNEAKNEQEKKDLAIIIEEVLKQRIKGTKNEVGVWVTPAFPKLIYVLEEDNITEDSRFWYLTKLAAECTAKRMVPDYISEKIMLKLKIDKNGNGNCYTCMGCRSFLTPYVDENGKPKYYGRFNQGVVTINLVDVACTAARDGSKSEEKFWQVLDERLELCHRALQCRHERLEGTLSDAAPILWQYGALARLKKGEPIDKLLHGGYSTLSLGYAGLWECVYEITGKKLTEKEGEEFGLRVMQRLNDACAEWKAAENIDYSIYGTPLESTTYKFAKCLQNRFGIIKGVTDRNYITNSYHIHVTEKIDAFSKLELESKFQKLSPGGAISYVEVPNMQQNIPAVLEVMKFIYNNIMYAELNTKSDYCQVCGYDGEIQIVEEDGKLVWRCPNCGNEDQSKMNVARRTCGYIGSQFWNQGRTQEIKERVLHL

SEQ ID NO: 847 - protein, 768 aa, Unknown
  Description of Unknown: uncultivated organism sequence
  Category: MG60 effectors
  Description: MG60-56 effector
MFCSCKKNLCVVIYIYNATKTYDCAKKLIVYKSIIKGAEVMKIIKRNGAEETFDRQKIKDAIAKANNETDGTPELTDRQIDYISLVIEDHCNEMNRALSVEEIQELVETHIILQGAPETAKRYIRYRFTRNLARASNTTDNQILSLIECNNEEVKQENSNKNPTVNSVQRDYMAGEVSKDLTKRILLPEDIVKAHEEGLIHFHDADYFAQHMHNCDLVNLEDMLQNGTVISGTMIEKPHSFSTACNIATQIIAQVASNQYGGQSISLAHLAPFVQISREKITRQVRAEMEEFGIDADDEQVKSLVEKRVRDEIKRGVQTIQYQVVTLLTTNGQAPFVTVFMYLNEAKNEQEKKDLAIIIEEVLKQRIKGTKNEVGVWVTPAFPKLIYVLEEDNITEDSRFWYLTKLAAECTAKRMVPDYISEKIMLKLKIDKNGNGNCYTCMGCRSFLTPYVDENGKPKYYGRFNQGVVTINLVDVACTAARDGSKSEEKFWQVLDERLELCHRALQCRHERLEGTLSDAAPILWQYGALARLKKGEPIDKLLHGGYSTLSLGYAGLWECVYEITGKKLTEKEGEEFGLRVMQRLNDACAEWKAAENIDYSIYGTPLESTTYKFAKCLQNRFGIIKGVTDRNYITNSYHIHVTEKIDAFSKLELESKFQKLSPGGAISYVEVPNMQQNIPAVLEVMKFIYNNIMYAELNTKSDYCQVCGYDGEIQIVEEDGKLVWRCPNCGNEDQSKMNVARRTCGYIGSQFWNQGRTQEIKERVLHL

SEQ ID NO: 848 - protein, 768 aa, Unknown
  Description of Unknown: uncultivated organism sequence
  Category: MG60 effectors
  Description: MG60-57 effector
MFCSCKKNLRVVIYIYNATKTYDCAKKLIVYKSIIKGAEVMKIIKRNGAEETFDRQKIKDAIAKANNETDGTPELTDRQIDYISLVIEDHCNEMNRALSVEEIQELVETHIILQGAPETAKRYIRYRFTRNLARASNTTDNQILSLIECNNEEVKQENSNKNPTVNSVQRDYMAGEVSKDLTKRILLPEDIVKAHEEGLIHFHDADYFAQHMHNCDLVNLEDMLQNGTVISGTMIEKPHSFSTACNIATQIIAQVASNQYGGQSISLAHLAPFVQISREKITRQVRAEMEEFGIDADDEQVKSLVEKRVRDEIKRGVQTIQYQVVTLLTTNGQAPFVTVFMYLNEAKNEQEKKDLAIIIEEVLKQRIKGTKNEVGVWVTPAFPKLIYVLEEDNITEDSRFWYLTKLAAECTAKRMVPDYISEKIMLKLKIDKNGNGNCYTCMGCRSFLTPYVDENGKPKYYGRFNQGVVTINLVDVACTAARDGNKSEEKFWQVLDERLELCHRALQCRHERLEGTLSDAAPILWQYGALARLKKGEPIDKLLHGGYSTLSLGYAGLWECVYEIKGKKLTEKEGEEFGLRVMQRLNDACAEWKAAENIDYSIYGTPLESTTYKFAKCLQNRFGIIKGVTDRNYITNSYHIHVTEKIDAFSKLELESKFQKLSPGGAISYVEVPNMQQNIPAVLEVMKFIYNNIMYAELNTKSDYCQVCGYDGEIQIVEEDGKLVWRCPNCGNEDQSKMNVARRTCGYIGSQFWNQGRTQEIKERVLHL

SEQ ID NO: 849 - protein, 768 aa, Unknown
  Description of Unknown: uncultivated organism sequence
  Category: MG60 effectors
  Description: MG60-58 effector
MFCSCKKNLCVVIYIYDATKTYDCAKKLIVYKSIIKGAEVMKIIKRNGAEETFDRQKIKDAIAKANNETDGTPELTDRQIDYISLVIEDHCNEMNRALSVEEIQELVETHIILQGAPETAKRYIRYRFTRNLARASNTTDNQILSLIECNNEEVKQENSNKNPTVNSVQRVYMAGEVSKDLTKRILLPEDIVKAHEEGLIHFHDADYFAQHMHNCDLVNLEDMLQNGTVISGTMIEKPHSFSTACNIATQIIAQVASNQYGGQSISLAHLAPFVQISREKITRQVRAEMEEFGIDADDEQVKSLVEKRVRDEIKRGVQTIQYQVVTLLTTNGQAPFVTVFMYLNEAKNEQEKKDLAIIIEEVLKQRIKGTKNEVGVWVTPAFPKLIYVLEEDNITEDSRFWYLTKLAAECTAKRMVPDYISEKIMLKLKIDKNGNGNCYTCMGCRSFLTPYVDENGKPKYYGRFNQGVVTINLVDVACTAARDGSKSEEKFWQVLDERLELCHRALQCRHERLEGTLSDAAPILWQYGALARLKKGEPIDKLLHGGYSTLSLGYAGLWECVYEITGKKLTEKEGEEFGLRVMQRLNDACAEWKAAENIDYSIYGTPLESTTYKFAKCLQNRFGIIKGVTDRNYITNSYHIHVTEKIDAFSKLELESKFQKLSPGGAISYVEVPNMQQNIPAVLEVMKFIYNNIMYAELNTKSDYCQVCGYDGEIQIVEEDGKLVWRCPNCGNEDQSKMNVARRTCGYIGSQFWNQGRTQEIKERVLHL

SEQ ID NO: 850 - protein, 861 aa, Unknown
  Description of Unknown: uncultivated organism sequence
  Category: MG60 effectors
  Description: MG60-59 effector
MHKPPKLKRFNQEVLSKYQIYNSIFMTLPFDTITKTGIFLPLFHEVCKTGFSKKKNPTEIVNYFFKTYQDNPTEQEKNDLLFQFIQYIERQIVLFDAIEDAAFTTVNNMDGVGTMRNTKEAAVRDNKKEALQKHLENFKIRLVLTAHPTQFYPGPVLGIITDLANAIEKNDLLLINKLLGQLGKTPFFKHEKPTPYDEAVSLIWYLENVFYHAIADTYNYIQNNIFDGRAINNEIINLGFWPGGDRDGNPFVTTETTLKVAKRLKQILLKNYYKDILVLKKRLTFKGVESIVLELEKLLFENSVNPDLNTMISKDEFLKKLYQIKHILTTEHSSLYLEEITDLINKVHLFGYHFASLDLRQDSRVHHNVFSTIVTELQEKGSGLFPKNYLSLSEKEQIKILSTVAADILPEEFSDEMASKTLSSIRAIKTIQNENGEKGAHRYIISNNQTALNMMETFAMFKLSGFEENFSVDIIPLFETIEDLENAAEVMQTLYANPVYRNHLTHRDNKQTIMLGFSDGTKDGGYFMANWSIFKAKESITKISRNYGIDVIFFDGRGGPPARGGGKTHEFYASLGQTIENKEIQLTIQGQTISANFGIENAAQYNIEQLLSAGIANEIFNTAKNNLTSEDTKIMNDLAKTSYKAYSEFKNHPKFLPYLENRSTLKYYSKTNIGSRPSKRSQSSTLNFSDLRAIPFVGSWSQLKQNVPGFYGVGTALKKYEDNGEFEKLKQFYNHSDFFKALIGNSMMSLSKSFFELTEYMAEDEEYGEFWKMIYEEYKTTKRLILKLTGYTELMQNNPVGKASINIRENIVLPLLTIQQYALLKIQELQKDNNNPKLVEVYEKMVTRSLFGNINASRNSA

SEQ ID NO: 851 - protein, 768 aa, Unknown
  Description of Unknown: uncultivated organism sequence
  Category: MG60 effectors
  Description: MG60-60 effector
MFCSCKKNLCVVIYIYDATKTYDCAKKSIVYKSIIKGAEVMKIIKRNGAEETFDRQKIKDAIAKANNETDGTPELTDRQIDYISLVIEDHCNEMNRALSVEEIQELVETHIILQGAPETAKRYIRYRFTRNLARASNTTDNQILSLIECNNEEVKQENSNKNPTVNSVQRDYMAGEVSKDLTKRILLPEDIVKAHEEGLIHFHDADYFAQHMHNCDLVNLEDMLQNGTVISGTMIEKPHSFSTACNIATQIIAQVASNQYGGQSISLAHLAPFVQISREKITRQVRAEMEEFGIAADDEQVKSLVEKRVRDEIKRGVQTIQYQVVTLLTTNGQAPFVTVFMYLNEAKNEQEKKDLAIIIEEVLKQRIKGTKNEVGVWVTPAFPKLIYVLEEDNITEDSRFWYLTKLAAECTAKRMVPDYISEKIMLKLKIDKNGNGNCYTCMGCRSFLTPYVDENGKPKYYGRFNQGVVTINLVDVACTAARDGNKSEEKFWQVLDERLELCHRALQCRHERLEGTLSDAAPILWQYGALARLKKGEPIDKLLHGGYSTLSLGYAGLWECVYEITGKKLTEKEGEEFGLRVMQRLNDACAEWKAAENIDYSIYGTPLESTTYKFAKCLQNRFGIIKGVTDRNYITNSYHIHVTEKIDAFSKLELESKFQKLSPGGAISYVEVPNMQQNIPAVLEVMKFIYNNIMYAELNTKSDYCQVCGYDGEIQIVEEDGKLVWRCPNCGNEDQSKMNVARRTCGYIGSQFWNQGRTQEIKERVLHL

SEQ ID NO: 852 - protein, 768 aa, Unknown
  Description of Unknown: uncultivated organism sequence
  Category: MG60 effectors
  Description: MG60-61 effector
MFCSCKKNLCVVIYIYDATKTYDCAKKLIVYKSIIKGAEVMKIIKRNGAEETFDRQKIKDAIAKANNETDGTPELTDRQIDYISLVIEDHCNEMNRALSVEEIQELVETHIILQGAPETAKRYIRYRFTRNLARASNTTDNQILSLIECNNEEVKQENSNKNPTVNSVQRDYMAGEVSKDLTKRILLPEDIVKAHEEGLIHFHDADYFAQHMHNCDLVNLEDMLQNGTVISGTMIEKPHSFSTACNIATQIIAQVASNQYGGQSISLAHLAPFVQISREKITRQVRAEMEEFGIDADDEQVKSLVEKRVRDEIKRGVQTIQYQVVTLLTTNGQAPFVTVFMYLNEAKNEQEKKDLAIIIEEVLKQRIKGTKNEVGVWVTPAFPKLIYVLEEDNITEDSRFWYLTKLAAECTAKRMVPDYISEKIMLKLKIDKNGNGNCYTCMGCRSFLTPYVDENGKPKYYGRFNQGVVTINLVDVACTAARDGSKSEEKFWQVLDERLELCHRALQCRHERLEGTLSDAAPILWQYGALARLKKGEPIDKLLHGGYSTLSLGYAGLWECVYEITGKKLTEKEGEEFGLRVMQRLNDACAEWKAAENIDYSIYGTPLESTTYKFAKCLQNRFGIIKGVTDRNYITNSYHIHVTEKIDAFSKLELESKFQKLSPGGAISYVEVPNMQQNIPAVLEVMKFIYNNIMYAELNTKSDYCQVCGYDGEIQIVEEDGKLVWRCPNCGNEDQSKMNVARRTCGYIGSQFWNQGRTQEIKERVLHL

SEQ ID NO: 853 - protein, 768 aa, Unknown
  Description of Unknown: uncultivated organism sequence
  Category: MG60 effectors
  Description: MG60-62 effector
MFCSCKKNLCVVIYIYDATKTYDCAKKSIVYKSIIKGAEVMKIIKRNGAEETFDRQKIKDAIAKANNETDGTPELTDRQIDYISLVIEDHCNEMNRALSVEEIQELVETHIILQGAPETAKRYIRYRFTRNLARASNTTDNQILSLIECNNEEVKQENSNKNPTVNSVQRDYMAGEVSKDLTKRILLPEDIVKAHEEGLIHFHDADYFAQHMHNCDLVNLEDMLQNGTVISGTMIEKPHSFSTACNIATQIIAQVASNQYGGQSISLAHLAPFVQISREKITRQVRAEMEEFGIDADDEQVKSLVEKRVRDEIKRGVQTIQYQVVTLLTTNGQAPFVTVFMYLNEAKNEQEKKDLAIIIEEVLKQRIKGTKNEVGVWVTPAFPKLIYVLEEDNITEDSRFWYLTKLAAECTAKRMVPDYISEKIMLKLKIDKNGNGNCYTCMGCRSFLTPYVDENGKPKYYGRFNQGVVTINLVDVACTAARDGSKSEEKFWQVLDERLELCHRALQCRHERLEGTLSDAAPILWQYGALARLKKGEPIDKLLHGGYSTLSLGYAGLWECVYEITGKKLTEKEGEEFGLRVMQRLNDACAEWKAAENIDYSIYGTPLESTTYKFAKCLQNRFGIIKGVTDRNYITNSYHIHVTEKIDAFSKLELESKFQKLSPGGAISYVEVPNMQQNIPAVLEVMKFIYNNIMYAELNTKSDYCQVCGYDGEIQIVEEDGKLVWRCPNCGNEDQSKMNVARRTCGYIGSQFWNQGRTQEIKERVLHL

SEQ ID NO: 854 - protein, 768 aa, Unknown
  Description of Unknown: uncultivated organism sequence
  Category: MG60 effectors
  Description: MG60-63 effector
MFCSCKKNLCVVIYIYDATKTYDCAKKLIVYKSIIKGAEVMKIIKRNGAEETFDRQKIKDAIAKANNETDGAPELTDRQIDYISLVIEDHCNEMNRALSVEEIQELVETHIILQGAPETAKRYIRYRFTRNLARASNTTDNQILSLIECNNEEVKQENSNKNPTVNSVQRDYMAGEVSKDLTKRILLPEDIVKAHEEGLIHFHDADYFAQHMHNCDLVNLEDMLQNGTVISGTMIEKPHSFSTACNIATQIIAQVASNQYGGQSISLAHLAPFVQISREKITRQVRAEMEEFGIDADDEQVKNLVEKRVRDEIKRGVQTIQYQVVTLLTTNGQAPFVTVFMYLNEAKNEQEKKDLAIIIEEVLKQRIKGTKNEVGVWVTPAFPKLIYVLEEDNITEDSRFWYLTKLAAECTAKRMVPDYISEKIMLKLKIDKNGNGNCYTCMGCRSFLTPYVDENGKPKYYGRFNQGVVTINLVDVACTAARDGSKSEEKFWQVLDERLELCHRALQCRHERLEGTLSDAAPILWQYGALARLKKGEPIDKLLHGGYSTLSLGYAGLWECVYEITGKKLTEKEGEEFGLRVMQRLNDACAEWKAAENIDYSIYGTPLESTTYKFAKCLQNRFGIIKGVTDRNYITNSYHIHVTEKIDAFSKLELESKFQKLSPGGAISYVEVPNMQQNIPAVLEVMKFIYNNIMYAELNTKSDYCQVCGYDGEIQIVEEDGKLVWRCPNCGNEDQSKMNVARRTCGYIGSQFWNQGRTQEIKERVLHL

SEQ ID NO: 855 - protein, 760 aa, Unknown
  Description of Unknown: uncultivated organism sequence
  Category: MG60 effectors
  Description: MG60-64 effector
MLVVIYIYNATKTYDCAKKLIVYKSIIKGAEVMKIIKRNGAEETFDRQKIKDAIAKANNETDGTPELTDRQIDYISLVIEDHCNEMNRALSVEEIQELVETHIILQGAPETAKRYIRYRFTRNLARASNTTDNQILSLIECNNEEVKQENSNKNPTVNSVQRDYMAGEVSKDLTKRILLPEDIVKAHEEGLIHFHDADYFAQHMHNCDLVNLEDMLQNGTVISGTMIEKPHSFSTACNIATQIIAQVASNQYGGQSISLAHLAPFVQISREKITRQVRAEMEEFGIAADDEQVKSLVEKRVRDEIKRGVQTIQYQVVTLLTTNGQAPFVTVFMYLNEAKNEQEKKDLAIIIEEVLKQRIKGTKNEVGVWVTPAFPKLIYVLEEDNITEDSRFWYLTKLAAECTAKRMVPDYISEKIMLKLKIDKNGNGNCYTCMGCRSFLTPYVDENGKPKYYGRFNQGVVTINLVDVACTAARDGNKSEEKFWQVLDERLELCHRALQCRHERLEGTLSDAAPILWQYGALARLKKGEPIDKLLHGGYSTLSLGYAGLWECVYEITGKKLTEKEGEEFGLRVMQRLNDACAEWKAAENIDYSIYGTPLESTTYKFAKCLQNRFGIIKGVTDRNYITNSYHIHVTEKIDAFSKLELESKFQKLSPGGAISYVEVPNMQQNIPAVLEVMKFIYNNIMYAELNTKSDYCQVCGYDGEIQIVEEDGKLVWRCPNCGNEDQSKMNVARRTCGYIGSQFWNQGRTQEIKERVLHL

SEQ ID NO: 856 - protein, 768 aa, Unknown
  Description of Unknown: uncultivated organism sequence
  Category: MG60 effectors
  Description: MG60-65 effector
MFCSCKKNLCVVIYIYDATKTYDCAKKLIVYKSIIKGAEVMKIIKRNGAEETFDRQKIKDAISKANNETDGTPELTDRQIDYISLVIEDHCNEMNRALSVEEIQELVETHIILQGAPETAKRYIRYRFTRNLARASNTTDNQILSLIECNNEEVKQENSNKNPTVNSVQRDYMAGEVSKDLTKRILLPEDIVKAHEEGLIHFHDADYFAQHMHNCDLVNLEDMLQNGTVISGTMIEKPHSFSTACNIATQIIAQVASNQYGGQSISLAHLAPFVQISREKITRQVRAEMEEFGIDADDEQVKSLVEKRVRDEIKRGVQTIQYQVVTLLTTNGQAPFVTVFMYLNEAKNEQEKKDLAIIIEEVLKQRIKGTKNEVGVWVTPAFPKLIYVLEEDNITEDSRFWYLTKLAAECTAKRMVPDYISEKIMLKLKIDKNGNGNCYTCMGCRSFLTPYVDENGKPKYYGRFNQGVVTINLVDVACTAARDGNKSEEKFWQVLDERLELCHRALQCRHERLEGTLSDAAPILWQYGALARLKKGEPIDKLLHGGYSTLSLGYAGLWECVYEITGKKLTEKEGEEFGLRVMQRLNDACAEWKAAENIDYSIYGTPLESTTYKFAKCLQNRFGIIKGVTDRNYITNSYHIHVTEKIDAFSKLELESKFQKLSPGGAISYVEVPNMQQNIPAVLEVMKFIYNNIMYAELNTKSDYCQVCGYDGEIQIVEEDGKLVWRCPNCGNEDQSKMNVARRTCGYIGSQFWNQGRTQEIKERVLHL

SEQ ID NO: 857 - protein, 769 aa, Unknown
  Description of Unknown: uncultivated organism sequence
  Category: MG60 effectors
  Description: MG60-66 effector
MKVIKRDGTIVEYDREKIRIAIEKANKEVSRKEKATDSEIEEIMSYIEDLKKGRILVEDIQDIIEEKLMEIKRYELAKKYITYRYTRALVRKANTTDQSIKELIEGESEYWNNENANKNARVVTTQRDYLAGITSTDITRRFLLPEDVVKAHDEGIIHFHDADYFAQNALTNCELINLEDMLQNGTIMNGVMIEKPHRFITACTIATQIILAVTSSTYGGATVSLAHLAPFVRSSYEKYYKKYKENGLSKEQCEKFAKEDTKKEVADGVQTFNYQVNSMTNTNGQAPFLSVCMYLGETDEYKEELAMIIEEFLNQRILGFKNEKGVYITPAFPKLLYVLEEDNIHENSKYWYLTELAAKCTAKRMVPDYISEKIMKQMKVDANGDGQCYPCMGCRSFLTPYIDPVTKKPKYYGRFNQGVVTINLVDVALSSGKDLKKFWKIYDERLELCHKALQARHERLAKATSDIAPILWQHGAFARLPKGASIHPLLHGGYSTISLGYAGLYECVKYMTGKSHTDNGDGKDFAIEVMKKMNEKCAEWKEAEDIDYSVYGTPIESTTYKFAKCLQKRFGKIKGITDKNYITNSYHVPVFEEIDAFSKLKLESEFQRLSPGGAISYVETPNLQNNLEVVLQIMKFIYDNIMYAELNTKSDYCQKCGYTGEILIDDNLEWYCPNCGNRDHNTLNVARRTCGYIGSNFWNKGRTQEIKERVLHIDNKDDDCDCDECNCDHANTDTSKEEKSEEKQMNFMDYDVEEEITKSKKHMKQPAMV

SEQ ID NO: 858 - protein, 768 aa, Unknown
  Description of Unknown: uncultivated organism sequence
  Category: MG60 effectors
  Description: MG60-67 effector
MFCSCKKNLCVVIYIYDATKTYDCAKKLIVYKSIIKGAEVMKIIKRNGAEETFDRQKIKDAIAKANNETDGTPELTDRQIDYISLVIEDHCNEMNRALSVEEIQELVETHIILQGAPETAKRYIRYRFTRNLARASNTTDNQILSLIECNNEEVKQENSNKNPTVNSVQRDYMAGEVSKDLTKRILLPEDIVKAHEEGLIHFHDADYFAQHMHNCDLVNLEDMLQNGTVISGTMIEKPHSFSTACNIATQIIAQVASNQYGGQSISLAHLAPFVQISREKITRQVRAEMEEFGIDADDEQVKSLVEKRVRDEIKRGVQTIQYQVVTLLTTNGQAPFVTVFMYLNEAKNEQEKKDLAIIIEEVLKQRIKGTKNEVGVWVTPAFPKLIYVLEEDNITEDSRFWYLTKLAAECTAKRMVPDYISEKIMLKLKIDKNGNGNCYTCMGCRSFLTPYVDENGKPKYYGRFNQGVVTINLVDVACTAARDGNKSEEKFWQVLDERLELCHRALQCRHERLEGTLSDAAPILWQYGALARLKKGEPIDKLLHGGYSTLSLGYAGLWECVYEIKGKKLTEKEGEEFGLRVMQRLNDACAEWKAAENIDYSIYGTPLESTTYKFAKCLQNRFGIIKGVTDRNYITNSYHIHVTEKIDAFSKLELESKFQKLSPGGAISYVEVPNMQQNIPAVLEVMKFIYNNIMYAELNTKSDYCQVCGYDGEIQIVEEDGKLVWRCPNCGNEDQSKMNVARRTCGYIGSQFWNQGRTQEIKERVLHL

SEQ ID NO: 859 - protein, 768 aa, Unknown
  Description of Unknown: uncultivated organism sequence
  Category: MG60 effectors
  Description: MG60-68 effector
MFCSCKKNLCVVIYIYNATKTYDCAKKLIVYKSIIKGAEVMKIIKRNGAEETFDRQKIKDAIAKANNETDGTPELTDRQIDYISLVIEDHCNEMNRALSVEEIQELVETHIILQGAPETAKRYIRYRFTRNLARASNTTDNQILSLIECNNEEVKQENSNKNPTVNSVQRDYMAGEVSKDLTKRILLPEDIVKAHEEGLIHFHDADYFAQHMHNCDLVNLEDMLQNGTVISGTMIEKPHSFSTACNIATQIIAQVASNQYGGQSISLAHLAPFVQISREKITRQVRAEMEEFGIAADDEQVKSLVEKRVRDEIKRGVQTIQYQVVTLLTTNGQAPFVTVFMYLNEAKNEQEKKDLAIIIEEVLKQRIKGTKNEVGVWVTPAFPKLIYVLEEDNITEDSRFWYLTKLAAECTAKRMVPDYISEKIMLKLKIDKNGNGNCYTCMGCRSFLTPYVDENGKPKYYGRFNQGVVTINLVDVACTAARDGNKSEEKFWQVLDERLELCHRALQCRHERLEGTLSDAAPILWQYGALARLKKGEPIDKLLHGGYSTLSLGYAGLWECVYEITGKKLTEKEGEEFGLRVMQRLNDACAEWKAAENIDYSIYGTPLESTTYKFAKCLQNRFGIIKGVTDRNYITNSYHIHVTEKIDAFSKLELESKFQKLSPGGAISYVEVPNMQQNIPAVLEVMKFIYNNIMYAELNTKSDYCQVCGYDGEIQIVEEDGKLVWRCPNCGNEDQSKMNVARRTCGYIGSQFWNQGRTQEIKERVLHL

SEQ ID NO: 860 - protein, 768 aa, Unknown
  Description of Unknown: uncultivated organism sequence
  Category: MG60 effectors
  Description: MG60-69 effector
MFCSCKKNLCVVIYIYDATKTYDCAKKLIVYKSIIKGAEVMKIIKRNGAEETFDRQKIKDAIAKANNETDGTPELTDRQIDYISLVIEDHCNEMNRALSVEEIQELVETHIILQGAPETAKRYIRYRFTRNLARASNTTDNQILSLIECNNEEVKQENSNKNPTVNSVQRDYMAGEVSKDLTKRILLPEDIVKAHEEGLIHFHDADYFAQHMHNCDLVNLEDMLQNGTVISGTMIEKPHSFSTACNIATQIIAQVASNQYGGQSISLAHLAPFVQISREKITRQVRAEMEEFGIAADDEQVKSLVEKRVRDEIKRGVQTIQYQVVTLLTTNGQAPFVTVFMYLNEAKNEQEKKDLAIIIEEVLKQRIKGTKNEVGVWVTPAFPKLIYVLEEDNITEDSRFWYLTKLAAECTAKRMVPDYISEKIMLKLKVDKNGNGNCYTCMGCRSFLTPYVDENGKPKYYGRFNQGVVTINLVDVACTAARDGSKSEEKFWQVLDERLELCHRALQCRHERLEGTLSDAAPILWQYGALARLKKGEPIDKLLHGGYSTLSLGYAGLWECVYEITGKKLTEKEGEEFGLRVMQRLNDACAEWKAAENIDYSIYGTPLESTTYKFAKCLQNRFGIIKGVTDRNYITNSYHIHVTEKIDAFSKLELESKFQKLSPGGAISYVEVPNMQQNIPAVLEVMKFIYNNIMYAELNTKSDYCQVCGYDGEIQIVEEDGKLVWRCPNCGNEDQSKMNVARRTCGYIGSQFWNQGRTQEIKERVLHL

SEQ ID NO: 861 - protein, 768 aa, Unknown
  Description of Unknown: uncultivated organism sequence
  Category: MG60 effectors
  Description: MG60-70 effector
MFCSCKKKLCVVIYIYNATKTYDCAKKLIVYKSIIKGAEVMKIIKRNGAEETFDRQKIKDAIAKANNETDGTPELTDRQIDYISLVIEDHCNEMNRALSVEEIQELVETHIILQGAPETAKRYIRYRFTRNLARASNTTDNQILSLIECNNEEVKQENSNKNPTVNSVQRDYMAGEVSKDLTKRILLPEDIVKAHEEGLIHFHDADYFAQHMHNCDLVNLEDMLQNGTVISGTMIEKPHSFSTACNIATQIIAQVASNQYGGQSISLAHLAPFVQISREKITRQVRAEMEEFGIDADDEQVKSLVEKRVRDEIKRGVQTIQYQVVTLLTTNGQAPFVTVFMYLNEAKNEQEKKDLAIIIEEVLKQRIKGTKNEVGVWVTPAFPKLIYVLEEDNITEDSRFWYLTKLAAECTAKRMVPDYISEKIMLKLKIDKNGNGNCYTCMGCRSFLTPYVDENGKPKYYGRFNQGVVTINLVDVACTAARDGSKSEEKFWQVLDERLELCHRALQCRHERLEGTLSDAAPILWQYGALARLKKGEPIDKLLHGGYSTLSLGYAGLWECVYEITGKKLTEKEGEEFGLRVMQRLNDACAEWKAAENIDYSIYGTPLESTTYKFAKCLQNRFGIIKGVTDRNYITNSYHIHVTEKIDAFSKLELESKFQKLSPGGAISYVEVPNMQQNIPAVLEVMKFIYNNIMYAELNTKSDYCQVCGYDGEIQIVEEDGKLVWRCPNCGNEDQSKMNVARRTCGYIGSQFWNQGRTQEIKERVLHL

SEQ ID NO: 862 - protein, 768 aa, Unknown
  Description of Unknown: uncultivated organism sequence
  Category: MG60 effectors
  Description: MG60-71 effector
MFCSCKKNLRVVIYIYNATKTYDCAKKLIVYKSIIKGAEVMKIIKRNGAEETFDRQKIKDAIAKANNETDGTPELTDRQIDYISLVIEDHCNEMNRALSVEEIQELVETHIILQGAPETAKRYIRYRFTRNLARASNTTDNQILSLIECNNEEVKQENSNKNPTVNSVQRDYMAGEVSKDLTKRILLPEDIVKAHEEGLIHFHDADYFAQHMHNCDLVNLEDMLQNGTVISGTMIEKPHSFSTACNIATQIIAQVASNQYGGQSISLAHLAPFVQISREKITRQVRAEMEEFGIAADDEQVKSLVEKRVRDEIKRGVQTIQYQVVTLLTTNGQAPFVTVFMYLNEAKNEQEKKDLAIIIEEVLKQRIKGTKNEVGVWVTPAFPKLIYVLEEDNITEDSRFWYLTKLAAECTAKRMVPDYISEKIMLELKIDKNGNGNCYTCMGCRSFLTPYVDENGKPKYYGRFNQGVVTINLVDVACTAARDGNKSEEKFWQVLDERLELCHRALQCRHERLEGTLSDAAPILWQYGALARLKKGEPIDKLLHGGYSTLSLGYAGLWECVYEITGKKLTEKEGEEFGLRVMQRLNDACAEWKAAENIDYSIYGTPLESTTYKFAKCLQNRFGIIKGVTDRNYITNSYHIHVTEKIDAFSKLELESKFQKLSPGGAISYVEVPNMQQNIPAVLEVMKFIYNNIMYAELNTKSDYCQVCGYDGEIQIVEEDGKLVWRCPNCGNEDQSKMNVARRTCGYIGSQFWNQGRTQEIKERVLHL

SEQ ID NO: 863 - protein, 768 aa, Unknown
  Description of Unknown: uncultivated organism sequence
  Category: MG60 effectors
  Description: MG60-72 effector
MFCSCKKNLCVVIYIYDATKTYDCAKKLIVYKSIIKGAEVMKIIKRNGAEETFDRQKIKDAIAKANNETDGTPELTDRQIDYISLVIEDHCNEMNRALSVEEIQELVETHIILQGAPETAKRYIRYRFTRNLARASNTTDNQILSLIECNNEEVKQENSNKNPTVNSVQRDYMAGEVSKDLTKRILLPEDIVKAHEEGLIHFHDADYFAQHMHNCDLVNLEDMLQNGTVISGTMIEKPHSFSTACNIATQIIAQVASNQYGGQSISLAHLAPFVQISREKITRQVRAEMEEFGIAADDEQVKSLVEKRVRDEIKRGVQTIQYQVVTLLTTNGQAPFVTVFMYLNEAKNEQEKKDLAIIIEEVLKQRIKGTKNEVGVWVTPAFPKLIYVLEEDNITEDSRFWYLTKLAAECTAKRMVPDYISEKIMLKLKIDKNGNGNCYTCMGCRSFLTPYVDENGKPKYYGRFNQGVVTINLVDVACTAARDGNKSEEKFWQVLDERLELCHRALQCRHERLEGTLSDAAPILWQYGALARLKKGEPIDKLLHGGYSTLSLGYAGLWECVYEITGKKLTEKEGEEFGLRVMQRLNDACAEWKAAENIDYSIYGTPLESTTYKFAKCLQNRFGIIKGVTDRNYITNSYHIHVTEKIDAFSKLELESKFQKLSPGGAISYVEVPNMQQNIPAVLEVMKFIYNNIMYAELNTKSDYCQVCGYDGEIQIVEEDGKLVWRCPNCGNEDQSKMNVARRTCGYIGSQFWNQGRTQEIKERVLHL

SEQ ID NO: 864 - protein, 768 aa, Unknown
  Description of Unknown: uncultivated organism sequence
  Category: MG60 effectors
  Description: MG60-73 effector
MFCSCKKNLCVVIYIYNATKTYDCAKKLIVYKSIIKGAEVMKIIKRNGAEETFDRQKIKDAIAKANNETDGTPELTDRQIDYISLVIEDHCNEMNRALSVEEIQELVETHIILQGAPETAKRYIRYRFTRNLARASNTTDNQILSLIECNNEEVKQENSNKNPTVNSVQRDYMAGEVSKDLTKRILLPEDIVKAHEEGLIHFHDADYFAQHMHNCDLVNLEDMLQNGTVISGTMIEKPHSFSTACNIATQIIAQVASNQYGGQSISLAHLAPFVQISREKITRQVRAEMEEFGIDADDEQVKSLVEKRVRDEIKRGVQTIQYQVVTLLTTNGQAPFVTVFMYLNEAKNEQEKKDLAIIIEEVLKQRIKGTKNEVGVWVTPAFPKLIYVLEEDNITEDSRFWYLTKLAAECTAKRMVPDYISEKIMLKLKIDKNGNGNCYTCMGCRSFLTPYVDENGNPKYYGRFNQGVVTINLVDVACTAARDGSKSEEKFWQVLDERLELCHRALQCRHERLEGTLSDAAPILWQYGALARLKKGEPIDKLLHGGYSTLSLGYAGLWECVYEITGKKLTEKEGEEFGLRVMQRLNDACAEWKAAENIDYSIYGTPLESTTYKFAKCLQNRFGIIKGVTDRNYITNSYHIHVTEKIDAFSKLELESKFQKLSPGGAISYVEVPNMQQNIPAVLEVMKFIYNNIMYAELNTKSDYCQVCGYDGEIQIVEEDGKLVWRCPNCGNEDQSKMNVARRTCGYIGSQFWNQGRTQEIKERVLHL

SEQ ID NO: 865 - protein, 768 aa, Unknown
  Description of Unknown: uncultivated organism sequence
  Category: MG60 effectors
  Description: MG60-74 effector
MFCSCKKNLCVVIYIYNATKTYDCAKKIIVYKSIIKGAEVMKIIKRNGAEETFDRQKIKDAISKANNETDGTPELTDRQIDYISLVIEDHCNEMNRALSVEEIQELVETHIILQGAPETAKRYIRYRFTRNLARASNTTDNQILSLIECNNEEVKQENSNKNPTVNSVQRDYMAGEVSKDLTKRILLPEDIVKAHEEGLIHFHDADYFAQHMHNCDLVNLEDMLQNGTVISGTMIEKPHSFSTACNIATQIIAQVASNQYGGQSISLAHLAPFVQISREKITRQVRAEMEEFGIAADDEQVKSLVEKRVRDEIKRGVQTIQYQVVTLLTTNGQAPFVTVFMYLNEAKNEQEKKDLAIIIEEVLKQRIKGTKNEVGVWVTPAFPKLIYVLEEDNITEDSRFWYLTKLAAECTAKRMVPDYISEKIMLKLKIDKNGNGNCYTCMGCRSFLTPYVDENGKPKYYGRFNQGVVTINLVDVACTAARDGNKSEEKFWQVLDERLELCHRALQCRHERLEGTLSDAAPILWQYGALARLKKGEPIDKLLHGGYSTLSLGYAGLWECVYEITGKKLTEKEGEEFGLRVMQRLNDACAEWKAAENIDYSIYGTPLESTTYKFAKCLQNRFGIIKGVTDRNYITNSYHIHVTEKIDAFSKLELESKFQKLSPGGAISYVEVPNMQQNIPAVLEVMKFIYNNIMYAELNTKSDYCQVCGYDGEIQIVEEDGKLVWRCPNCGNEDQSKMNVARRTCGYIGSQFWNQGRTQEIKERVLHL

SEQ ID NO: 866 - protein, 768 aa, Unknown
  Description of Unknown: uncultivated organism sequence
  Category: MG60 effectors
  Description: MG60-75 effector
MFCSCKKKLCVVIYIYDATKTYDCAKKSIVYKSIIKGAEVMKIIKRNGAEETFDRQKIKDAIAKANNETDGTPELTDRQIDYISLVIEDHCNEMNRALSVEEIQELVETHIILQGAPETAKRYIRYRFTRNLARASNTTDNQILSLIECNNEEVKQENSNKNPTVNSVQRDYMAGEVSKDLTKRILLPEDIVKAHEEGLIHFHDADYFAQHMHNCDLVNLEDMLQNGTVISGTMIEKPHSFSTACNIATQIIAQVASNQYGGQSISLAHLAPFVQISREKITRQVRAEMEEFGIDADDEQVKSLVEKRVRDEIKRGVQTIQYQVVTLLTTNGQAPFVTVFMYLNEAKNEQEKKDLAIIIEEVLKQRIKGTKNEVGVWVTPAFPKLIYVLEEDNITEDSRFWYLTKLAAECTAKRMVPDYISEKIMLKLKIDKNGNGNCYTCMGCRSFLTPYVDENGKPKYYGRFNQGVVTINLVDVACTAARDGNKSEEKFWQVLDERLELCHRALQCRHERLEGTLSDAAPILWQYGALARLKKGEPIDKLLHGGYSTLSLGYAGLWECVYEITGKKLTEKEGEEFGLRVMQRLNDACAEWKAAENIDYSIYGTPLESTTYKFAKCLQNRFGIIKGVTDRNYITNSYHIHVTEKIDAFSKLELESKFQKLSPGGAISYVEVPNMQQNIPAVLEVMKFIYNNIMYAELNTKSDYCQVCGYDGEIQIVEEDGKLVWRCPNCGNEDQSKMNVARRTCGYIGSQFWNQGRTQEIKERVLHL

SEQ ID NO: 867 - protein, 768 aa, Unknown
  Description of Unknown: uncultivated organism sequence
  Category: MG60 effectors
  Description: MG60-76 effector
MFCSCKKNLRVVIYICNAIKTYDRAKKLIVYKSIVKGVEVMKIIKRNGAEETFDRQKIKDAIAKANNETDGTPELTDRQIDYISLVIEDHCNEMNRALSVEEIQELVETHIILQGAPETAKRYIRYRFTRNLARASNTTDNQILSLIECNNEEVKQENSNKNPTVNSVQRDYMAGEVSKDLTKRILLPEDIVKAHEEGLIHFHDADYFAQHMHNCDLVNLEDMLQNGTVISGTMIEKPHSFSTACNIATQIIAQVASNQYGGQSISLAHLAPFVQISREKITRQVRAEMEEFGIAADDEQVKSLVEKRVRDEIKRGVQTIQYQVVTLLTTNGQAPFVTVFMYLNEAKNEQEKKDLAIIIEEVLKQRIKGTKNEVGVWVTPAFPKLIYVLEEDNITEDSRFWYLTKLAAECTAKRMVPDYISEKIMLKLKIDKNGNGNCYTCMGCRSFLTPYVDENGKPKYYGRFNQGVVTINLVDVACTAARDGNKSEEKFWQVLDERLELCHRALQCRHERLEGTLSDAAPILWQYGALARLKKGEPIDKLLHGGYSTLSLGYAGLWECVYEITGKKLTEKEGEEFGLRVMQRLNDACAEWKAAENIDYSIYGTPLESTTYKFAKCLQNRFGIIKGVTDRNYITNSYHIHVTEKIDAFSKLELESKFQKLSPGGAISYVEVPNMQQNIPAVLEVMKFIYNNIMYAELNTKSDYCQVCGYDGEIQIVEEDGKLVWRCPNCGNEDQSKMNVARRTCGYIGSQFWNQGRTQEIKERVLHL

SEQ ID NO: 868 - protein, 768 aa, Unknown
  Description of Unknown: uncultivated organism sequence
  Category: MG60 effectors
  Description: MG60-77 effector
MFCSCKKKLCVVIYIYDATKTYDCAKKLIVYKSIIKGAEVMKIIKRNGAEETFDRQKIKDAISKANNETDGTPELTDRQIDYISLVIEDHCNEMNRALSVEEIQELVETHIILQGAPETAKRYIRYRFTRNLARASNTTDNQILSLIECNNEEVKQENSNKNPTVNSVQRDYMAGEVSKDLTKRILLPEDIVKAHEEGLIHFHDADYFAQHMHNCDLVNLEDMLQNGTVISGTMIEKPHSFSTACNIATQIIAQVASNQYGGQSISLAHLAPFVQISREKITRQVRAEMEEFGIDADDEQVKSLVEKRVRDEIKRGVQTIQYQVVTLLTTNGQAPFVTVFMYLNEAKNEQEKKDLAIIIEEVLKQRIKGTKNEVGVWVTPAFPKLIYVLEEDNITEDSRFWYLTKLAAECTAKRMVPDYISEKIMLKLKIDKNGNGNCYTCMGCRSFLTPYVDENGKPKYYGRFNQGVVTINLVDVACTAARDGSKSEEKFWQVLDERLELCHRALQCRHERLEGTLSDAAPILWQYGALARLKKGEPIDKLLHGGYSTLSLGYAGLWECVYEITGKKLTEKEGEEFGLRVMQRLNDACAEWKAAENIDYSIYGTPLESTTYKFAKCLQNRFGIIKGVTDRNYITNSYHIHVTEKIDAFSKLELESKFQKLSPGGAISYVEVPNMQQNIPAVLEVMKFIYNNIMYAELNTKSDYCQVCGYDGEIQIVEEDGKLVWRCPNCGNEDQSKMNVARRTCGYIGSQFWNQGRTQEIKERVLHL

SEQ ID NO: 869 - protein, 768 aa, Unknown
  Description of Unknown: uncultivated organism sequence
  Category: MG60 effectors
  Description: MG60-78 effector
MFCSCKKNLCVVIYIYNATKTYDCAKKLIVYKSIIKGAEVMKIIKRNGAEETFDRQKIKDAIAKANNETDGTPELTDRQIDYISLVIEDHCNEMNRALSVEEIQELVETHIILQGAPETAKRYIRYRFTRNLARASNTTDNQILSLIECNNEEVKQENSNKNPTVNSVQRDYMAGEVSKDLTKRILLPEDIVKAHEEGLIHFHDADYFAQHMHNCDLVNLEDMLQNGTVISGTMIEKPHSFSTACNIATQIIAQVASNQYGGQSISLAHLAPFVQISREKITRQVRAEMEEFGIDADDEQVKSLVEKRVRDEIKRGVQTIQYQVVTLLTTNGQAPFVTVFMYLNEAKNEQEKKDLAIIIEEVLKQRIKGTKNEVGVWVTPAFPKLIYVLEEDNITEDSRFWYLTKLAAECTAKRMVPDYISEKIMLKLKIDKNGNGNCYTCMGCRSFLTPYVDENGKPKYYGRFNQGVVTINLVDVACTAARDGNKSEEKFWQVLDERLELCHRALQCRHERLEGTLSDAAPILWQYGALARLKKGEPIDKLLHGGYSTLSLGYAGLWECVYEITGKKLTEKEGEEFGLRVMQRLNDACAEWKAAENIDYSIYGTPLESTTYKFAKCLQNRFGIIKGVTDRNYITNSYHIHVTEKIDAFSKLELESKFQKLSPGGAISYVEVPNMQQNIPAVLEVMKFIYNNIMYAELNTKSDYCQVCGYDGEIQIVEEDGKLVWRCPNCGNEDQSKMNVARRTCGYIGSQFWNQGRTQEIKERVLHL

SEQ ID NO: 870 - protein, 763 aa, Unknown
  Description of Unknown: uncultivated organism sequence
  Category: MG60 effectors
  Description: MG60-79 effector
MKTIQQLYSIFVAFATVFLKNKYIIRTYKSNKKYLIDIRKMALLKDLYTRKEWGKMKVIKRDGRTIEFDREKIEVAIEKANKEVRGKEKATKDEINEIIAYIEDLGKKRMLVEDIQDVIEEKLMELDKYELAKKYIVYRYTRALVRKSNTTDESILGLIKNENKELAEENSNKNTMLASTQRDYIAGEVSRDLTKRILLPEKISKAHEEGILHFHDADYFVQPIFNCCLINIGDMLDNGTAMNGKMIETPKSFQVACTVTTQIIAAVASNQYGGQSVDLKHLGKYLRRSHDKFQKRLTEKYGGKLPKQTIDDMIRDRVKEELAAGVQTIQYQINTLMTTNGQSPFVTLFLHLEPDDEYIKENAMIIEEVLKQRIQGIKNEVGVYVTPAFPKLVYVLDEHNCLKGGKYDYLTRLAVKCSAKRMYPDYISAKKMKENYEGNVFSPMGCRSFLVPWKDENGNYKFEGRFNQGVVSINLPQIAIIAQGDEDKFWKLFDERLELCREALMCRHYALLGTSSDISPIHWQNGAIARLKKGEKIDKYLKDGYSTLSLGYIGIYETTKLIKGVSHTTPEGHDFAIKIMKYLKDRTNLWRKETGLGFSLYGTPAESLCYRFARIDKEKFGSIPDVTDKGYYTNSYHVDVREKIDAFHKLKFESEFQPLSAGGAISYIEVPNMKNNLTALEEVVKFIYDNIQYAEFNTKSDYCQVCGYDGEMIINDQNEWECPQCGNKDHNKMNVVRRTCGYLGENFWNVGKTKEIKSRVLHL

SEQ ID NO: 871 - protein, 768 aa, Unknown
  Description of Unknown: uncultivated organism sequence
  Category: MG60 effectors
  Description: MG60-80 effector
MFYSCKRNLCVVIYIYNATKTYDCAKKLIVYKSIIKGAEVMKIIKRNGAEETFDRQKIKDAIAKANNETDGTPELTDRQIDYISLVIEDHCNEMNRALSVEEIQELVETHIILQGAPETAKRYIRYRFTRNLARASNTTDNQILSLIECNNEEVKQENSNKNPTVNSVQRDYMAGEVSKDLTKRILLPEDIVKAHEEGLIHFHDADYFAQHMHNCDLVNLEDMLQNGTVISGTMIEKPHSFSTACNIATQIIAQVASNQYGGQSISLAHLAPFVQISREKITRQVRAEMEEFGIDADDEQVKSLVEKRVRDEIKRGVQTIQYQVVTLLTTNGQAPFVTVFMYLNEAKNEQEKKDLAIIIEEVLKQRIKGTKNEVGVWVTPAFPKLIYVLEEDNITEDSRFWYLTKLAAECTAKRMVPDYISEKIMLKLKIDKNGNGNCYTCMGCRSFLTPYVDENGKPKYYGRFNQGVVTINLVDVACTAARDGNKSEEKFWQVLDERLELCHRALQCRHERLEGTLSDAAPILWQYGALARLKKGEPIDKLLHGGYSTLSLGYAGLWECVYEIKGKKLTEKEGEEFGLRVMQRLNDACAEWKAAENIDYSIYGTPLESTTYKFAKCLQNRFGIIKGVTDRNYITNSYHIHVTEKIDAFSKLELESKFQKLSPGGAISYVEVPNMQQNIPAVLEVMKFIYNNIMYAELNTKSDYCQVCGYDGEIQIVEEDGKLVWRCPNCGNEDQSKMNVARRTCGYIGSQFWNQGRTQEIKERVLHL

SEQ ID NO: 872 - protein, 760 aa, Unknown
  Description of Unknown: uncultivated organism sequence
  Category: MG60 effectors
  Description: MG60-81 effector
MCVVIYIYDATKTYDCAKKLFVYKSIIKGAEVMKIIKRNGAEETFDRQKIKDAIAKANNETDGTPELTDRQIDYISLVIEDHCNEMNRALSVEEIQELVETHIILQGAPETAKRYIRYRFTRNLARASNTTDNQILSLIECNNEEVKQENSNKNPTVNSVQRDYMAGEVSKDLTKRILLPEDIVKAHEEGLIHFHDADYFAQHMHNCDLVNLEDMLQNGTVISGTMIEKPHSFSTACNIATQIIAQVASNQYGGQSISLAHLAPFVQISREKITRQVRAEMEEFGIAADDEQVKSLVEKRVRDEIKRGVQTIQYQVVTLLTTNGQAPFVTVFMYLNEAKNEQEKKDLAIIIEEVLKQRIKGTKNEVGVWVTPAFPKLIYVLEEDNITEDSRFWYLTKLAAECTAKRMVPDYISEKIMLELKIDKNGNGNCYTCMGCRSFLTPYVDENGKPKYYGRFNQGVVTINLVDVACTAARDGNKSEEKFWQVLDERLELCHRALQCRHERLEGTLSDAAPILWQYGALARLKKGEPIDKLLHGGYSTLSLGYAGLWECVYEITGKKLTEKEGEEFGLRVMQRLNDACAEWKAAENIDYSIYGTPLESTTYKFAKCLQNRFGIIKGVTDRNYITNSYHIHVTEKIDAFSKLELESKFQKLSPGGAISYVEVPNMQQNIPAVLEVMKFIYNNIMYAELNTKSDYCQVCGYDGEIQIVEEDGKLVWRCPNCGNEDQSKMNVARRTCGYIGSQFWNQGRTQEIKERVLHL

SEQ ID NO: 873 - protein, 763 aa, Unknown
  Description of Unknown: uncultivated organism sequence
  Category: MG60 effectors
  Description: MG60-82 effector
MKIIQQLYSIFVAFATVFLKNKYIIRTYKSNKKYLIDIRKMALLKDLYTRKEWGKMKVIKRDGRTIEFDREKIEVAIEKANKEVRGKEKATKDEINEIIAYIEDLGKKRMLVEDIQDVIEEKLMELDKYELAKKYIVYRYTRALVRKSNTTDESILGLIKNENKELAEENSNKNTMLASTQRDYIAGEVSRDLTKRILLPEKISKAHEEGILHFHDADYFVQPIFNCCLINIGDMLDNGTAMNGKMIETPKSFQVACTVTTQIIAAVASNQYGGQSVDLKHLGKYLRRSHDKFQKRLTEKYGGKLPKQTIDDMIRDRVKEELAAGVQTIQYQINTLMTTNGQSPFVTLFLHLEPDDEYIKENAMIIEEVLKQRIQGIKNEVGVYVTPAFPKLVYVLDEHNCLKGGKYDYLTRLAVKCSAKRMYPDYISAKKMKENYEGNVFSPMGCRSFLVPWKDENGNYKFEGRFNQGVVSINLPQIAIIAQGDEDKFWKLFDERLELCREALMCRHYALLGTSSDISPIHWQNGAIARLKKGEKIDKYLKDGYSTLSLGYIGIYETTKLIKGVSHTTPEGHDFAIKIMKYLKDRTNLWRKETGLGFSLYGTPAESLCYRFARIDKEKFGSIPDVTDKGYYTNSYHVDVREKIDAFHKLKFESEFQPLSAGGAISYIEVPNMKNNLTALEEVVKFIYDNIQYAEFNTKSDYCQVCGYDGEMIINDQNEWECPQCGNKDHNKMNVVRRTCGYLGENFWNVGKTKEIKSRVLHL

SEQ ID NO: 874 - protein, 769 aa, Unknown
  Description of Unknown: uncultivated organism sequence
  Category: MG60 effectors
  Description: MG60-83 effector
MKVIKRDGTIVEYDREKIRIAIEKANKEVSRKEKATDSEIEEIMSYIEDLKKGRILVEDIQDIIEEKLMEIKRYELAKKYITYRYTRALVRKANTTDQSIKELIEGESEYWNNENANKNARVVTTQRDYLAGITSTDITRRFLLPEDVVKAHDEGIIHFHDADYFAQNALTNCELINLEDMLQNGTIMNGVMIEKPHRFITACTIATQIILAVTSSTYGGATVSLAHLAPFVRSSYEKYYKKYKDNGLSKEQCEKFAKEDTKKEVADGVQTFNYQVNSMTNTNGQAPFLSVCMYLGETDEYKEELAMIIEEFLNQRILGFKNEKGVYITPAFPKLLYVLEEDNIHENSKYWYLTELAAKCTAKRMVPDYISEKIMKQMKVDANGDGQCYPCMGCRSFLTPYIDPVTNKPKYYGRFNQGVVTINLVDVALSSGKDLKKFWKIYDERLELCHKALQARHERLAKATSDIAPILWQHGAFARLPKGASIHPLLHGGYSTISLGYAGLYECVKYMTGKSHTDNGDGKDFAIEVMKKMNEKCAEWKDAEDIDYSVYGTPIESTTYKFAKCLQKRFGKIKGITDKNYITNSYHVPVFEEIDAFSKLKLESEFQRLSPGGAISYVETPNLQNNLEVVLQIMKFIYDNIMYAELNTKSDYCQKCGYTGEILIDDNLEWYCPNCGNRDHNTLNVARRTCGYIGSNFWNKGRTQEIKERVLHIDNKDDDCDCDECNCDHANTDTSKEEKSEEKQMNFMDYDVEEEITKSKKHMKQPAMV

SEQ ID NO: 875 - protein, 985 aa, Unknown
  Description of Unknown: uncultivated organism sequence
  Category: MG60 effectors
  Description: MG60-84 effector
MQEFAHKVAEEVMSKNTDMTVEDIQDLVVRRLMASKYKEVAKSYVEYRYLHELIRQSNTTDKTIKELIDGDNEYWNTENSNKNPRVVTTQRDYIAGVTSTDIARRLLLPKDVVTAHDEGIIHFHDMDYFAQKSLHNCFLKSTKFITKEGLRSFEDFNNGDIIEVLSIDGKYHKAVVKQYGVQPLYKYTFYNGKKENTHDVIATENHRWILKDGKETTNLKIGDKLCKAPVIYSQNLDWENLTENEQLMWCKGFGLGDGTKEYGTNSTRIRLCESKDLQYLNRFSISGCNIRNTKFKNEDREVVIYNYRKTIPEFNSIKELQCFINGLYCADGRKKQMVNGKYNFGLQSSSLEVINFLREMADTAGLYITKENERTGEITNFTTEQGRPYTILFSFNSDFDFHYTVLNKEFYGEDEVWCLEVEDTHNFILEYGIPTGNCELVNLEDMLQNGTVINGVKIEKPHRLLTAATISTQIITAVTSSSYGGCTINIAHLAPFVRDSFEYHKKKYLSRGFNEVDAEKYANEDTKKEVTDAVQTFNYQVNSMTNTNGQAPFLSVFMYLNDNPEYIKETAMLIEEFLKQRIVGFKNEVGHYVTPAFPKLLYVLDDNNITEDSKYWDLTVLAAKCTAKRMVPDYISAKIMRRDKVDKNGDGNVYGCMGCRSFLTPYVDLETNKPKYWGRFNQGVVTINLPDIALSSHGDFDEFWKLFNERTELCHKALKCRHERLALATADVAPILWRYGALARLPKGASIHPLLHNGYSTLSLGYAGLYECVKYMTGESHSHGKGFDFGIQVMQALNDKCKEWKADENIDYSLYRSPIETTTYKFAKCLKKRFGEIEGVTDKDYITNSYHINVREEIDPFDKLEIESKYQKLSPRGAISYIECADLTKNIPAVLEVLKFIYDHIMYAELNTKSDYCQVCGYEHEIEIVDEDGKLYWRCPNCGNTDQTKMNVARRTCGYIGSQFWNQGRTQEIKERYVHMDNHEE

SEQ ID NO: 876 - protein, 768 aa, Unknown
  Description of Unknown: uncultivated organism sequence
  Category: MG60 effectors
  Description: MG60-85 effector
MFCSCKNNLCVVIYIYDATKTYDCAKKLIVYKSIIKGAEVMKIIKRNGAEETFDRQKIKDAIAKANNETDGTPELTDRQIDYISLVIEDHCNEMNRALSVEEIQELVETHIILQGAPETAKRYIRYRFTRNLARASNTTDNQILSLIECNNEEVKQENSNKNPTVNSVQRDYMAGEVSKDLTKRILLPEDIVKAHEEGLIHFHDADYFAQHMHNCDLVNLEDMLQNGTVISGTMIEKPHSFSTACNIATQIIAQVASNQYGGQSISLAHLAPFVQISREKITRQVRAEMEEFGIDADDEQVKSLVEKRVRDEIKRGVQTIQYQVVTLLTTNGQAPFVTVFMYLNEAKNEQEKKDLAIIIEEVLKQRIKGTKNEVGVWVTPAFPKLIYVLEEDNITEDSRFWYLTKLAAECTAKRMVPDYISEKIMLKLKIDKNGNGNCYTCMGCRSFLTPYVDENGKPKYYGRFNQGVVTINLVDVACTAARDGSKSEEKFWQVLDERLELCHRALQCRHERLEGTLSDAAPILWQYGALARLKKGEPIDKLLHGGYSTLSLGYAGLWECVYEITGKKLTEKEGEEFGLRVMQRLNDACAEWKAAENIDYSIYGTPLESTTYKFAKCLQNRFGIIKGVTDRNYITNSYHIHVTEKIDAFSKLELESKFQKLSPGGAISYVEVPNMQQNIPAVLEVMKFIYNNIMYAELNTKSDYCQVCGYDGEIQIVEEDGKLVWRCPNCGNEDQSKMNVARRTCGYIGSQFWNQGRTQEIKERVLHL

SEQ ID NO: 877 - protein, 1032 aa, Unknown
  Description of Unknown: uncultivated organism sequence
  Category: MG60 effectors
  Description: MG60-86 effector
MIVTKRDGRQVEFDKDKIVKAISKAFVEVYSTVTDEMSGFANKVATEISSKEADMTVEEIQDIVTKKLMLSRYKDVARRYIEYRYLHHLVRESNTTDKSIKELIDGENDYWNTENSNKNPRIVTTQRDYIAGITSTDIARRFLLPPEIVKAHDEGILHFHDMDYFAQKSLHNCFSGDTKLVTDLGVRSFNSFADGAVIKVKDKNGVWREATVKKYGKQKMFDVTFKTPKSEKTVTCTQNHRWILDTGEVTTNLQVGDKLFPLTDSASNYVPNTLEELRAFCFGFVLGDGCDCSDKGVQVRLCNDKNEYLEYFIKAGYKYYQVTNSNDYVAYNRTEYSKQSFLNNNAWKLLSLNQKIALFHGYYCADGRKNSHSISTTNNRLMAMIEEISALAGYYIGSKFEEHRHSNYVEDFSITTYSFIIEQKAKNWLWTVKEIKPHYNKKYKDNRQGRENSFKTCNPTMDAWCVEEPVTHTFTLSNGMVTGNCELVNLEDMLQNGTVINGVKIDKPHRLLTAATIATQIITAVTSSSYGGCSINLAHLAPFVRDSYEYHKNKYLKRGMNELDAEAFAGQDTDKEVSDAVQTFNYQVNSMTNTNGQAPFLSVFMYINDNMEYRAETVTLIAEFLRQRMIGFKNEVGHYVTPAFPKLLYVLDENNCEPNTEYWWLTKLAAECTAKRMVPDYISAKIMKRDKIDANGNGNVFACMGCRSFLTPYLDSNNKPKYWGRFNQGVVTINLPDVALSSKGDKEKFWQLFDERLELCHKAMQCRHERLALATSDVAPILWQHGALARLPKGASIHPLLHGGYSTLSLGYAGLYECVKYMTGESHSHGKGKEFGLAVMQHLNDKCNEWKEAEDIAYSPYGSPIESTTYKFAKCLKKRFGVIEGITDKDYITNSYHINVREEIDPFSKLAIEAEYQKLSQGGAISYIECADLTNNISAVLEVIKFIYNNIMYAELNTKSDYCQVCGYDGEIEIVDNNGTLSWRCPNCGNTDQTKMNVARRTCGYIGSQFWNQGRTQEIKERYVHLDNHEMK

SEQ ID NO: 878 - protein, 768 aa, Unknown
  Description of Unknown: uncultivated organism sequence
  Category: MG60 effectors
  Description: MG60-87 effector
MFCSCKKNLCVVIYIYNATKTYDCAKKLIVYKSIIKGAEVMKIIKRNGAEETFDRQKIKDAIAKANNETDGTPELTDRQIDYISLVIEDHCNEMNRALSVEEIQELVETHIILQGAPETAKRYIRYRFTRNLARASNTTDNQILSLIECNNEEVKQENSNKNPTVNSVQRDYMAGEVSKDLTKRILLPEDIVKAHEEGLIHFHDADYFAQHMHNCDLVNLEDMLQNGTVISGTMIEKPHSFSTACNIATQIIAQVASNQYGGQSISLAHLAPFVQISREKITRQVRAEMEEFGIDADDEQVKSLVEKRVRDEIKRGVQTIQYQVVTLLTTNGQAPFVTVFMYLNEAKNEQEKKDLAIIIEEVLKQRIKGTKNEVGVWVTPAFPKLIYVLEEDNITEDSRFWYLTKLAAECTAKRMVPDYISEKIMLKLKVDKNGNGNCYTCMGCRSFLTPYVDENGKPKYYGRFNQGVVTINLVDVACTAARDGSKSEEKFWQVLDERLELCHRALQCRHERLEGTLSDAAPILWQYGALARLKKGEPIDKLLHGGYSTLSLGYAGLWECVYEITGKKLTEKEGEEFGLRVMQRLNDACAEWKAAENIDYSIYGTPLESTTYKFAKCLQNRFGIIKGVTDRNYITNSYHIHVTEKIDAFSKLELESKFQKLSPGGAISYVEVPNMQQNIPAVLEVMKFIYNNIMYAELNTKSDYCQVCGYDGEIQIVEEDGKLVWRCPNCGNEDQSKMNVARRTCGYIGSQFWNQGRTQEIKERVLHL

SEQ ID NO: 879 - protein, 768 aa, Unknown
  Description of Unknown: uncultivated organism sequence
  Category: MG60 effectors
  Description: MG60-88 effector
MFCSCKKNLRVVIYIYNATKTYDCAKKSIVYKSIIKGAEVMKIIKRNGAEETFDRQKIKDAIAKANNETDGTPELTDRQIDYISLVIEDHCNEMNRALSVEEIQELVETHIILQGAPETAKRYIRYRFTRNLARASNTTDNQILSLIECNNEEVKQENSNKNPTVNSVQRDYMAGEVSKDLTKRILLPEDIVKAHEEGLIHFHDADYFAQHMHNCDLVNLEDMLQNGTVISGTMIEKPHSFSTACNIATQIIAQVASNQYGGQSISLAHLAPFVQISREKITRQVRAEMEEFGIDADDEQVKSLVEKRVRDEIKRGVQTIQYQVVTLLTTNGQAPFVTVFMYLNEAKNEQEKKDLAIIIEEVLKQRIKGTKNEVGVWVTPAFPKLIYVLEEDNITEDSRFWYLTKLAAECTAKRMVPDYISEKIMLKLKIDKNGNGNCYTCMGCRSFLTPYVDENGKPKYYGRFNQGVVTINLVDVACTAARDGNKSEEKFWQVLDERLELCHRALQCRHERLEGTLSDAAPILWQYGALARLKKGEPIDKLLHGGYSTLSLGYAGLWECVYEIKGKKLTEKEGEEFGLRVMQRLNDACAEWKAAENIDYSIYGTPLESTTYKFAKCLQNRFGIIKGVTDRNYITNSYHIHVTEKIDAFSKLELESKFQKLSPGGAISYVEVPNMQQNIPAVLEVMKFIYNNIMYAELNTKSDYCQVCGYDGEIQIVEEDGKLVWRCPNCGNEDQSKMNVARRTCGYIGSQFWNQGRTQEIKERVLHL

SEQ ID NO: 880 - protein, 768 aa, Unknown
  Description of Unknown: uncultivated organism sequence
  Category: MG60 effectors
  Description: MG60-89 effector
MFCSCKKNLCVVIYIYDATKTYDCAKKLIVYKSIIKGAEVMKIIKRNGAEETFDRQKIKDAIAKANNETDGTPELTDRQIDYISLVIEDHCNEMNRALSVEEIQELVETHIILQGAPETAKRYIRYRFTRNLARASNTTDNQILSLIECNNEEVKQENSNKNPTVNSVQRDYMAGEVSKDLTKRILLPEDIVKAHEEGLIHFHDADYFAQHMHNCDLVNLEDMLQNGTVISGTMIEKPHSFSTACNIATQIIAQVASNQYGGQSISLAHLAPFVQISREKITRQVRAEMEEFGIAADDEQVKSLVEKRVRDEIKRGVQTIQYQVVTLLTTNGQAPFVTVFMYLNEAKNEQEKKDLAIIIEEVLKQRIKGTKNEVGVWVTPAFPKLIYVLEEDNITEDSRFWYLTKLAAECTAKRMVPDYISEKIMLKLKIDKNGNGNCYTCMGCRSFLTPYVDENGKPKYYGRFNQGVVTINLVDVACTAARDGNKSEEKFWQVLDERLELCHRALQCRHERLEGTLSDAAPILWQYGALARLKKGEPIDKLLHGGYSTLSLGYAGLWECVYEITGKKLTEKEGEEFGLRVMQRLNDACAEWKAAENIDYSIYGTPLESTTYKFAKCLQNRFGIIKGVTDRNYITNSYHIHVTEKIDAFSKLELESKFQKLSPGGAISYVEVPDMQQNIPAVLEVMKFIYNNIMYAELNTKSDYCQVCGYDGEIQIVEEDGKLVWRCPNCGNEDQSKMNVARRTCGYIGSQFWNQGRTQEIKERVLHL

SEQ ID NO: 881 - protein, 768 aa, Unknown
  Description of Unknown: uncultivated organism sequence
  Category: MG60 effectors
  Description: MG60-90 effector
MFCSCKKNLCVVIYIYDATKTYDCAKKLIVYKSIIKGAEVMKIIKRNGAEETFDRQKIKDAIAKANNETDGTPELTDRQIDYISLVIEDHCNEMNRALSVEEIQELVETHIILQGAPETAKRYIRYRFTRNLARASNTTDNQILSLIECNNEEVKQENSNKNPTVNSVQRDYMAGEVSKDLTKRILLPEDIVKAHEEGLIHFHDADYFAQHMHNCDLVNLEDMLQNGTVISGTMIEKPHSFSTACNIATQIIAQVASNQYGGQSISLAHLAPFVQISREKITRQVRAEMEEFGIDADDEQVKSLVEKRVRDEIKRGVQTIQYQVVTLLTTNGQAPFVTVFMYLNEAKNEQEKKDLAIIIEEVLKQRIKGTKNEVGVWVTPAFPKLIYVLEEDNITEDSRFWYLTKLAAECTAKRMVPDYISEKIMLKLKVDKNGNGNCYTCMGCRSFLTPYVDENGKPKYYGRFNQGVVTINLVDVACTAARDGSKSEEKFWQVLDERLELCHRALQCRHERLEGTLSDAAPILWQYGALARLKKGEPIDKLLHGGYSTLSLGYAGLWECVYEITGKKLTEKEGEEFGLRVMQRLNDACAEWKAAENIDYSIYGTPLESTTYKFAKCLQNRFGIIKGVTDRNYITNSYHIHVTEKIDAFSKLELESKFQKLSPGGAISYVEVPNMQQNIPAVLEVMKFIYNNIMYAELNTKSDYCQVCGYDGEIQIVEEDGKLVWRCPNCGNEDQSKMNVARRTCGYIGSQFWNQGRTQEIKERVLHL

SEQ ID NO: 882 - protein, 768 aa, Unknown
  Description of Unknown: uncultivated organism sequence
  Category: MG60 effectors
  Description: MG60-91 effector
MFCSCKKNLRVVIYIYNATKTYDCAKKLIVYKSIIKGAEVMKIIKRNGAEETFDRQKIKDAIAKANNETDGTPELTDRQIDYISLVIEDHCNEMNRALSVEEIQELVETHIILQGAPETAKRYIRYRFTRNLARASNTTDNQILSLIECNNEEVKQENSNKNPTVNSVQRDYMAGEVSKDLTKRILLPEDIVKAHEEGLIHFHDADYFAQHMHNCDLVNLEDMLQNGTVISGTMIEKPHSFSTACNIATQIIAQVASNQYGGQSISLAHLAPFVQISREKITRQVRAEMEEFGIDADDEQVKSLVEKRVRDEIKRGVQTIQYQVVTLLTTNGQAPFVTVFMYLNEAKNEQEKKDLAIIIEEVLKQRIKGTKNEVGVWVTPAFPKLIYVLEEDNITEDSRFWYLTKLAAECTAKRMVPDYISEKIMLKLKIDKNGNGNCYTCMGCRSFLTPYVDENGKPKYYGRFNQGVVTINLVDVACTAARDGSKSEEKFWQVLDERLELCHRALQCRHERLEGTLSDAAPILWQYGALARLKKGEPIDKLLHGGYSTLSLGYAGLWECVYEITGKKLTEKEGEEFGLRVMQRLNDACAEWKAAENIDYSIYGTPLESTTYKFAKCLQNRFGIIKGVTDRNYITNSYHIHVTEKIDAFSKLELESKFQKLSPGGAISYVEVPNMQQNIPAVLEVMKFIYNNIMYAELNTKSDYCQVCGYDGEIQIVEEDGKLVWRCPNCGNEDQSKMNVARRTCGYIGSQFWNQGRTQEIKERVLHL

SEQ ID NO: 883 - protein, 763 aa, Unknown
  Description of Unknown: uncultivated organism sequence
  Category: MG60 effectors
  Description: MG60-92 effector
MKIIQQLYSIFVAFATVFLKNKYIIRTYKSNKKYLIDIRKMALLKDLYTRKEWGKMKVIKRDGRTIEFDREKIEIAIEKANKEVRGKEKATKDEINEIIAYIEDLGKKRMLVEDIQDVIEEKLMELDKYELAKKYIVYRYTRALVRKSNTTDESILGLIKNENKELAEENSNKNTMLASTQRDYIAGEVSRDLTKRILLPEKISKAHEEGILHFHDADYFVQPIFNCCLINIGDMLDNGTAMNGKMIETPKSFQVACTVTTQIIAAVASNQYGGQSVDLKHLGKYLRRSHDKFQKRLTEKYGGKLPKQTIDDMIRDRVKEELAAGVQTIQYQINTLMTTNGQSPFVTLFLHLEPDDEYIKENAMIIEEVLKQRIQGIKNEVGVYVTPAFPKLVYVLDEHNCLKGGKYDYLTRLAVKCSAKRMYPDYISAKKMKENYEGNVFSPMGCRSFLVPWKDENGNYKFEGRFNQGVVSINLPQIAIIAQGDEDKFWKLFDERLELCREALMCRHYALLGTSSDISPIHWQNGAIARLKKGEKIDKYLKDGYSTLSLGYIGIYETTKLIKGVSHTTPEGHDFAIKIMKYLKDRTNLWRKETGLGFSLYGTPAESLCYRFARIDKEKFGSIPDVTDKGYYTNSYHVDVREKIDAFHKLKFESEFQPLSAGGAISYIEVPNMKNNLTALEEVVKFIYDNIQYAEFNTKSDYCQVCGYDGEMIINDQNEWECPQCGNKDHNKMNVVRRTCGYLGENFWNVGKTKEIKSRVLHL

SEQ ID NO: 884 - protein, 1291 aa, Unknown
  Description of Unknown: uncultivated organism sequence
  Category: MG60 effectors
  Description: MG60-93 effector
MKLRKVYACILTLCMLVSMLPAFAADTDASCTHKWTEKVIKEANCTQTGLVKKTCELCGDFEYEKTPFKHGEGKEVVKDATCTKPETVGLYCEKCGELIGKVQEVGKALGHDLGKGTEKKADCAGPDRVEYTCKRCGETVVEAIEGGEAAKKHDWEAKIVPATCKTKGYEARVCKACGKVEKDKELPIDGNAHVAKLGKVIREATCTTNGLGRSVCELCGKELGYITIKAGHKYGDPICDEGKEVTCGKAGYGYYVCTVCGEETEKAEIPATGKHAFVDETDIPATCTEPEKIGRICKVCGAADGEVEEIGEALGHDWDDGVYTKADCLKAEREVFTCKRCGKTRDEFIPNGEAAKGHKFVDKIVAPTCKTKGYTERTCERCDLYEKINETEIDKDAHVAKLDKTIREATCTVNGLGRYTCELCGEYLGYRAIEAKHVYGEPIFDEGKEATCGKPGYGYYVCTVCNEKTEKTEIPATGKHQFVDEFVIPATCEEPMKVGRICKVCGKADGKVQEIDKPLGHAWDDGKYMAVDCEKAERVVYTCERCGEVKEEIIPNGEAAKGHKFVDKIVAPTCKTKGYTERTCERCDLYEKINETEIDKDAHVAKLDKTIREATCTVNGLGRYTCELCGEYLGYRAIEAKHVYGAPIFDEGKEATCGKDGYGYYVCTVCGEKTDKDVIPATGKHEFVDETVIPATCTEPEKVGRICKVCGKADGKVQEIDKPLGHDWDDGELKDADCEKAERVVTTCKRCGEIREDSFEGAKPATGHKLVEKIVAPTCKTKGYTERTCERCDLYEKINETEIDKDAHVAKLDKTIREATCTVNGLGRYTCELCGEYLGYRAIEAKHVYGEPIFDEGKEATCGKPGYGYYVCTVCNEKSEKTEIPATGKHQFVDEFVIDATCEEPMKVGRICKVCGKTDGEVKTVGEKLGHDWDDGELKDADCEKAERVVYTCKRCGETKEDVIGTEVLGHKYKEKVVEPTCKTKGYKAKVCSVCGNTEVIEELEPVAGNHVAKLDKVIREATCSANGLGRYVCAECGNYIGYRAIVVEHKWGEEYANEDATAIMHKCEVCGTVEVIWKDSSDECEDGKHVIVVDPAKAATCTETGLTEGKHCSVCDKVLVKQEVIPATGHTEVVDEAKAATCTEAGLTEGKHCSVCNAVLVKQEEIPALGHTEVVDEGKAATCTEAGLTEGKHCSVCSEVLVKQEEIPATGHVEEILPAVAPTDTEPGLTEGKKCSVCGKILVEQEVIPAHEHEHNYVLKGYDFNADFTKKVATYECTICGDTYTEEMDF

SEQ ID NO: 885 - protein, 874 aa, Unknown
  Description of Unknown: uncultivated organism sequence
  Category: MG60 effectors
  Description: MG60-94 effector
MKIIETKVFKGKNIYSLKKCIRLDVDLEGYCETPSKNIEDFNFNLVNMIPELRTHRCGIDEDEGFIKRLKEGTYLAHICEHIILAIQNKLGIDVHYGKSREIKEDHYYIVFQYIYENTALEVAKLAIDIINALINKIPINYDERIEFLKEILNNEILGPSTKSICDYANKVGLPIIKLGNGEFYQIGYGKQGRIIEASISPNTSCISVDIACDKMLTKELLRTQSIPVAKGSKVKNVINLLKEAEEIGYPVVLKPQYGNKGKGVILNLKSEKELLDAYRKIKDKFKDIIIEKYHKGKDFRVCVVNYKVVAVSLRIPPFVIGNGKDTIFELINKLNEDPLRGEDHEKPLTKVKLDEEVIDAISEQRKTLMEVLDKGEKIYLRKNANLSTGGEAIDFTDEICDENINLCIRIAKTLKLDICGIDICTDDISIPIYKNGVVMEVNAAPGLRMHLNPSKGKSRDIGKEIVNMIYNNKPCNIPIVAITGTNGKTTTTRLITHTLSKMGYCVGMTSSSGIYINDECIDVGDDTGFESAKSVLLNPDVEIAVLETARGGIIKKGLAYDLADVAVITNIREDHLGIDEINSMEDLCCVKSLVGEAVKDEGYVVINADDKWSKSILNRIKSRKVYFTLNSSNEILIKKNQDDIYVYLENEDIIIINQNKKYVLCNINEVPITMNGMLKFNIENILAATSALVAMKVDYCMIKNGITTYLLNSKKNSGRFNCYNVNGVNVILDYGHNTDGYIAVLSSVKKMSSKRIFGIVGIPGDRLNKSAEEIGCISAKYFDYIIVKEDKDLRGRKQGEIANLIVDGLIKENSNKKYEVILDEEVALIKALNMAEKGDTIVVFFEEIKPLLKVIEEIASFETKRKSDSYEALN

SEQ ID NO: 886 - protein, 777 aa, Unknown
  Description of Unknown: uncultivated organism sequence
  Category: MG60 effectors
  Description: MG60-95 effector
MPKSIDLITSIWYYVKGFVDKSYKFVTDTTRLTHPRNLRQRGMDMNIIKRNGSEAVFDLNKIIVAVSKANQACEKKELSQGQINDIAEYVEFKIGKANRALSVEEIQDIVEDQIMAQGAFEVAKRYVKYRYTRSLVRKANTTDNQILSLIECNNEEVKQENSNKNPTVNSVQRDYMAGEVSKDITKRILLPQDIVEAHENGIIHFHDADYFAQHMHNCDLVNLEDMLQNGTVISDTMIEKPHSFSTACNIATQIIAQVASSQYGGQSISLTHLAPFVQISREKIRKQVIDEAVDFGSELTEEKIDKITERRLRDEVSRGVQTIQYQVVTLLTTNGQAPFVTVFMYLNEAKNEQEKKDLALIIEETLKQRIQGVKNESGVWVTPAFPKLIYVLENDNVDEDSEYFYLTELAAKCTAKRMVPDYVSEKVMLDLKGDVYTPMGCRSFLTPDRFTEAGVGNIARAKNYVEGKKKYYGRFNQGVVTINLVDVACTSGGDMTKFWQIFDERLNLCYRALMCRHNRLKGTLSDAAPILWQHGALARLDKGEPIDRLLYDGYSTISLGYAGLYECTKYMTGKSHTDENGGKEFALSVMRHMNEACDKWKEETNIDFSIYGTPLESTTYKFAKCLQKRFGIIKGVTDKNYITNSYHVHVTEKIDAFTKLKFESEFQALSPGGAISYVEVPNMQDNIPAVLQVMRFIYDNIMYAELNTKSDYCQCCGYDGEIKIVEDEHGKLIWRCPNCGNEDQDKMNVARRTCGYIGTQFWNQGRTQEIKDRVLHL

SEQ ID NO: 887 - protein, 895 aa, Unknown
  Description of Unknown: uncultivated organism sequence
  Category: MG60 effectors
  Description: MG60-96 effector
MAKALLIAEKNSVARTINAYIKRYGFKDDVTCAALSGHLVHMVEPNKYCEEWDGKWNLEVLPMIPRDFKYEVINDDRIKKIYSDLKQVIRDNHYDYLINACDPEREGQAIFYYVYNKMGCKLPVKRYWENGQTDASVKHALNNLRDGLDETGYPNLKLLTQAAYLRGQFDWLVGMNFTRAASLTMNGVAKVGRVKTAVLKICVDLEKRIIDFVPKTSYGIKTEIAEDIEAINVERLEEDSRVKYVEANYETKEEASTICETLPKSMKLISKDTLRLKDNPDKLFSLGTLQVAASKEYGYSVEQTLAIAQSLYEKKILSYPRTSNPYISSNEASLFDEMLNAIKMIPGLEGVVTYIGDKKTQDRVKTNKMYVNDKETKEAGHYALIPTGERFNFDSLSSEEKSILKLVAYRFAAIFMPSGIDEKTTYIFDAGSKYFRTTIYNTLELGYRSIYNDTPKKSKKPNINKGDMIKVSCYELYEMTSTPPRRLTDGRLVDVMINPQKYLLDNHYKKIIKETKGLGTDATRANIINELAKDKYIEIKGKGNLIYATPTGIKIIENLGDMEITSVDLTAKWETKLYDVSTGKLSVDDFKSEMLEYIKRNTEVFKNKRFNAIGDKANGRESVGKCPSCGGNIFEALNSYYCENFKREGPGCKVILSKSIKGSKVTKANLKKILAGKESTEISLKIEKDGIIKSVKKKLYFNPDSGKIEFVRPQYKALTTCSFCGGIVNASDKAAICSGCGISFARKIKGAVLEDEDLISLYHGQPTKELRFSTIKDGIPKKFNASLIYNYEKRQLGFHYKEAKKFGKCPICGEGFTGPIEGKYGAYYKCSNKVCGLIIKEEIGGVKLTSSDIDILLKGDSLPVKEFKKNDGIGSYKAALFVNRETKKLDRKFSK

SEQ ID NO: 888 - protein, 1186 aa, Unknown
  Description of Unknown: uncultivated organism sequence
  Category: MG60 effectors
  Description: MG60-98 effector
MMNKVLLTDAVPDIEKYWDYEANEGKKPSDFGASSSEKVWTKCPICGTSIRRNVRFTWEKDENGVGHVIHCRTCGKRNNNNSLVVLFPDIKKYWIYEKNEYDPEYYSISSGKKVYTSCPSCGEERYIAICDLIVKRNDRYELTQCIECSPKRNVIGSIAKNYPDIDKYWDDSNASNPNEIALNSQEIIFIHCPTCDKVVKRKALNSFRRDDQTGLYMLLDCHKCATQKAGKIRGLNQSGALIDKCPEIEEWWDAENNTIEFKNITRGSHYEAQLKCPACHSSFTRQIHSFVNVKRDGRLLPVACPECGYSTKGDPKDNILKLCPEIEQWWDYEANSPYRPEQFSKGSQFKAHFICPDCEMHLYTGIHSLMKSDENGNLHIRHKGKCLKFRLMESDNNLVKQYPQIKEWWDYEENGKALPEEFTIYSGKRMHFICPQCGAKSYRRITDAFAIEANSGEPILFNCPYCRNKKILAGKNSLLDTDPELAKEWSPNNNKKANEVLSKSFNRVQWICPNCKGEYSAIIRDRKVGDDACPYCKNDKVLPGFNSLQYKNPELAKEWSNSNDMKADEVLPTSSSRVKWVCPTCHGEYYAIIRGRKVGDDACPYCRKDKLLPGYNSLLNTDPELAKEWSNSNDMKADEVLPTSSSRVKWVCPTCHGEYSAIIRERKVGDDACPYCRNDKLLPGYNSLQDKKPELAKEWSTRNTLKADAVLFTSSSRAQWVCPTCHKEYSAIIRDRKLGDDSCPHCRQTKLLKEHTSLWVVNPELAKEWSDSNDLKADEVLPTSSFRVKWVCPTCRGEYYAIIRDRKVGDDACPYCRKDKLLPGYNSLLNTDPELAKEWSNSNDLKASEVLPTSSHRAQWVCPTCHGEYFAIIRDRKVGDDACPYCKNDKVLPGFNSLQYKNPELAKEWSNSNDMKADEVLPTSSSRVKWVCPTCRGEYYAAIRDRKVGDDACPYCRNDKLLPGYNSLLNTDPELAKEWSNSNDMKADEVLPTSSSRVKWVCPTCHGEYYAAIRDRKVGDDACPYCKNDKVLPGFNSLQYKNPELAKEWSNSNDMKADEVLPTSSSRVKWVCPTCRGEYYAAIRDRKVGDDSCPYCRNKKALAGLNSLLDMQPELVEREWCYPENILIGVYPDQILESYQGKAWWKCPICKRKYFMSVKDRLMKQKRGHVACPQCRGRRCVRSFWV

SEQ ID NO: 889 - protein, 824 aa, Unknown
  Description of Unknown: uncultivated organism sequence
  Category: MG60 effectors
  Description: MG60-99 effector
MKELNDSILALVMDDTEEKLMAENTEIDKEELGLACPKCGKRIIEDGTAYRCEAGDFKCGKEILGTEISRDELQKAIAGQSDELGFRSSKTGKTFLARLVLSEAKDSLDFRFSDRNGEDSGLKCPKCGGKIVDDGKAYKCESGDFKCWKIIRGHEITREELQKALDGKSDELGFTSRDSGKPYKGRLVLNEAKDGLAVKLDSRKSDDTGLKCPKCGGKIIDDGKAYKCESGDFKCWKSIRGHEVTRDELQKVIDEGSSDELDFTDQDTGKPYTARLKLSSDKKSVEVPKPEDTGEKCPNCRNKIMETDKAYWCESCNFTCDKEILGTRISHDDLHKIVEEGNSDELDFTDHDSGKSYKAHLNLSSDKQTVDVPKPEDTGEKCPNCRNKIMETDKAYWCESCNFTCDKEILGTRISHDQLHKIVEEGRSDELDFTDHDSGKSYKARLNLSEDNKTVVVPKPKDTGIKCPKCTMKIMETDRAYWCESEACDFTCDKEILDTKITRDELKKVVLNGKSGKLDFTDKDTKKPYKGRLVLNKKKNGLHVDKLDYMKVIFAVISFVVATISFIGIFLPDLFNMNKGSITRFETTLSDKKSAQKLEEFLDANVGKIVELTIHYKQNLVYGLVPWAKYSEDSYYGVKYDPAKDGSWWWDSASAAHDVTFSHFGDNNRFYVKSFLYDKNLFEVEYRDFGGIGYCDAITRYAYQLMIPYVKNDKLAFEWQRDREKSKDYVALPSPYWVLKGTFVVNVKKGEELTDNITTLYDEFQQRKLRSDYGKDYVVPEIAKILAVDPACGERTGNGDYSFSGKSFELEPLTQQQLLQMAYN

SEQ ID NO: 890 - protein, 768 aa, Unknown
  Description of Unknown: uncultivated organism sequence
  Category: MG60 effectors
  Description: MG60-100 effector
MFCSCKKNLCVVIYIYDATKTYDCAKKSIVYKSIIKGAEVMKIIKRNGAEETFDRQKIKDAIAKANNETDGTPELTDRQIDYISLVIEDHCNEMNRALSVEEIQELVETHIILQGAPETAKRYIRYRFTRNLARASNTTDNQILSLIECNNEEVKQENSNKNPTVNSVQRDYMAGEVSKDLTKRILLPEDIVKAHEEGLIHFHDADYFAQHMHNCDLVNLEDMLQNGTVISGTMIEKPHSFSTACNIATQIIAQVASNQYGGQSISLAHLAPFVQISREKITRQVRAEMEEFGIAADDEQVKSLVEKRVRDEIKRGVQTIQYQVVTLLTTNGQAPFVTVFMYLNEAKNEQEKKDLAIIIEEVLKQRIKGTKNEVGVWVTPAFPKLIYVLEEDNITEDSRFWYLTKLAAECTAKRMVPDYISEKIMLKLKIDKNGNGNCYTCMGCRSFLTPYVDENGKPKYYGRFNQGVVTINLVDVACTAARDGNKSEEKFWQVLDERLELCHRALQCRHERLEGTLSDAAPILWQYGALARLKKGEPIDKLLHGGYSTLSLGYAGLWECVYEITGKKLTEKEGEEFGLHVMQRLNDACAEWKAAENIDYSIYGTPLESTTYKFAKCLQNRFGIIKGVTDRNYITNSYHIHVTEKIDAFSKLELESKFQKLSPGGAISYVEVPNMQQNIPAVLEVMKFIYNNIMYAELNTKSDYCQVCGYDGEIQIVEEDGKLVWRCPNCGNEDQSKMNVARRTCGYIGSQFWNQGRTQEIKERVLHL

SEQ ID NO: 891 - protein, 768 aa, Unknown
  Description of Unknown: uncultivated organism sequence
  Category: MG60 effectors
  Description: MG60-101 effector
MFCSCKKNLRVVIYIYNATKTYDCAKKLIVYKSIIKGAEVMKIIKRNGAEETFDRQKIKDAIAKANNETDGTPELTDRQIDYISLVIEDHCNEMNRALSVEEIQELVETHIILQGAPETAKRYIRYRFTRNLARASNTTDNQILSLIECNNEEVKQENSNKNPTVNSVQRDYMAGEVSKDLTKRILLPEDIVKAHEEGLIHFHDADYFAQHMHNCDLVNLEDMLQNGTVISGTMIEKPHSFSTACNIATQIIAQVASNQYGGQSISLAHLAPFVQISREKITRQVRAEMEEFGIDADDEQVKSLVEKRVRDEIKRGVQTIQYQVVTLLTTNGQAPFVTVFMYLNEAKNEQEKKDLAIIIEEVLKQRIKGTKNEVGIWVTPAFPKLIYVLEEDNITEDSRFWYLTKLAAECTAKRMVPDYISEKIMLKLKIDKNGNGNCYTCMGCRSFLTPYVDENGKPKYYGRFNQGVVTINLVDVACTAARDGNKSEEKFWQVLDERLELCHRALQCRHERLEGTLSDAAPILWQYGALARLKKGEPIDKLLHGGYSTLSLGYAGLWECVYEITGKKLTEKEGEEFGLRVMQRLNDACAEWKAAENIDYSIYGTPLESTTYKFAKCLQNRFGIIKGVTDRNYITNSYHIHVTEKIDAFSKLELESKFQKLSPGGAISYVEVPNMQQNIPAVLEVMKFIYNNIMYAELNTKSDYCQVCGYDGEIQIVEEDGKLVWRCPNCGNEDQSKMNVARRTCGYIGSQFWNQGRTQEIKERVLHL

SEQ ID NO: 892 - protein, 768 aa, Unknown
  Description of Unknown: uncultivated organism sequence
  Category: MG60 effectors
  Description: MG60-102 effector
MFCSCKKNLRVVIYIYNATKTYDCAKKLIVYKSIIKGAEVMKIIKRNGAEETFDRQKIKDAIAKANNETDGTPELTDRQIDYISLVIEDHCNEMNRALSVEEIQELVETHIILQGAPETAKRYIRYRFTRNLARASNTTDNQILSLIECNNEEVKQENSNKNPTVNSVQRDYMAGEVSKDLTKRILLPEDIVKAHEEGLIHFHDADYFAQHMHNCDLVNLEDMLQNGTVISGTMIEKPHSFSTACNIATQIIAQVASNQYGGQSISLAHLAPFVQISREKITRQVRAEMEEFGIAAEDEQVKSLVEKRVRDEIKRGVQTIQYQVVTLLTTNGQAPFVTVFMYLNEAKNEQEKKDLAIIIEEVLKQRIKGTKNEVGVWVTPAFPKLIYVLEEDNITEDSRFWYLTKLAAECTAKRMVPDYISEKIMLKLKIDKNGNGNCYTCMGCRSFLTPYVDENGKPKYYGRFNQGVVTINLVDVACTAARDGNKSEEKFWQVLDERLELCHRALQCRHERLEGTLSDAAPILWQYGALARLKKGEPIDKLLHGGYSTLSLGYAGLWECVYEITGKKLTEKEGEEFGLRVMQRLNDACAEWKAAENIDYSIYGTPLESTTYKFAKCLQNRFGIIKGVTDRNYITNSYHIHVTEKIDAFSKLELESKFQKLSPGGAISYVEVPNMQQNIPAVLEVMKFIYNNIMYAELNTKSDYCQVCGYDGEIQIVEEDGKLVWRCPNCGNEDQSKMNVARRTCGYIGSQFWNQGRTQEIKERVLHL

SEQ ID NO: 893 - protein, 769 aa, Unknown
  Description of Unknown: uncultivated organism sequence
  Category: MG60 effectors
  Description: MG60-103 effector
MKVIKRDGTIVEYDREKIRIAIEKANKEVSRKEKATDSEIEEIMSYIEDLKKGRILVEDIQDIIEEKLMEIKRYELAKKYITYRYTRALVRKANTTDQSIKELIEGESEYWNNENANKNARVVTTQRDYLAGITSTDITRRFLLPEDVVKAHDEGIIHFHDADYFAQNALTNCELINLEDMLQNGTIMNGVMIEKPHRFITACTIATQIILAVTSSTYGGATVSLAHLAPFVRSSYEKYYKKYKDNGLSKEQCEKFAKEDTKKEVADGVQTFNYQVNSMTNTNGQAPFLSVCMYLGETDEYKEELAMIIEEFLNQRILGFKNEKGVYITPAFPKLLYVLEEDNIHENSKYWYLTELAAKCTAKRMVPDYISEKIMKQMKVDANGDGQCYPCMGCRSFLTPYIDPVTKKPKYYGRFNQGVVTINLVDVALSSGKDLKKFWKIYDERLELCHKALQARHERLAKATSDIAPILWQHGAFARLPKGASIHPLLHGGYSTISLGYAGLYECVKYMTGKSHTDNGDGKDFAIEVMKKMNEKCAEWKDAEDIDYSVYGTPIESTTYKFAKCLQKRFGKIKGITDKNYITNSYHVPVFEEIDAFSKLKLESEFQRLSPGGAISYVETPNLQNNLEVVLQIMKFIYDNIMYAELNTKSDYCQKCGYTGEILIDDNLEWYCPNCGNRDHNTLNVARRTCGYIGSNFWNKGRTQEIKERVLHIDNKDDDCDCDECNCDHANTDTSKEEKSEEKQMNFMDYDVEEEITKSKKRMKQPAMV

SEQ ID NO: 894 - protein, 1094 aa, Unknown
  Description of Unknown: uncultivated organism sequence
  Category: MG60 effectors
  Description: MG60-105 effector
MTVTKRDGRKVKFDRSKIVKAITKAFVEVYPDELPADTYTFCAKIADDIEARKQDLTVEEIQDIVVRKLMASKYKDVATQYVQYRYQHELIRQSNTTDKTIKELLDGENEYWKTENSNKNPKVVTTQRDYIAGVTSTDITRRFLLPKDIVKAHDEGIIHFHDADYYAQLSLHNCELINLQDMLQNGTVINGVQIDKPHRLITAATISTQIITAVTSSSYGGATINLSHLAPFVRDSREWHRRKYLSRGMSDGEADSWAMEDTQKEIADAVQTFNYQVNSMTNTNGQAPFLSVFMYLNDDPEHQEETALLIEEFLRQRILGFKNESGHYITPAFPKLLYVLDENNITEESPYWYLTVLAAQCTAKRLVPDYISAKIMRRDKVDANGNGNVYGCMGCVAGDEVITYRMDGMVYTEAFSRAWNRLTRRFAPKIQPGRAIDKYIDLEGVEIYDAVAGWTRCLRMIRNENSEMLRLRFSNGRMLDCTPDHPFETENRGVVQAADLTEEDVIRVDKDSVWTVDTANGVDDYAWMLGLLLCDSSYVSTVRVSIAATGEEEIRDRFTQCAQKYWNAQINDVLHERGVKGTYRDLVIKGDGDGKATNICSELEALFEGRVKSKRHIPNEVFNWSYSARLSFMAGMIDADGYINDHFRVPVVQIGSTNKELAIQQALLAQTLGMRASIYQNHYKGKGRGDTIRYQVSFHPTAELVDRIACKKKQDKFNENELCNPCISLTDFATLTSRTELNEKMPSYDVTTASEHFTVSGIYSHNCRSFLTPYLDAEGKPKYWGRFNQGVVTINLPDVALSSGGDMTKFWELLDERLELCHRALQCRHERLALATADVAPILWRYGALARLPKGAPIHPLLHDGYSTLSLGYAGLYECVKYMTGESHSHGKGFDFGIQVMEKLNEYTAKWKAAEHIDYSLYGSPIETTTYKFATCLKRRFGEVEGITDHGYITNSYHINVRESIDPFEKLAIEAKYQKLSPGGAISYIECSDLTGNIDAVLEVLKFIYDNIMYAELNTKSDYCQVCGYEHEIEIVDNDGVLSWRCPNCGNTDQSKMNVARRTCGYIGTQYWNQGRTEEIRDRYVHLDNHEVGE

SEQ ID NO: 895 - protein, 768 aa, Unknown
  Description of Unknown: uncultivated organism sequence
  Category: MG60 effectors
  Description: MG60-106 effector
MFCSCKKNLCVVIYIYDATKTYDCAKKLIVYKSIIKGAEVMKIIKRNGAEETFDRQKIKDAIAKANNETDGTPELTDRQIDYISLVIEDHCNEMNRALSVEEIQELVETHIILQGAPETAKRYIRYRFTRNLARASNTTDNQILSLIECNNEEVKQENSNKNPTVNSVQRDYMAGEVSKDLTKRILLPEDIVKAHEEGLIHFHDADYFAQHMHNCDLVNLEDMLQNGTVISGTMIEKPHSFSTACNIATQIIAQVASNQYGGQSISLAHLAPFVQISREKITRQVRAEMEEFGIAADDEQVKSLVEKRVRDEIKRGVQTIQYQVVTLLTTNGQAPFVTVFMYLNEAKNEQEKKDLAIIIEEVLKQRIKGTKNEVGVWVTPAFPKLIYVLEEDNITEDSRFWYLTKLAAECTAKRMVPDYISEKIMLKLKIDKNGNGNCYTCMGCRSFLTPYVDENGKPKYYGRFNQGVVTINLVDVACTAARDGSKSEEKFWQVLDERLELCHRALQCRHERLEGTLSDAAPILWQYGALARLKKGEPIDKLLHGGYSTLSLGYAGLWECVYEITGKKLTEKEGEEFGLRVMQRLNDACAEWKAAENIDYSIYGTPLESTTYKFAKCLQNRFGIIKGVTDRNYITNSYHIHVTEKIDAFSKLELESKFQKLSPGGAISYVEVPNMQQNIPAVLEVMKFIYNNIMYAELNTKSDYCQVCGYDGEIQIVEEDGKLVWRCPNCGNEDQSKMNVARRTCGYIGSQFWNQGRTQEIKERVLHL

SEQ ID NO: 896 - protein, 1020 aa, Unknown
  Description of Unknown: uncultivated organism sequence
  Category: MG60 effectors
  Description: MG60-107 effector
MVVIKRNSERVDFDPRKIEVAILKAFAEVRSESDDDIRECAKRIAHEIESTGKDLSVEEIQDMVEKKLMATKYKDVAKAYVEYRYKHKLIREFNTTDKTIKELLCGESDYWNNENSNKNARVVTTQRDYIAGITSTDIARRLLLPADVVEADDEGIIHFHDKDYFAQLSLHNCFDVTTRFITSNGVKAFSDFNDCDEATVLTHTGEWKRARVRKYGKQDLYRIVLKRGHGKEHIVYATANHRWFLQDGSVTTNLHVGDSLMKTPVIANVNLDDADVFEKQLWCKGFAFGDGQYCKAWDGTKIRLCGHKNKYARIFRAAGYTCTSPGNFENGDQEAHIPRYNKNEIPEMTPAETRYFVYGLLCADGDHPTSKGNTKANEFKGIQVTGEEKNFQVYNLLNIAGYYVSGYTDITGKTNYGERSDVTRRYAIQANQSHCNWKVQAIEYAKTDYVWCLNVEDCHSFVLEGGIVTGNCELVNLEDMLQHGTVLNGVMIRKPHRLLTATTIATQIITAVTSSSYGGCTINLSHLAPFVRDSYNAYVKKYRDRGVDEQTTKEWAELDTKKEIADSVQTFNYQCNSMTNTNGQAPFLSVFMYLNDAPEYQKETAMLIEEFLNQRLLGFQNETGHYVTPAFPKLLYVLDENNITEDSEYWYLTELAAKCTAKRMVPDYMSAKIMRRDKIDKNGNGNVYGCMGCRSFLTPYVDKDGKPKYWGRFNQGVVTINLPDIALSSGGDMEKFWKIFDERMALCHKALRCRHERLALATSDVAPILWQNGALARLPKGSPIHPLLHDGYSTLSLGYAGLYECVKYMTGESHSHGKGKEFGLRVMQTLNDFCKKWKEEESIDYSLYGTPIESTTYKFSKCLKKRFGIIEGITDKDYITNSYHISVREKIDPFEKLAIEAEYQKLSPGGAISYVECADLTQNPTAVLEVMRFIYDNIMYAELNTKSDYCQVCGYDGEIQIIDENGKLLWRCPNCGNEDQTKMNVARRTCGYIGTQFWNQGRTQEIKERYVHIDNHEVGE

SEQ ID NO: 897 - protein, 854 aa, Unknown
  Description of Unknown: uncultivated organism sequence
  Category: MG60 effectors
  Description: MG60-108 effector
MKVIKRNGSEVLYNQQKIKDAVSKANAEVSRVERLSQAQITAIANNVTKIIEQSSHAVSIEDIQNYVEKEIMAMRGYEVAQKYITYRYKRALARQSNTTDERILSIIGLENEEVKQENANKNPTINSTQRDYMAGEVSKDLTTRILLPQDIVDAHNNGLIHFHDADYYAQKMHNCFTGDTKFMTHKGAKRFDSFKDGESVFVRDMHNEIRKATVHIYGEQRVQKVTFKMLGKNKKKTVKCTPNHRWILEDKKVTTALKVGDVLFSNSYSHYEKWKVEKIEFKGIEKVYCVEEPITHSFTLEDGMVTGNCDLINLEDMLQNGTVISGTMIEKPHSFHTACNITTQVIAQVASSQFGGQSFSLAHLVPFVDISRKKIKKEILEENLINKIVESDEIINKKVEFRLKEEIKRGIQTIQYQILTLMTTNGQAPFVTMFLWLDEVEEGQARDDMAMLVEEVLNQRIQGVKNEKGVYITPAFPKVIYLLDEDNIHEDSKYYYLTELAAKCTAKRMVPDYISGKVMRELKDGDIYPCMGCRSFLTVDRTTENIANAKNYNPNKRKYYGRFNQGVVTINLVDVACSSYGNMNKFWKILDERLELCHRALQERHNRLLGTPSDVSPILWQHGALARLEKDEVIDKLLYGGYSTISLGYAGLYEMCMRMTGKSHTDPEAKPFALAVMQKLNDKCNEWKEKENIDYSLYGTPMESTTFKFARCLQRRFGIIKDVTDHDYITNSYHVNVRENIDAFTKLSFESEFQKLSPGGAISYVEVPNMQDNIPAVLAVLKHIYNNIMYAELNTKSDYCQVCGYEGEIQIVRDKHKKLIWKCPNCGNTDHNKMNTARRTCGYIGTNDFNQGVT

SEQ ID NO: 898 - protein, 778 aa, Unknown
  Description of Unknown: uncultivated organism sequence
  Category: MG60 effectors
  Description: MG60-109 effector
MFCSCKKKLCVVIYIYNATKTYDCAKKLIVYKSIIKGAEVMKIIKRNGAEETFDRQKIKDAIAKANNETDGTPELTDRQIDYISLVIEDHCNEMNRALSVEEIQELVETHIILQGAPETAKRYIRYRFTRNLARASNTTDNQILSLIECNNEEVKQENSNKNPTVNSVQRDYMAGEVSKDLTKRILLPEDIVKAHEEGLIHFHDADYFAQHMHNCDLVNLEDMLQNGTVISGTMIEKPHSFSTACNIATQIIAQVASNQYGGQSISLAHLAPFVQISREKITRQVRAEMEEFGIDADDEQVKSLVEKRVRDEIKRGVQTIQYQVVTLLTTNGQAPFVTVFMYLNEAKNEQEKKDLAIIIEEVLKQRIKGTKNEVGVWVTPAFPKLIYVLEEDNITEDSRFWYLTKLAAECTAKRMVPDYISEKIMLKLKIDKNGNGNCYTCMGCRSFLTPYVDENGKPKYYGRFNQGVVTINLVDVACTAARDGSKSEEKFWQVLDERLELCHRALQCRHERLEGTLSDAAPILWQYGALARLKKGEPIDKLLHGGVFFPLARHGGYSTLSLGYAGLWECVYEITGKKLTEKEGEEFGLRVMQRLNDACAEWKAAENIDYSIYGTPLESTTYKFAKCLQNRFGIIKGVTDRNYITNSYHIHVTEKIDAFSKLELESKFQKLSPGGAISYVEVPNMQQNIPAVLEVMKFIYNNIMYAELNTKSDYCQVCGYDGEIQIVEEDGKLVWRCPNCGNEDQSKMNVARRTCGYIGSQFWNQGRTQEIKERVLHL

SEQ ID NO: 899 - protein, 763 aa, Unknown
  Description of Unknown: uncultivated organism sequence
  Category: MG60 effectors
  Description: MG60-110 effector
MYIQPIITVSDTTHKFNFVKLFFQKNKNSLRDVWRGNGMKIIKRNGEEVVFDLKKIITAISKANNEVPPSEQLAGSTINSIAENIEKQCAAENHEMNVEAIQDLVEKAIMKAGAFDIAKKYITYRYQHQLMRRANSTDSQILSLLECNNEEVKQENSNKNSTVVSVQRDYMAGEVSKDITKRFLLDEDIVKAHEEGLIHFHDADYFAQHMHNCDLVNLEDMLQNGTVISGTKIDTPHSFSTACNIATQIIAQVASSQYGGQSISLAHLAPFVEVSRKKFQRETMRVEEQTGVKFTDEQFKKIVEMRIRDEITRGVQTIQYQVVTLMTTNGQSPFITVFMYLNEAKNEQEKADLAMIIEEMLKQRYQGVKNEKGFWVTPAFPKLIYVLEPDNIEPGSKYYSLTELAAKCTARRLVPDYISEKKMLELKVDANGNGNCYPCMGCRSFLTPYLDEHGKPKYYGRFNQGVVTINLVDVACSSNGDYKSFWEIFDERLELCHKALMRRHQRLLGTPSDVAPILWQHGALARLEKGETIDKLLFGGYSTISLGYAGLCECVRYMTGKPHTDPSATPFAIEIMKHLNEKCAEWKAESNIAFSLYGTPLESTTYKFAKCLKKRFGEIPGVTDKNYITNSYHVHVTEQMDAFTKLSFESQFQELSPGGAVSYVEVPNMENNIPAVMTLLKHIYENIMYAELNTKSDCCQKCGYTGEIQIVTDSDNKLVWQCPNCGNKDQATMNVARRTCGYIGTQYWNQGRTQEIKERVLHL

SEQ ID NO: 900 - protein, 758 aa, Unknown
  Description of Unknown: uncultivated organism sequence
  Category: MG60 effectors
  Description: MG60-111 effector
MRINMIIENYKKQYSFLAFSEKSWKSLSERITKLVENKTLNSVDEIRTYLDRILCSYIDKQISIGNIRIIHNMLILLKRRKLSYSNLLQEFLSQLEIYHIHMTESFYEVLKKESVLYQNIVKSLGISDLKFCELSAFWKEYSFYFKFSVHGKSLKEVKDIFDGYYYSLNVQEQKQVMDNMDSHLDQFRYLIYHASFLDGIYQVCYTKIRDISLSLFRKVIFSWSIDQLDLLIEEYCYNQIYGGSALEKYDKIWLLIKELKPQHDEKKKHLGNECLKIKGERRTLYSYFEKIKSNLSEEDKKVIDTLYVHLSKERQEGIDGYINGLYHQNDEVGRKASNDISMLKGQFKKYLINGCLKVKGERRTLYSYFEKIKSNLSAEDRGIIDILYTHLSKERQEGIDGYISGLYHQNDEVGRKASNDISILKRQFKKYLQSGCLNLKNEPHTLYFYFRMLKSDLSEEDKKVIDTLYAHLSKERQEAIDGYISGLYRYNDNMRRKASNDILILKRQFARYLAKGDLTIRSKDRSLYSCFEKIKSNLSEEDRRIIDILYNHLSKERQEGIDGYINGLYHQNDEVGRKASNDISTLKRQFKKYLESGCLNLKNEPHTLYFYFKMLKSDLSEEDKKVIDILYARLSKEKQEEINGYINGLYHQSDEVRKKARIDLLGLRRKFERYLKIESLEVCSKKQLEVKQVLLDALKVIEMSFYRLGYTTSEYLKYKNEKMIEIMNKGNFSHYNILYIFIMESFYFIKEQEKIRSL

SEQ ID NO: 901 - protein, 768 aa, Unknown
  Description of Unknown: uncultivated organism sequence
  Category: MG60 effectors
  Description: MG60-112 effector
MFCSCKKNLRVVIYIYDATKTYDCAKKLIVYKSIIKGAEVMKIIKRNGAEETFDRQKIKDAIAKANNETDGTPELTDRQIDYISLVIEDHCNEMNRALSVEEIQELVETHIILQGAPETAKRYIRYRFTRNLARASNTTDNQILSLIECNNEEVKQENSNKNPTVNSVQRDYMAGEVSKDLTKRILLPEDIVKAHEEGLIHFHDADYFAQHMHNCDLVNLEDMLQNGTVISGTMIEKPHSFSTACNIATQIIAQVASNQYGGQSISLAHLAPFVQISREKITRQVRAEMEEFGIAADDEQVKSLVEKRVRDEIKRGVQTIQYQVVTLLTTNGQAPFVTVFMYLNEAKNEQEKKDLAIIIEEVLKQRIKGTKNEVGVWVTPAFPKLIYVLEEDNITEDSRFWYLTKLAAECTAKRMVPDYISEKIMLKLKIDKNGNGNCYTCMGCRSFLTPYVDENGKPKYYGRFNQGVVTINLVDVACTAARDGSKSEEKFWQVLDERLELCHRALQCRHERLEGTLSDAAPILWQYGALARLKKGEPIDKLLHGGYSTLSLGYAGLWECVYEITGKKLTEKEGEEFGLRVMQRLNDACAEWKAAENIDYSIYGTPLESTTYKFAKCLQNRFGIIKGVTDRNYITNSYHIHVTEKIDAFSKLELESKFQKLSPGGAISYVEVPNMQQNIPAVLEVMKFIYNNIMYAELNTKSDYCQVCGYDGEIQIVEEDGKLVWRCPNCGNEDQSKMNVARRTCGYIGSQFWNQGRTQEIKERVLHL

SEQ ID NO: 902 - protein, 768 aa, Unknown
  Description of Unknown: uncultivated organism sequence
  Category: MG60 effectors
  Description: MG60-113 effector
MFCSCKKNLRVVIYIYNATKTYDCAKKLIVYKSIIKGAEVMKIIKRNGAEETFDRQKIKDAIAKANNETDGTPELTDRQIDYISLVIEDHCNEMNRALSVEEIQELVETHIILQGAPETAKRYIRYRFTRNLARASNTTDNQILSLIECNNEEVKQENSNKNPTVNSVQRDYMAGEVSKDLTKRILLPEDIVKAHEEGLIHFHDADYFAQHMHNCDLVNLEDMLQNGTVISGTMIEKPHSFSTACNIATQIIAQVASNQYGGQSISLAHLAPFVQISREKITRQVRAEMEEFGIAADDEQVKSLVEKRVRDEIKRGVQTIQYQVVTLLTTNGQAPFVTVFMYLNEAKNEQEKKDLAIIIEEVLKQRIKGTKNEVGVWVTPAFPKLIYVLEEDNITEDSRFWYLTKLAAECTAKRMVPDYISEKIMLKLKIDKNGNGNCYTCMGCRSFLTPYVDENGKPKYYGRFNQGVVTINLVDVACTAARDGNKSEEKFWQVLDERLELCHRALQCRHERLEGTLSDAAPILWQYGALARLKKGEPIDKLLHGGYSTLSLGYAGLWECVYEITGKKLTEKEGEEFGLRVMQRLNDACAEWKAAENIDYSIYGTPLESTTYKFAKCLQNRFGIIKGVTDRNYITNSYHIHVTEKIDAFSKLELESKFQKLSPGGAISYVEVPNMQQNIPAVLEVMKFIYNNIMYAELNTKSDYCQVCGYDGEIQIVEEDGKLVWRCPNCGNEDQSKMNVARRTCGYIGSQFWNQGRTQEIKERVLHL

SEQ ID NO: 903 - protein, 843 aa, Unknown
  Description of Unknown: uncultivated organism sequence
  Category: MG60 effectors
  Description: MG60-114 effector
MIKCIECGHTISERAKKCPKCGCPVEKDIEKKMCPECGQSVNKDLDKCSYCGYPFDLVQSIDDTNSSVNKVCPECGQSVNKDLNKCSYCGYPFDLVQSVDDANSSVNKVCPECGQSVNKDLNKCSYCGYPFDLVQSVDDANSSVNKVCPECGQSVNKDLNKCSYCGYPFDLVQSVGDANSSINKVCPECRQSVNKDLDKCSYCGYPFNLVQSVDDANSSVNKVCPECGKSFDDKCDVCPHCGCFYSYQHISQFENVELNKANIESSEPKQEHQSTTDIRKTLLKRNKTTIISLSMLTILIVVGGLLYYFLVNHSEKNDWNKFGLKGSACVLRVIISTQYGDNTELVRNEKKYYFSVNGYLEKEEIDYTYHWGYRQYVKGKIVEEKDFNGITYHYTYENPLIGISEDNREYHYDKEGRLIFSVLYGDSTVYRYDDEGFLKETEVLNFQGLDGCEIQTYSNPLHVDGITKVDEYGNWIERKYEYEGEGGMIYVTENREIEYYSESSQVGNYGEAISEVSIEEYPSQLPQNRKEALDILNLVLINSYKVEEDCESEYAIPVRIEGNAEIVGIQRKGYKDGYFPFTIYRLRQIANHWQIVNEKTINENEMDGQVLIFSAKRFGLADENMPELVRINNKDYFYFIYRIAELGNGCAGCGYLRLCLYNLDSHDVLSLNYAVYGEINELLKGEFVDLEKLESYPDENRFLQKKATELTCIYRPSEEDLDMDNPKNSVKRWLLDNPGKYEPQNTTIKYTYYNTSIFDWDNYNDEKENRIENDSFIVVHDWRGSVYAYDKEKKRYFVIYGIEINGGARKVSWDNRASDVVVIDTDWCGMRINLLSGKMELLE

SEQ ID NO: 904 - protein, 1081 aa, Unknown
  Description of Unknown: uncultivated organism sequence
  Category: MG60 effectors
  Description: MG60-115 effector
MKSVIDFETRSPVDIKTCGAYAYAAHPDTEVMMLAVRICGQEARVWVAPAYRHFLDTELSDDELQDIINNCEEIAAHNAPFERAIWKFKMEPLWFKPLPLEKIRCTMSQALMCNLPRKLEQAVKVWRKDAPQKDNEGHKLMMKMSKPRKFRKAELSAFPDPEKAKATQEYVYAVLSKGGIPTIKNYHQYIVYPCDEPMFKRYVEYCRQDVVAEEVLFTELPPIPERELKVWRLDQTINDRGVGIDRFHAVKIMDMVNKVEDILTEEASEITYGAVSTMKSSKAIIEWLQSRGVDTDSASKQAISDLLERPDLPSDVRRFLEIRQTIAMSSTAKYQTMLCTSCYDGRAHGTMIYHGASTGRFSGALIQPQNLTRPSTNNMNIPEGSKPLDNYDISEMDVRLAASGNIDLIQQYWKDPKVLASDCLRAMIRASEGRVFMCADYSGIEARALAYLAGEEYVLQGFRDGLDPYKVAATTIYGVKYENVDKKQRQVGKTATLACFTADTKVYTRDGVKNIVDVTKDDYVWDGENWCLTDGAYYQGVKEVVNFLGVESTPDQKWLMGENIWVESDAGKVLLETFMEIFKSCHCVEKQEISCTQDASLAGENAMCRHGTYCLEEQLSALNADENLELKQSQNTIQWSSLTREDGLIDYTQQLADVIMKQIQHMNGMEPEELKYTMNGWKIKIPSLNICVELTIGTTQGMKSTALITTMDTCREMLGVSWDETIKETPQEIDLYRMVEELCALLIFGVSIAPNIEARELLVNYLEKESIPKKSSNQCRKESVVNTTKYITSKKFFTVEKNCLSMSFGKNMFRGTRKNLIFKLDSIKDRVLSTSSRTKKSDNKENVYDLLNCGDKSRFTISTSYGPRIVHNCGYGGGYGAFLRFGADRMGIDEEEGKKIISSWRDGHPMTVKLWNKLVEASVMAMTNKGEIYSYRGVSFRYHKRFLLMKLPSGRFLFYFDPKLEDVGMAWSTPERPAFKKLVTAMTLTPEKQFVRRPLNHLILSENLTQAFCRDLMVNALFNLEEAGYPVVFHVHDEIISEVPIGYGDIKEFEEIMCKLPLWAKDLPVKAEGWVGKFYRK

SEQ ID NO: 905 - protein, 965 aa, Unknown
  Description of Unknown: uncultivated organism sequence
  Category: MG60 effectors
  Description: MG60-116 effector
MSLKIEDLETFKRHRYAVSESLSTDIVGRDREIEEISSKIDSVYCLTITGPAGVGKSRLAVAAIEHYCASHTDFEVLCAKSFSDYISALDEAIEEGRRYIIFIDDANTYPRLIELLEFLKYRNQEGNIKAILTVRDYLKGCLDSDIYMGFYEVKPLNDKSIEDALVKNTTIRNEDWLKQIAKIANGNIRVAFLAANEAIKNNKSLGSIYNQKDVLNRFYKDEMSKIDHSESLLITAGVIAFFKSIYLEQLFYIVPILKSVNLSKKSFIENVNILIKMKIVDDYHDVVKIADQCFADFLLNYTIVEKRYLKIKDLLLVGFKYYKERIVESIHTILHVYNTEEFVDHLRKEVTDACNNLEDDVSLKHDLESCFVQVIPEYVSREYIEGVENYSDKKDIKWLINVFSGLAFSNYNEIANKGILKLLKKTKNKTKEVYDAIKNTYEMRAERANERFQYQIALIKELQNGGLYNDEFNALVSSYLNFRFSYSCFTSKREMMHYTFSVDDNTAGILELRSTCWGYLFNCELSKAIDSIMDFANRHYIERNLEIIKNDLRCINTYLCEHDQSGFLNSVLYVKFIDEAKEYCFTDLLTANEKYLDFLDIVFERKLLGANYEGYEARYKNRVADYYNLHKDDIYDILNETDLFLNKYYKYQKTRLVNALVEVVDKFSNALFFLCTKNGIFPHLVIEEFLKNRNLDEAYALINQIDDETIKDEYLYNFYSYLSKENIEKDYGFIGWMNSKGDFKTNRTYHRDAMSLKNIAEKCGLDYVALLRKLYSKEKYNKFIAKAYLSYLIDNVETFKELLSLNQNLAIKIYEFLIANGEKDYESSVLIEILDVKRSYIKVFAKAFIEEEYYNDCNLDFIFEKEYCDSFLDECMKVMLSQKINFAPFKLRILISRNINQPNMERWIEKYIESNYKEDNVIELFFQALSEIDHQHKNAYLVLYYQKGHDINVLRQAILKKIPFL

SEQ ID NO: 906 - protein, 754 aa, Unknown
  Description of Unknown: uncultivated organism sequence
  Category: MG60 effectors
  Description: MG60-117 effector
MNYEEKLTQLASDYADWWNKGYEMPSMTSNLYPYDNMFSPVRVNRLTLKNRLVMAPMGNICMCDETGRPNEKMLKYFEERAKGGVGLITTGLIPVTYGIDKSLIELGDLTYFPRIDRSRTVFAPWRDLAGMCHAHGSAIFIQLTAGLGRVGNPQCLTNQLKLPRSSSFNPNWYMKDVPCLRLSDISLNKIIKKIGQGSADAKACNLDGVYLHGHEGYLIEQIANKAFNHRKLGKFADPTVFGIEMVKEIRRRVGANFPIMYRIDLSLMLNATYKAKMDNVSPLKKFKNERRIEETLEYMRELVEAGVDMFDVDLGCYDNWWLPHPPSSMPSGCFLDISEIAKKYFADNNIKSNMGLEIPVVAVGKLGYPDFAEKALRDGKCDMIMLGRPLLADAEWCNKAYAGKVSDIRPCIGCQEACLNEFVEGGHPQCAVNPRTAFEEEYSPEIPKADVVKKVAVVGAGPAGIVAADTLIKRGHKVDLYEKSGEIGGSVIPGSKPMIKYEFKNYLDYLKGVVAKLEKNESFKLFMNTAADAQSLKEKGYDSIVIAAGTVQNRPPVEGINNKNVVFAVDVLNDRNIVKDAEDIVVIGGGVVGAETAYVLRYELKKNVKVVEMDKYIMNHVCTANRGHLIHYLEEGGVELLNMTTLKKVEDGKIVVEQNINKNVPNPYITWSPILPENVENPMDALRPIKNEPVTRELKADMVVLAAGNRSAIDIYYDCVKNHSAAEIFNVGDSFKGARVFEAVRSAYRKARSI

SEQ ID NO: 907 - protein, 754 aa, Unknown
  Description of Unknown: uncultivated organism sequence
  Category: MG60 effectors
  Description: MG60-118 effector
MNYEEKLTQLASDYADWWNKGYEMPSMTSNLYPYDNMFSPVRVNRLTLKNRLVMAPMGNICMCDETGRPNEKMLKYFEERAKGGVGLITTGLIPVTYGIDKSLIELGDLTYFPRIDRSRTVFAPWRDLAGMCHAHGSAIFIQLTAGLGRVGNPQCLTNQLKLPRSSSFNPNWYMKDVPCLRLSDISLNKIIKKIGQGSADAKACNLDGVYLHGHEGYLIEQIANKAFNHRKLGKFADPTVFGIEMVKEIRRRVGANFPIMYRIDLSLMLNATYKAKMDNVSPLKKFKNERRIEETLEYMRELVEAGVDMFDVDLGCYDNWWLPHPPSSMPSGCFLDISEIAKKYFADNNIKSNMGLEIPVVAVGKLGYPDFAEKALRDGKCDMIMLGRPLLADAEWCNKAYAGKVSDIRPCIGCQEACLNEFVEGGHPQCAVNPRTAFEEEYSPEIPKADVIKKVAVVGAGPAGIVAADTLIKRGHKVDLYEKSGEIGGSVIPGSKPMIKYEFKNYLDYLKGVVAKLEKNENFKLFMNTAADAQSLKEKGYDSIVIAAGTVQNRPPVEGINNKNVVFAVDVLNDRNIVKDAEDIVVIGGGVVGAETAYVLRYELNKNVKVVEMDKYIMNHVCTANRGHLIHYLEEGGVELLNMTTLKKVEDGKIVVEQNINKNVPNPYITWSPILPENVENPMDALRPIKNEPVTRELKADMVVLAAGNRSAIDIYYDCVKNHSADEIFNVGDSFKGARVFEAVRSAYRKARSI

SEQ ID NO: 908 - protein, 757 aa, Unknown
  Description of Unknown: uncultivated organism sequence
  Category: MG60 effectors
  Description: MG60-119 effector
MIQVIKRDGSKAKFEKDKIVIAIEKAMKSASGVFVKNQAMDIANEIESEALGEDAISIYKIEDMVYYKLIDRKNPATAKSYESYKSVQAYKREQNTSDEDILGLLNQTNIDVMDENSNKNPIIASTQRDLIAGEVAKDIAKRKLIPIDLVEAHNSGAIHIHDLDYLIQPIFNCCLVDMKDMLDNGTVVNDKMIETPKSFQVACNVMTQIIAQIASNQYGGQSINISCLSPYLKKSYDKNLKLSRSILDDDEKVVEMAEALTQRDLESGIQTIQYQINTLMTSNGQSPFVTLFMHTDENDPYLSSTVKIIEEILIQRIKGIKNEQGVYVTPAFPKLIYVLDENNVHEGSKYYKLTELAAKCTAKRMYPDYISAKKMRENYEGNVFSPMGCRAFLPPYKDENGNYKFDGRFNMGVATINLPQIGILADGDEDKFFEILDKRLDLIKQVGLLRYEHLSKVTSDSSPIHFRHGAIARLKRHQSIKPLLENGYATVTIGYIGIYEASILTTGESHTSKRGHDFAMKIMKVLNEKKEEWTKEYGIAFAVYGTPAESLTHRFASIDKERFGSIENVTDKGYYTNSFHVDVREKISVFDKFDFESEFQQLSTGGCISYAEIPNMTNNINAVMTMVKYIYDHIQYAEFNTKSDYCAECGFDGEILLDEDNNWYCPNCGNKDRNTLTVVRRTCGYLGENFWNEGRTKEIKARVLHIWDMGKLENMTLPMVLESGPLFSYQVAIGIVRIALIGTIWILTLVKSGMKRP

SEQ ID NO: 909 - protein, 1041 aa, Unknown
  Description of Unknown: uncultivated organism sequence
  Category: MG60 effectors
  Description: MG60-120 effector
MVGRTAVHPSRKKEEKKRKGDERHMIKVKKRTGKIVDFDESRIANAVQGALTDIGHPDAQLAQEIAVEIHSGLIADGVESITIAGIQKRVETALMSRKQFDAARAYIEYRHRKDITRALKEKAEERNRNIMKLIRNDDDDIRKENSNKDTSLVSTRFSYMAEEANKEIASEILFDKDLIEAHKAGMIHIHDMGFAALPMHNCFTRTTRFVTTEGVKSFEDFIDGEEVTVLSKDGKWHKATVHNYGKQPMQKVLFKCLKSTKEVVCTPNHRWVLADGSVTTKLKEGMTLVQLPLYEISEPKTKKQCQAFALGFILGDGFDRGKFVEARLCGPKKKYADIFKKAGYHITYPDLDNGDARVRKAPSRKQSFLDGRCWQYLDLEDKQYLFLGLYAADGRDTENEYSGRFITSADERIMKMICDISATAGYHVSSVKKETHDTPYKKEAVLYTIRFRRWQNSGGNYWSVSQISSFEDREAWCIEEPDTHSFILDGGMVTGNCDVWNLDDMLQNGTVMNGIAISKPKSLATAVTIATQIVISIAASQYGGQTFSISALAPFVRVSYEKHLKEVEADAKGSGIVMTDDQVRFVAENRLRKEIKDAVQTLQYQLISCAVSNGQAPFVSVFMYLDEKPEYKKETAMLAEEILRQRYAGIPNKQGVPVSVAFPKLLFVLDEDNVPEDSEYHYLLKMAVKCSAKRMVPDYISAKKMKEYKEGNVFPCMGCRSFLSPWKDENGNYKFYGRFNQGVVTVNLVDAALSSGKDEARFWEIMKERTDLCYRALMTRHKLLLGTKSDVAPILWQHGALARLKPGEVIDPLLFGGYSTISLGYVGLYECTLYMTGHSHTSPEGKAFAMKVMKYLNDRCDEWRAATDIGFSVYGTPEETTTDKFAKCLKKRFGIVPGITDHDYVTNSYHVNPAEKIDAFSKLALEGEFQAYSLGGEISYVEVPNMEKNLAALESVVEFMYDNTVYAEVNTKSDYCQKCGYDGEMLIDPKRMEFYCPNCGNTDYATMNITRRVCGYLSTNFPTTHGRMADISARVLHLDAE

SEQ ID NO: 910 - protein, 751 aa, Unknown
  Description of Unknown: uncultivated organism sequence
  Category: MG60 effectors
  Description: MG60-121 effector
MEENVQTNVIKRNGEEVTFDIEKIFNAIAKANKEVDPIHQMSDVQIRAVSENVAREVRKAPHAVNVEDIQDMVETGIMEMRGFEVAQKYVRYRYKRTLARKSNTTDDGILALIEQNNEEVKQENSNKNPVINSTQRDYMAGEVSRDLSRRILLPEEVVRAHEAGIIHFHDSDYYAQKEHNCDLINLEDMLQNGTVISETLIEKPHSFYTAANVTTQIVAQVASNQYGGQSFTLAHLAPFVDISRKKLRKQTAEELQAVGEEIDEKKVESIAEIRLKDEVTRGIQTIQYQLITLMTCNGQAPFVTMFMYLDEVPEGQTREDLAMLIEEVLRQRMQGVKNEKGVWITPAFPKLIYVLDEDNITEDSRYWYLTKLAAECTAKRMVPDYISAKKMKELKGDVYPCMGCRSFLTPDNEQQPEGLCNDGNKAEAGDYTPGQHKYYGRFNQGVVTINLVDVACSAVKEAEKAGTDKFDEFWKILDDRLELCHRALRCRHERLMGTPSDVAPILWQYGALARLKKGEKIDKLLFGNYSTISLGYAGLYEMCVEMTGKSHTDEEAKPFALKVMQTLNDYCMKWRKAENISYSLYGTPMESTTYKFAKCLQKRFGIIKDVTDHNYITNSYHVNVREKIDAFRKLEFESEFQKLSPGGAISYVEVPNLQDNIPAVLSVMQFIYENIMYAELNTKSDYCEVCGYDGEIQIHEDEHGKLIWVCPNCGNTDQTKMSVARRTCGYIGTQFWNQGRTQEIKDRVLHL

SEQ ID NO: 911 - protein, 768 aa, Unknown
  Description of Unknown: uncultivated organism sequence
  Category: MG60 effectors
  Description: MG60-122 effector
MFCSCKKNLCVVIYIYDATKTYDCAKKLIVYKSIIKGAEVMKIIKRNGAEETFDRQKIKDAIAKANNETDGTPELTDRQIDYISLVIEDHCNEMNRALSVEEIQELVETHIILQGAPETAKRYIRYRFTRNLARASNTTDNQILSLIECNNEEVKQENSNKNPTVNSVQRDYMAGEVSKDLTKRILLPEDIVKAHEEGLIHFHDADYFAQHMHNCDLVNLEDMLQNGTVISGTMIEKPHSFSTACNIATQIIAQVASNQYGGQSISLAHLAPFVQISREKITRQVRAEMEEFGIAADDEQVKSLVEKRVRDEIKRGVQTIQYQVVTLLTTNGQAPFVTVFMYLNEAKNEQEKKDLAIIIEEVLKQRIKGTKNEVGVWVTPAFPKLIYVLEEDNITEDSRFWYLTKLAAECTAKRMVPDYISEKIMLKLKIDKNGNGNCYTCMGCRSFLTPYVDENGKPKYYGRFNQGVVTINLVDVACTAARDGNKSEEKFWQVLDERLELCHRALQCRHERLEGTLSDAAPLLWQYGALARLKKGEPIDKLLHGGYSTLSLGYAGLWECVYEITGKKLTEKEGEEFGLRVMQRLNDACAEWKAAENIDYSIYGTPLESTTYKFAKCLQNRFGIIKGVTDRNYITNSYHIHVTEKIDAFSKLELESKFQKLSPGGAISYVEVPNMQQNIPAVLEVMKFIYNNIMYAELNTKSDYCQVCGYDGEIQIVEEDGKLVWRCPNCGNEDQSKMNVARRTCGYIGSQFWNQGRTQEIKERVLHL

SEQ ID NO: 912 - protein, 760 aa, Unknown
  Description of Unknown: uncultivated organism sequence
  Category: MG60 effectors
  Description: MG60-123 effector
MCVVIYIYNATKTYDCAKKLIVYKSIIKGAEVMKIIKRNGAEETFDRQKIKDAIAKANNETDGTPELTDRQIDYISLVIEDHCNEMNRALSVEEIQELVETHIILQGAPETAKRYIRYRFTRNLARASNTTDNQILSLIECNNEEVKQENSNKNPTVNSVQRDYMAGEVSKDLTKRILLPEDIVKAHEEGLIHFHDADYFAQHMHNCDLVNLEDMLQNGTVISGTMIEKPHSFSTACNIATQIIAQVASNQYGGQSISLAHLAPFVQISREKITRQVRAEMEEFGIAADDEQVKSLVEKRVRDEIKRGVQTIQYQVVTLLTTNGQAPFVTVFMYLNEAKNEQEKKDLAIIIEEVLKQRIKGTKNEVGVWVTPAFPKLIYVLEEDNITEDSRFWYLTKLAAECTAKRMVPDYISEKIMLKLKIDKNGNGNCYTCMGCRSFLTPYVDENGKPKYYGRFNQGVVTINLVDVACTAARDGSKSEEKFWQVLDERLELCHRALQCRHERLEGTLSDAAPILWQYGALARLKKGEPIDKLLHGGYSTLSLGYAGLWECVYEITGKKLTEKEGEEFGLRVMQRLNDACAEWKAAENIDYSIYGTPLESTTYKFAKCLQNRFGIIKGVTDRNYITNSYHIHVTEKIDAFSKLELESKFQKLSPGGAISYVEVPNMQQNIPAVLEVMKFIYNNIMYAELNTKSDYCQVCGYDGEIQIVEEDGKLVWRCPNCGNEDQSKMNVARRTCGYIGSQFWNQGRTQEIKERVLHL

SEQ ID NO: 913 - protein, 763 aa, Unknown
  Description of Unknown: uncultivated organism sequence
  Category: MG60 effectors
  Description: MG60-124 effector
MKMIQQLYSIFVAFATVFLKNKYIIRTYKSNKKYLIDIRKMALLKDLYTRKEWGKMKVIKRDGRTIEFDREKIEVAIEKANKEVRGKEKATKDEINEIIAYIEDLGKKRMLVEDIQDVIEEKLMELDKYELAKKYIVYRYTRALVRKSNTTDESILGLIKNENKELAEENSNKNTMLASTQRDYIAGEVSRDLTKRILLPEKISKAHEEGILHFHDADYFVQPIFNCCLINIGDMLDNGTAMNGKMIETPKSFQVACTVTTQIIAAVASNQYGGQSVDLKHLGKYLRRSHDKFQKRLTEKYGGKLPKQTIDDMIRDRVKEELAAGVQTIQYQINTLMTTNGQSPFVTLFLHLEPDDEYIKENAMIIEEVLKQRIQGIKNEVGVYVTPAFPKLVYVLDEHNCLKGGKYDYLTRLAVKCSAKRMYPDYISAKKMKENYEGNVFSPMGCRSFLVPWKDENGNYKFEGRFNQGVVSINLPQIAIIAQGDEDKFWKLFDERLELCREALMCRHYALLGTSSDISPIHWQNGAIARLKKGEKIDKYLKDGYSTLSLGYIGIYETTKLIKGVSHTTPEGHDFAIKIMKYLKDRTNLWRKETGLGFSLYGTPAESLCYRFARIDKEKFGSIPDVTDKGYYTNSYHVDVREKIDAFHKLKFESEFQPLSAGGAISYIEVPNMKNNLTALEEVVKFIYDNIQYAEFNTKSDYCQVCGYDGEMIINDQNEWECPQCGNKDHNKMNVVRRTCGYLGENFWNVGKTKEIKSRVLHL

SEQ ID NO: 914 - protein, 754 aa, Unknown
  Description of Unknown: uncultivated organism sequence
  Category: MG60 effectors
  Description: MG60-125 effector
MKVVKRDGKIVDFDEDRIRIAIGKANNEVDDSDKATEEEIDEIVKKIRTLKRKRILVEDIQDMIEDGLMNYKRFNLAREYITYRYNRALVRKANTTDQTIKELVDGESEYWNTENSNKNSKVVTTQRDYLAGITSTDITRRFLLPQDVVKAHDEGIIHFHDADYFAQNALTNCCLINLNDMLQNGTVINGMMIEKPHRFITACTIATQIILGVSSSQYGGCTITLTHLAPFVRDSYNRALKKYKERGLSQKEAEKFAELDTRKEIADGVQTFNYQVNSMTNTNGQAPFLSVCMYLGETKEYKKELALIIEEFLNQRILGFKNEKGVYITPAFPKLLYVLEEDNIHKDSPYWYLTELAAKCTAKRMVPDYISEKKMKEYKINQYGEGDCYPCMGCRSFLTPDRIKGNVAKAKDYVEGKGKYYGRFNQGVVTINLPDVALSSKKDEKEFWKIFDERLEICHKALRCRHERLAKITSDAAPLLWQHGAYARLGKGEKILPLLKGGYSTLSLGYAGLYECVKYMTGDSHTDGGKGEEFGLKVMQYMNDKCNKWKKEEDIDYSLYGSPIESTTYKFAKCLKKRFGTVKGITDRKYITNSYHVPVFEEIDAFSKLKLESKFQRLSPGGAISYVETPNLQNNIEVVEQIIEYIYNNIMYAELNTKSDYCQKCGYTGEILIDDNLEWYCPNCGNRDHDTLNVARRTCGYIGTNFWNKGRTEEIKERVLHIDNKDYVDTKAPKVEAKEEKKEKAKEKVSVSAN

SEQ ID NO: 915 - protein, 768 aa, Unknown
  Description of Unknown: uncultivated organism sequence
  Category: MG60 effectors
  Description: MG60-126 effector
MFCSCKKNLRVVIYIYNATKTYDCAKKLIVYKSIIKGAEVMKIIKRNGAEETFDRQKIKDAIAKANNETDGTPELTDRQIDYISLVIEDHCNEMNRALSVEEIQELVETHIILQGAPETAKRYIRYRFTRNLARASNTTDNQILSLIECNNEEVKQENSNKNPTVNSVQRDYMAGEVSKDLTKRILLPEDIVKAHEEGLIHFHDADYFAQHMHNCDLVNLEDMLQNGTVISGTMIEKPHSFSTACNIATQIIAQVASNQYGGQSISLAHLAPFVQISREKITRQVRAEMEEFGIDADDEQVKSLVEKRVRDEIKRGVQTIQYQVVTLLTTNGQAPFVTVFMYLNEAKNEQEKKDLAIIIEEVLKQRIKGTKNEVGVWVTPAFPKLIYVLEEDNITEDSRFWYLTKLAAECTAKRMVPDYISEKIMLKLKIDKNGNGNCYTCMGCRSFLTPYVDENGKPKYYGRFNQGVVTINLVDVACTAARDGNKSEEKFWQVLDERLELCHRALQCRHERLEGTLSDAAPILWQYGALARLKKGEPIDKLLHGGYSTLSLGYAGLWECVYEITGKKLTEKEGEEFGLRVMQRLNDACAEWKAAENIDYSIYGTPLESTTYKFAKCLQNRFGIIKGVTDRNYITNSYHIHVTEKIDAFSKLELESKFQKLSPGGAISYVEVPNMQQNIPAVLEVMKFIYNNIMYAELNTKSDYCQVCGYDGEIQIVEEDGKLVWRCPNCGNEDQSKMNVARRTRGYIGSQFWNQGRTQEIKERVLHL

SEQ ID NO: 916 - protein, 1323 aa, Unknown
  Description of Unknown: uncultivated organism sequence
  Category: MG60 effectors
  Description: MG60-127 effector
MSNFESYLNQFRVQKGEACNYTGMTINRGSFYIPEENRTTFLSKYYDHVFKQGGSSDLIERHSDLCCVLYDLDMKIDKESEERGYTREIINSFIEISTRIMKKYFDLPVSAYQCFVLEKDKPTVKKECKKDGVHLMFPYIVTEPSIQHLIRDEIVIEAKHLFEECLNTIEDIVDISVLDKNGWMLLGSSKIDGLPYNLTGIWSYENIEDVGNTFPNRVETSEYYTPSLDLVTLLSIRRFTLADITNFKSDMQDFLESWIDDFNTIQEEKNNIHTRRFHGNINKDMKVNMKTVQSLVSILSTDRAKNYEEWIELGFCLHTISDELLQTWIEFSERVDDYRETASADCSARWGKMRETGLGLGTLHMWAKADNYKAYLEIIQNDLEYFIVKTVNSALSNKDDAKDKAKKEVNISDVIFNVVLALKQKYYHYFICSSYEKKHWYEFEDIRWVEGDADVGLKRKIREDLYDDYVAVSTKYRKLSERFQNDHPNKEKYELISAEVFKVAQKLRDATFRKRLLEEASEQLYWSRDRSKQLSSSKFEEILDVNEKLIGMKNGVYDLEKQCFREARCEDYVSLSADIEYQEYFWNDEIIQDINTFISQVLTNKDVRDYVLQTFAMCLDGQIYNEHFHIYTGCHAKGSEILMHDGTIANVENVKVGDMLMGPDSKPREVHELVNGYSQMYEIIPSKGEPFVVNEDHIMVLKATTINNVVKCKNEKRFKLSWHERDIFGFPVSKCKNFPYNGRLKYKKNVIYYKTEDDARNAIEIYRNDLIMNNLNYIKNGDVIEIPLKEYIKRMKKINGAKNYFLFKEGVDFPEKDVKIDPYMLGYWLGDGTSKAFAITTMDDIVIDYFDQKTVVDENMDKKVYHKKNNKAKTIYYSSKEKKHGKNRLLNSMKEYNIYNNKHIPSVYKFNNRQTRLELLAGLIDSDGHYNVKSKHYEITLKIEKLIDDTVYLARSLGFAVTKRTVKKTCTNNGKTGMYFNVLICGNNLNEIPVLIERKIARDRLKKKDPLRFGFKVNKLENDQYYGFKLNQDHLYLAGDFFVHHNCGSNGKSKILELFELSFGQYCSKLSIAALTQKRVSSSAATPEIARLRGRRFVVLQEPGENEILNVGLMKEMTGGDKIVARSLNKDPIEFKPQFNMILTCNQRPKIPSDDQGSWRRIRVVEFTSKFTANPDPNDPNQFMIDTDLTSKLKKWGKPFFWILTQYYKEFKKNGYKEPAEVTAATNEYQKEQDAYSEFVTDCLKLDKTSYADVKEVYTVFQEYVRYNNDQKPSKKAFEKYMNTRFGKFGRHRDSKCWKGFKIDEAALNENYGISENPEDELL

SEQ ID NO: 917 - protein, 787 aa, Unknown
  Description of Unknown: uncultivated organism sequence
  Category: MG60 effectors
  Description: MG60-128 effector
MLYDDQPISQDEEDKLNRTPFVDEIVELIDRYTEYDEKKDNHDGLVIGLEGAWGSGKTSALNLLENRFRDKNERYVVQRLDSWLAMDCTTLAAEFFKTLGAATIESGISSEYETLLQRIVRNVCGYTLRLVTWIKLKKLPKIGPKIVAHIDKMEPSKWVRKTPAHVLKFGKNVIRSSTISLKVIKIDFGKIIKDTTIRKEKEDLRVDLSKSKKYIIYMIDDIDRLNNDEIAFVMQLVKNIADFPKVIYILAYDRNIVAEALQRIDGKNGRDFMEKIIQVPIQMPEFGKAGLLRYFCDELRTIVQSESSSQNKVRFDTSQGKIIMDKVYMSIEPYLKNFRDCKRLLNAYQIRYYICSRFCAPDDLLCIVVLETFEPGAITYLINHYNAFYSSLLPESRNVSATDIKNYRDEIKQEASCSERALKILASLFPAFATKINETTSAQLINGKALIENRISERENFLSYFILSPNENAVFSDVIKDLLLNWQEEDIAEQLKQWARGGKLQSALLKIGAYCDLYNQDIKLERDRWMPILHGISSVQNIRLYANQTYTWADVPWAVVEKIIDLPIFGGNPDHVNIDTAGWIVDIFRDENVSLETLEVLMWHIGSGYEWARPESYADSAPEVEEDLFMSCKELFVRRLKGNLSKEGFFDSVMINLFLAHLMKEDMAYLNQYLASLSTIESIYPWLKVALEEETHRKFYGLKRRAWHHKDDLLAITPKSYAALVDKELDQIPEDWLSDQKWTTLVLYDAYVHQETWTQTKGAFIKEESLEEYGNKVYHARKNKKVN

SEQ ID NO: 918 - protein, 768 aa, Unknown
  Description of Unknown: uncultivated organism sequence
  Category: MG60 effectors
  Description: MG60-129 effector
MFCSCKKNLCVVIYIYDATKTYDCAKKLIVYKSIIKGAEVMKIIKRNGAEETFDRQKIKDAISKANNETDGTPELTDRQIDYISLVIEDHCNEMNRALSVEEIQELVETHIILQGAPETAKRYIRYRFTRNLARASNTTDNQILSLIECNNEEVKQENSNKNPTVNSVQRDYMAGEVSKDLTKRILLPEDIVKAHEEGLIHFHDADYFAQHMHNCDLVNLEDMLQNGTVISGTMIEKPHSFSTACNIATQIIAQVASNQYGGQSISLAHLAPFVQISREKITRQVRAEMEEFGIAADDEQVKSLVEKRVRDEIKRGVQTIQYQVVTLLTTNGQAPFVTVFMYLNEAKNEQEKKDLAIIIEEVLKQRIKGTKNEVGVWVTPAFPKLIYVLEEDNITEDSRFWYLTKLAAECTAKRMVPDYISEKIMLKLKIDKNGNGNCYTCMGCRSFLTPYVDENGKPKYYGRFNQGVVTINLVDVACTAARDGSKSEEKFWQVLDERLELCHRALQCRHERLEGTLSDAAPILWQYGALARLKKGEPIDKLLHGGYSTLSLGYAGLWECVYEITGKKLTEKEGEEFGLRVMQRLNDACAEWKAAENIDYSIYGTPLESTTYKFAKCLQNRFGIIKGVTDRNYITNSYHIHVTEKIDAFSKLELESKFQKLSPGGAISYVEVPNMQQNIPAVLEVMKFIYNNIMYAELNTKSDYCQVCGYDGEIQIVEEDGKLVWRCPNCGNEDQSKMNVARRTCGYIGSQFWNQGRTQEIKERVLHL

SEQ ID NO: 919 - protein, 768 aa, Unknown
  Description of Unknown: uncultivated organism sequence
  Category: MG60 effectors
  Description: MG60-130 effector
MFCSCKKNLCVVIYIYDATKTYDCAKKLIVYKSIIKGAEVMKIIKRNGAEETFDRQKIKDAISKANNETDGTPELTDRQIDYISLVIEDHCNEMNRALSVEEIQELVETHIILQGAPETAKRYIRYRFTRNLARASNTTDNQILSLIECNNEEVKQENSNKNPTVNSVQRDYMAGEVSKDLTKRILLPEDIVKAHEEGLIHFHDADYFAQHMHNCDLVNLEDMLQNGTVISGTMIEKPHSFSTACNIATQIIAQVASNQYGGQSISLAHLAPFVQISREKITRQVRAEMEEFGIDADDEQVKSLVEKRVRDEIKRGVQTIQYQVVTLLTTNGQAPFVTVFMYLNEAKNEQEKKDLAIIIEEVLKQRIKGTKNEVGVWVTPAFPKLIYVLEEDNITEDSRFWYLTKLAAECTAKRMVPDYISEKIMLKLKIDKNGNGNCYTCMGCRSFLTPYVDENGKPKYYGRFNQGVVTINLVDVACTAARDGNKSEEKFWQVLDERLELCHRALQCRHERLEGTLSDAAPILWQYGALARLKKGEPIDKLLHGGYSTLSLGYAGLWECVYEITGKKLTEKEGEEFGLRVMQRLNDACAEWKAAENIDYSIYGTPLESTTYKFAKCLQNRFGIIKGVTDRNYITNSYHIHVTEKIDAFSKLELESKFQKLSPGGAISYVEVPNMQQNIPAVLEVMKFIYNNIMYAELNTKSDYCQVCGYDGEIQIVEEEGKLVWRCPNCGNEDQSKMNVARRTCGYIGSQFWNQGRTQEIKERVLHL

SEQ ID NO: 920 - protein, 987 aa, Unknown
  Description of Unknown: uncultivated organism sequence
  Category: MG60 effectors
  Description: MG60-131 effector
MKKIIMACFLSVLCFQGFALTGFDADYNAALKRAKDNSKPIFILFTGSDWCSWCVKFEKEVLSKSEFLDYATNTWELVVADFPQKKKIAPELKKQYQALQKKYAVRGFPTVMLIDAKGKELCSAGYSKGGAKVWLEKFLNKLKITPLVEQYLAPIEKKVRVISEESRDEITAKVKSLEPTDYKKWLQEYKSIANKYLPKVKAISDELAKLNVPDEILEKKEELSEEVNFMMMSLESAAKMDVEKEAKRIEELRKESESTKKVERKINRVTVPKAGEGKVDSEYFAKVAMPFYKKHIVDTFVPTKKMDKKTADDVRKVRWALARYLSTGRLEFPTGEECALAEKLWRKKFRDPAVAMLFYHSLFSDAQYWRGRRIFSDAIKIHNFKREPIFGFILKSYLCKAEKHRLKVRKSDPVKPYQDACAELEKYTTDKIVDVFKKADYRILERLEELIIIPPSLSKKVGNEYLSRCMIAERAMNAAFEARGSGWASDVTEEGWKGFQDNNEIAASNLLAAVKMRPEGARAPMMLARLSGSSCVVSEADTYSWCSLAVSNSLDECAEQIQHFVHFRTSRWGGSTAFLRDFLMQCATNVDVRSTFSYAAAAAAFRKILVAEADNSVQSNALERFITPDMRTALYGMFDAYAAAPETEFMPSADMFRGMGMSLALQFRDWPKVRKYYKMIKKPLKHHVDSTWLIRTYAPAINNTHVSYLFRVLGQSKYAEQFLEAEEAVAAKDYEKAYKLYSNLQNIEKPSDGEKYIAAEGYYTMRRVIEEKKGGWVNLMPSKTGGEAIHFWGMTFLDGDGKARCHDNTRSYYRVKKPIPGIGSEFEGTIHFEKDDKNRKVWNIGWGLARVYSGFCADNNSWAYPYIAFTRDEKGDHYAIDTFTNENSNRENFKDEDKWVQLGRAPYLMVAQGDLEKSDSHSFKLLTTEDKIEIFIDRKLVYSSMLDDIINVSYMRDRIQPNGDVLPVWKVFTGSSFSDYRYRRLVK

SEQ ID NO: 921 - protein, 768 aa, Unknown
  Description of Unknown: uncultivated organism sequence
  Category: MG60 effectors
  Description: MG60-132 effector
MFCYCKKKLCVVIYIYNATKTYDCAKKLIVYKSIIKGAEVMKIIKRNGAEETFDRQKIKDAIAKANNETDGTPELTDRQIDYISLVIEDHCNEMNRALSVEEIQELVETHIILQGAPETAKRYIRYRFTRNLARASNTTDNQILSLIECNNEEVKQENSNKNPTVNSVQRDYMAGEVSKDLTKRILLPEDIVKAHEEGLIHFHDADYFAQHMHNCDLVNLEDMLQNGTVISGTMIEKPHSFSTACNIATQIIAQVASNQYGGQSISLAHLAPFVQISREKITRQVRAEMEEFGIDADDEQVKSLVEKRVRDEIKRGVQTIQYQVVTLLTTNGQAPFVTVFMYLNEAKNEQEKKDLAIIIEEVLKQRIKGTKNEVGVWVTPAFPKLIYVLEEDNITEDSRFWYLTKLAAECTAKRMVPDYISEKIMLKLKIDKNGNGNCYTCMGCRSFLTPYVDENGKPKYYGRFNQGVVTINLVDVACTAARDGSKSEEKFWQVLDERLELCHRALQCRHERLEGTLSDAAPILWQYGALARLKKGEPIDKLLHGGYSTLSLGYAGLWECVYEITGKKLTEKEGEEFGLRVMQRLNDACAEWKAAENIDYSIYGTPLESTTYKFAKCLQNRFGIIKGVTDRNYITNSYHIHVTEKIDAFSKLELESKFQKLSPGGAISYVEVPNMQQNIPAVLEVMKFIYNNIMYAELNTKSDYCQVCGYDGEIQIVEEDGKLVWRCPNCGNEDQSKMNVARRTCGYIGSQFWNQGRTQEIKERVLHL

SEQ ID NO: 922 - protein, 1292 aa, Unknown
  Description of Unknown: uncultivated organism sequence
  Category: MG60 effectors
  Description: MG60-133 effector
MKLRKVYACILTLCMLVSMLPAFAADTDASCTHKWTEKVIKEANCTQTGLVKKTCELCGDFEYEKTPFKHGEGKEVVKDATCTKPETVGLYCEKCGELIGKVQEVGKALGHDLGKGTEKKADCAGPDRVEYTRKRCGETVVEAIEGGEAAKEHDWEAKIVPATCKTKGYEARVCKACGKVEKDKELPIDENAHVPKLGKVIREATCTTNGLGRSVCELCGKELGYITIKAGHKYGDPICDEGKQVTCGKAGYGYYVCTVCGEETEKAEIPATGKHTFVDETDIPATCTEPEKIGRICKVCGAADGKVEEIGEALGHDWDDGVYTKADCLKAEREVFTCKRCGKTRDEFIPNGEAAKGHKFVDKIVAPTCKTKGYTERTCERCDLYEKINETEIDKDAHVAKLDKTIREATCTVNGLGRYTCELCGEYLGYRAIEAKHVYGAPIFDEGKEATCGKDGYGYYVCAVCGEETEKDVIPATGKHEFVDETVIPATCTEPEKVGRICKVCGKADGKVQEIDKPLGHDWDDGELKDADCEKAERVVYTCERCGEVKEEIIPNGEAAKGHKFVDKIVAPTCKTKGYTERTCERCDLYEKINETEIDKDAHVAKLDKTIREATCTVNGLGRYTCELCGEYLGYRAIEAKHVYGAPIFDEGKEATCGKDGYGYYVCAVCGEETEKDVIPATGKHEFVDETVIPATCTEPEKVGRICKVCGKADGKVQEIDKPLGHDWDDGELKDADCEKAERVVYTCERCGEVKEEIIPNGEAAKGHKFVDKIVAPTCKTKGYTERTCERCDLYEKINETEIDKDAHVAKLDKTIREATCTVNGLGRYTCELCGEYLGYRAIEAKHVYGAPIFDEGKEATCGKDGYGYYVCTVCGEKSEKTEIPATGKHQFVDEFVIDATCEEPMKVGRICKVCGKVDGEVKTVGEKLGHDWDDGELKDADCEKAERVVYTCKRCGETKEDVIGTEVLGHKYKEKVVEPTCKTKGYKAYVCSVCGDAEVIEELEPVAGNHVAKLDKVIREATCSANGLGRYVCAECGDYIGYRAIVAEHKWGEEYANANATAIMHECQVCGKVEIIWQDPDFKECEEGKHEIVNDPARAATCTVNGLTAGKHCVVCGKILAQQTVIPALGHTEVVDEGKEATCTEAGLTEGKHCSVCSEVLVKQEEIPALGHTEVVDEGKAATCTEAGLTEGKHCSVCSEILVKQEEIPATGHVEEILPAVAPTDTEPGLTEGKKCSVCGKILVEQEVIPAHGHEHSYVLKGYDFNADFTKKVATYECTICGDTYTEEMDF

SEQ ID NO: 923 - protein, 768 aa, Unknown
  Description of Unknown: uncultivated organism sequence
  Category: MG60 effectors
  Description: MG60-134 effector
MFCSCKKNLRVVIYIYNATKTYDCAKKLIVYKSIIKGAEVMKIIKRNGAEETFDRQKIKDAIAKANNETDGTPELTDRQIDYISLVIEDHCNEMNRALSVEEIQELVETHIILQGAPETAKRYIRYRFTRNLARASNTTDNQILSLIECNNEEVKQENSNKNPTVNSVQRDYMAGEVSKDLTKRILLPEDIVKAHEEGLIHFHDADYFAQHMHNCDLVNLEDMLQNGTVISGTMIEKPHSFSTACNIATQIIAQVASNQYGGQSISLAHLAPFVQISREKITRQVRAEMEEFGIDADDEQVKSLVEKRVRDEIKRGVQTIQYQVVTLLTTNGQAPFVTVFMYLNEAKNEQEKKDLAIIIEEVLKQRIKGTKNEVGVWVTPAFPKLIYVLEEDNITEDSRFWYLTKLAAECTAKRMVPDYISEKIMLKLKVDKNGNGNCYTCMGCRSFLTPYVDENGKPKYYGRFNQGVVTINLVDVACTAARDGSKSEEKFWQVLDERLELCHRALQCRHERLEGTLSDAAPILWQYGALARLKKGEPIDKLLHGGYSTLSLGYAGLWECVYEITGKKLTEKEGEEFGLRVMQRLNDACAEWKAAENIDYSIYGTPLESTTYKFAKCLQNRFGIIKGVTDRNYITNSYHIHVTEKIDAFSKLELESKFQKLSPGGAISYVEVPNMQQNIPAVLEVMKFIYNNIMYAELNTKSDYCQVCGYDGEIQIVEEDGKLVWRCPNCGNEDQSKMNVARRTCGYIGSQFWNQGRTQEIKERVLHL

SEQ ID NO: 924 - protein, 794 aa, Unknown
  Description of Unknown: uncultivated organism sequence
  Category: MG60 effectors
  Description: MG60-135 effector
MNIFIFYFFFSLHFLRSKFFLYKLPLSKGGVQKGLDFDLVFLSKIDILEVQLIKIVECSTIFWIDKGECIMKVIKRSGEEVIFDVHKIENAIRKANKATSHSQMSEATILKISKQVEAQCEAMKRSPSVEEIQDMVETAIMKEQYYSVAHNYITYRYERALVRKANSTDQQILSLLERNNEEVKQENSNKNPLVNSVQRDYMAGEVSKDITKRFLLPQDIIEAHEQGLIHFHDSDYFAQHMHNCCLVNLEDMLQNGTVISETMIEKPHSFSTACNIATQIIAQVASSQYGGQSITLSHLAPFVQISREKARKEVKDEFEAMNMDVSEEKINQIAEMRVLREIEKGVQMIQYQVITLMTTNGQAPFVTVFMYLDEVEEGQTRDDLALIIEEVLKQRMQGVKNEKGVWITPAFPKLIYVLEEDNIHKTSKYYYLTELAAKCTAKRMVPDYISEKMMKQLKVDQNGDGQCYPCMGCRSFLTPYVDENGKPKYYGRFNQGVVTINLVDVACSSKGDEKRFWKIMDERLDLCYRALMCRHNRLKGTPSDVAPILWQNGALARLEKGETIDKLLYGGYSTISLGYAGLCECVQYMTGVPHTEEPGTSFGLKVMQYLNDACAKWKKENNMDFSLYGTPMESTTYKFAKKLQDRFGIIPKVTDKNYITNSYHVHVTEEINAFDKLTFEAQFQKLSPGGAISYVEVPNMENNIPAVLAVIEHIYDHIMYAELNTKSDYCQICGYTGEIQIVEDENHKLVWECPNCGNRDQEKMNVARRTCGYIGTQFWNQGRTQEIKERVLHL

SEQ ID NO: 925 - protein, 763 aa, Unknown
  Description of Unknown: uncultivated organism sequence
  Category: MG60 effectors
  Description: MG60-136 effector
MMRVVKRDGKIVDFDESRIKIAIGKANNEVDESQRATEEEIEKIVEYVKKVKKDRILVEDIQDIIENKLMEYKRFELAKAYITYRYSRALVRKANTTDQTVKELVEGNSEYWNNENSNKNARVVTTQRDYLAGITSTDITRRLLLPPEIVKAHDEGIIHFHDADYFAQNALTNCCLINLNDMLQNGTVINGVMIEKPHRFVTACTIATQIILGVSSSQYGGCTVTLTHLAPFVRDSYNRALKKYQDRNLPEEECKKFAMQDTKKEIADGVQTFNYQVNSMTNTNGQAPFLSVNMYLGETDEYKDELAMIIEEFLRQRMLGFKNEKGVYITPAFPKLLYVLEEDNIHKDSKYWYLTELAAKCTAKRMVPDYISEKMMKKLKINQYGEGDCYPCMGCRSFLTPDRVKGNVAKAKDYVEGKGKYYGRFNQGVVTINLPDVALSSKKDEKEFWKIFDERLELCHEALQLRHKRLSGITSDVAPLLWQYGAYARLDKGEKLDKLLHGGYSTLSLGYAGLYECVKYMTGDSHTDGGKGEKFALEVMQHMNDKCAEWKKAEDIDYSLYGTPIESTTYKFAKCLKKRFGTVEGVTDRNYITNSYHVPVFEEIDAFSKLKLESEFQRLSPGGAISYVETPNLQNNIEVVEQIIEFIYNNIMYAELNTKSDYCQKCGYTGEILIDDNLEWYCPNCGNRDHRTLNVARRTCGYIGTNFWNKGRTQEIKERVLHIDNKDFDAEKCTKCDENVEKHEKKTRAKVSAKEKAMASVHA

SEQ ID NO: 926 - protein, 1231 aa, Unknown
  Description of Unknown: uncultivated organism sequence
  Category: MG60 effectors
  Description: MG60-137 effector
MSLKIEDLETFKRHRYAVSESLSTDIVGRDREIEEISSKIDSVYCLTITGPAGVGKSRLAVAAIEHYCANHTDFEVLCTKSFSDYISALDEAIEEGRKYVIFIDDANTYPSLIELLEFLKYRNQEGNIKAILTVRDYLKGCLDSDIYMEFYEVKPLNDKSIEDALVKNTTIRNEDWLKQIAKIANGNIRVAFLAANEAIKNNKSLDSIYNQKDVLNRFYKDEISKIDHSESLLITAGIIAFFKSIYLEQLFYIVPILKSVNLSKKSFIENVNILIKMEIVDNYHDVVKIADQCFADFLLNYTIVEKRYLKIKDLLLVGFKYYKERIVESIHTILHVYNTEEFVDHLRKEVTDACNNLEDDVSLKHGIESCFAQVIPEYVSREYIEGVEKYSDQKDIKWLINVFSGLAFSNYNEIANKGVLKLLKKTKNKTKEVYDAIKNTYEMRAERANERFQYQIALIKELQNGGLYNDEFNALVSSYLNFRFSYSCFTSKREMMHYTFSVDDNTAGILELRSACWGYLFNCELSKAIDSIMDFANRHYIERNLEIIKNDLRCINTYLCEHDQSGFLNSVLYVKFIDEAKEYCFTDLLTANKKYLDFLDIVFERKLLGKNYEGYEARYKNRVTDYYNLHKDDIYDILNETDLFLNKYYKYQKTRLVNALVEVVDKFSNALFFLCTKNGIFPHLVIEEFLKNRNLDEVYALINQIDDETIKDEYLYNFYSYLSKENIEKDYGFIGWINSKGDFKTNRTYHRDAVSLNNIAEKCGLDYVALLKKLYSKEKYNKFIAKAYLSYLIDNVETFKELLSLNQNLAIKIYEFLIANGEKDYESSVLIEILDVKRSYIKVFAKAFIKEEYYNDCNLDFIFEKEYCDSFFNECMKVMLSQKTNSASSKLRILISKNINQPNMERWIEKYIESNYKEDNVIELFFQALSEIDHQHKNAYLVLYYQKGHDINVLRQAILNKSHSYSNAKEHFGNEIKWLETLKKSLLNWNNTEEVKFIDTVIDDYKVQIKNDEIESLVDYGNQNILNELRERDLKMEVSLKDAFELYQSDEKFRDMLSSGYLSYKDGSFVNGKNDPVEFIEKLKDKKIISVEIKPVDEVGRLDYEQYLSSMKSIAKEFDNPKLASLNDYLNALIDERGWKAQEFKENTFLSRDIFSKIRNNKKNKMDKKTLVQILIGLQVSKRERDYLLELNQTSLSKYVKEDVLYSFILDAKLDIGVADELLRDIGEDGF

SEQ ID NO: 927 - protein, 768 aa, Unknown
  Description of Unknown: uncultivated organism sequence
  Category: MG60 effectors
  Description: MG60-140 effector
MFCSCKKNLRVVIYIYNATKTYDCAKKLIVYKSIIKGAEVMKIIKRNGAEETFDRQKIKDAISKANNETDGTPELTDRQIDYISLVIEDHCNEMNRALSVEEIQELVETHIILQGAPETAKRYIRYRFTRNLARASNTTDNQILSLIECNNEEVKQENSNKNPTVNSVQRDYMAGEVSKDLTKRILLPEDIVKAHEEGLIHFHDADYFAQHMHNCDLVNLEDMLQNGTVISGTMIEKPHSFSTACNIATQIIAQVASNQYGGQSISLAHLAPFVQISREKITRQVRAEMEEFGIAADDEQVKSLVEKRVRDEIKRGVQTIQYQVVTLLTTNGQAPFVTVFMYLNEAKNEQEKKDLAIIIEEVLKQRIKGTKNEVGVWVTPAFPKLIYVLEEDNITEDSRFWYLTKLAAECTAKRMVPDYISEKIMLKLKIDKNGNGNCYTCMGCRSFLTPYVDENGKPKYYGRFNQGVVTINLVDVACTAARDGNKSEEKFWQVLDERLELCHRALQCRHERLEGTLSDAAPILWQYGALARLKKGEPIDKLLHGGYSTLSLGYAGLWECVYEITGKKLTEKEGEEFGLRVMQRLNDACAEWKAAENIDYSIYGTPLESTTYKFAKCLQNRFGIIKGVTDRNYITNSYHIHVTEKIDAFSKLELESKFQKLSPGGAISYVEVPNMQQNIPAVLEVMKFIYNNIMYAELNTKSDYCQVCGYDGEIQIVEEDGKLVWRCPNCGNEDQSKMNVARRTCGYIGSQFWNQGRTQEIKERVLHL

SEQ ID NO: 928 - protein, 818 aa, Unknown
  Description of Unknown: uncultivated organism sequence
  Category: MG60 effectors
  Description: MG60-141 effector
MKDYEITDKEGYAKQGLENYVKDWKIFIDTCSILHPAAEKFWVHVIPYLDEYKNKIIIPFRSVEELEKHAKNTERPKLAEDAKNSLKKVKQLVAAGYVEIRGEKTDNFADNVFQVVFTKFRLNHKMLLITQDNGLARDIYALNGSKSVKAYPVHVKQINQYGYLSNFQWGDENGHAEKNELRRSTGAAASKPSTAPKSAPKSVTVTETEADIDDDDAFEVCTAVTKISDAPLGVSHVPKENETVYAGSAPVKLMRALAAGGEGVIYQTNTPYVAKIYKKEKLTKRRYEKIKRMLSHSFSCEGICYPIAALYNSKKEFVGYLMPKAKGKELQKSIFIKPLFLKNFPNWKKRDTVELCITILKKIQYLHDKNIIMGDINPSNILVVSPKEVYFVDTDSYQIEDFPCPVGTVNYTAPEIQRKHFANFLRTEGNENFAVATLLFMIMLPGKPPYSQQGGEDPIDNIIKMDFSYPFGDNTNRKTPDGPWRYIWSHLTYDLKKAFYNTFRGDGEHASESTRLSADEWLPIFTYYLELLDSGKFGKQDPMSEELFPTRHKKNPKAEYVTCKLCGNEVEEHQCQNGICRPCLNRGEVYRCARCGREIMYTNYQKYIKNAKKHDVCPECFRYRREIRMRPTCIDCGTQFAISNSEYEFLKSKGFEVPKRCKACRERKKNQSQTPIPLPFHRPTMTRVPTVPSRPTPTPTPKPKPKGGTFCFITTAVCEYYGKDDRCAELNALRNFRDTWLTHQPDGPALIAEYYRSAPLLVSKMKQSEHFGAYCQTLWEDYLKPCLAYIRENAYEACKQRYIDMVHYMESEFKTKTI

SEQ ID NO: 929 - protein, 832 aa, Unknown
  Description of Unknown: uncultivated organism sequence
  Category: MG60 effectors
  Description: MG60-142 effector
MSLSFFATCPKGLENLLLRELVTLGACEVKETVAGVSFKGDFTLGMRVCLWTRLASRVLLEISEFYAGTDTDLYLGALAVDYEKYFEVSNTIAVSFKGTSEAIRNTQYGALKIKDAVCDYFLKRNGIRPNVDKDNPDILITCHLDRKDNAHLLFDLSGNALHMRDFNRHTGMAPLKENLACAMLLRSGYNGSNLVDPMCGSGTLLLEAAAMATDTAPGICRDHYGFLQLKLCDRSAYTSLVEEMHKRSREGMLKFKQSGYKLFGFDADERIIDIALENAKKSGFADIIRFQVQSVETLVNPFDDLNDETQNKNAPSLFVITNPPYGQRMGNFNELISLYTKLGAVFKEQFRGAVCAVISSSEDLLSCLRLHADKIYKLYNGELLCQLRIFSIRQGEEGSESLSKDNLATDFANRLRKNLLKMNKWAKTLGLEAYRVYDADVPEYAAAIDYYKGYYVISTYKAQNKVSEKIEKRHELDMLGATIEVTGVSGSKVILKSREVKKGNSQYERLREDNSALIEIREGPFAFKVNLYDYLDTGLFLDGRLIRQYLYEHASNCSVLNLFAYTCSASVAAALGGASLITSVDMSKTYLEWGYENLLLNQIEAHSHEFIQADVLAFVSKDPEHKYDLIYVDPPTFSNSKRMQNTFDVRRDHLQLLGNLTRFLRDGGEVVFCTNLRSFRIDERLDEFGYSVTDLSSKTLPFDFKRNEHIHHCYSLIYHEKERRCEPVAFVSSNVNPKWSKVLHGIKKTNEQEIIPKNKSVNGRPSRASTTVRFNASGMTEIHTDGNRDTSAFRHNNKRNFKSSKLRPAALRPKSSAKPRVFGPEGVKEGVQ

SEQ ID NO: 930 - protein, 1179 aa, Unknown
  Description of Unknown: uncultivated organism sequence
  Category: MG60 effectors
  Description: MG60-143 effector
MINLESFKNLYEVRKTVRFSLLKQNYDDVFKCEENVLKDISFLNTLVWYEWQIIKIQKKEDWKLLQDLLSKDIFEDVIKNAFQILKNQICTVIYNKVVFDTKKSEQKQRYKIYLKTATWKELSAFIPTDYDKNSDYIPEENFYKVKDSEIWYAIKIVSKLIIDNDFIKKDTELHNRLSQINRYNPNFWNFFELNTLNPFTVNRWKISEIINSYEISLNQYKETLVNLNKEAYTIANAILSDRYFENCRNQKESDGTVRYLFHIFSNCKNSSEKNVWQINHLILLVNKYESLKNGKKKYTNDEIELKIKRLNKELRQLAKVRSELLWYQIHLIDNFQTEKFSFLIQSWKYYFVWMKKMWWENNLSQFQEFIDGLESGDDKLLYLDSMTWGGFKRLFLSKQSDVVFTDGIRIKDLNRTILAKEEEILQLKKWIIEKIEKDINIYISKVTNDIFNEINSKEKIKFIEYLSQKWKKVDNLFKLWKKNRKQLIYGKELKEFGNSLYNFDSIKEQFNLDKLEKEYSDLVQKLLIKIKDKKYEIWKNNFKSLSFLWDNFKDRKFENLDDLKNYFNDSWYKVIVKNVNLEKILKQVKAWELEIFQIKSKDMPFHQDFINDKNCWIIEGVKTEKGGSFKKDLNTLYFEQFFQDIAEWNKNTRIGADFKIRWINSSENNDYKSFWKKEKNQLRHSNNKENIEKFKNRFKRDRYSIEFSINLNATNHLTEEDFNTKISNKLKEKRETWSLRILSLDHGESSFLTYKIYQVEGNKYSIINQWWNFDNFKEVQDWEDKTTKRQENMQIDEEKVLYKDQKILDSYITKYHAMIQDQKRERQVEEAIKHFARKSISKIKEIISADTIDKNKEWVSDTTKANVKKFIQRSIDKTWNKEKDSIVSVLGKFYFDYNKYSFKKYFPDQENIKEKIDTYLKEIQELLDDESKLIAFCNEVKKSFDWVSLADIDKLYNTPFYSYKTNFSLQLEQINNLKKWYVSALIGTISKWVRNWDVDVIALENNLLYYGVDNSKSFQKHMWAENHATFAEALINKLSFCLDKETSESYQFCYPIKVKDRKKLKDKNNGILFFVDQDTTSLICPQCEGKLKRDKADWEDYLYHNDENLAWDGCEEDPFEIKKSEGKKWEYNWIIFENWDDLATYNIGRKGVLMLEKIKENPEETDLLIRDNDWDGLVK

SEQ ID NO: 931 - protein, 750 aa, Unknown
  Description of Unknown: uncultivated organism sequence
  Category: MG60 effectors
  Description: MG60-144 effector
MIGILRLNLPLNWKREAIAVPEEAKTHVHVIKRNGEEVTFDLSKIENAIKAANNEVDKLHQLNEYQVHAIADNLEKQIESMSHAVHVEDIQDMVETGIMEMRGYEVAQKYVRYRYKRELARKSNTTDNGILALIDHMNEEVNQENSNKNPVINSTQRDYMAGEVSKDLTKRMLLPEDIVEAHEAGIIHFHDSDYYAQKEHNCDLINLEDMLQNGTVISETMIEKPHSFFTACNVTTQIVAQVASNQYGGQTFTLSHLAPFVDVSRKKLRAQVIEERKDCGESLDDAIIDKITEKRLLNEVKSGIQTIQYQLITLMTCNGQAPFVTMFMYLDEVPEGQTRDDLALIIEEVLNQRIKGVKNEKGIWITPAFPKLIYVLDEDNITTDSKYWYLTELAAKCTAKRMVPDYISAKVMREMKDGDVYPCMGCRSFPTKEDGIRNPDGSRKYYGRFNQGVVTINLVDVACSSYGDMDKFWKILDERLELCHKALRCRHERLLGTISDVAPILWQHGALARLKKGEKIDKLLFGGYSTISLGYAGLCEMCVRMIGKTHTSEEGKKFALAVMQKLNDKCAEWKAAENISYSVYGTPMESTTYKFAKNLQKRFGIIPGVTDKNYITNSYHVHVTEHIDAFSKLKFESEFQKLSPGGAISYVEVPNLQNNIDAVLEVMKFIYDNILYAELNTKSDYCEKCGYDGEIKIVTDDYGKLVWECPNCGNRDQNTLFVARRTCGYIGTQFWNQGRTQEIKDRVLHL

SEQ ID NO: 932 - protein, 750 aa, Unknown
  Description of Unknown: uncultivated organism sequence
  Category: MG60 effectors
  Description: MG60-145 effector
MIGILRLNLPLNWKREAIAVPEEAKTHVHVIKRNGEEVTFDLSKIENAIKAANNEVDKLHQLNEYQVHAIADNLEKQIESMSHAVHVEDIQDMVETGIMEMRGYEVAQKYVRYRYKRELARKSNTTDNGILALIDHMNEEVNQENSNKNPVINSTQRDYMAGEVSKDLTKRMLLPEDIVEAHEAGIIHFHDSDYYAQKEHNCDLINLEDMLQNGTVISETMIEKPHSFFTACNVTTQIVAQVASNQYGGQTFTLSHLAPFVDVSRKKLRAQVIEERKDCGESLDDAIIDKITEKRLLTEVKSGIQTIQYQLITLMTCNGQAPFVTMFMYLDEVPEGQTRDDLALIIEEVLNQRIKGVKNEKGIWITPAFPKLIYVLDEDNITTDSKYWYLTELAAKCTAKRMVPDYISAKVMREMKDGDVYPCMGCRSFPTKEDGIRNPDGSRKYYGRFNQGVVTINLVDVACSSYGDTDKFWKILDERLELCHKALRCRHERLLGTISDVAPILWQHGALARLKKGEKIDKLLFGGYSTISLGYAGLCEMCVRMIGKTHTSEEGKKFALAVMQKLNDKCAEWKAAENISYSVYGTPMESTTYKFAKNLQKRFGIIPGVTDKNYITNSYHVHVTEHIDAFSKLKFESEFQKLSPGGAISYVEVPNLQNNIDAVLEVMKFIYDNILYAELNTKSDYCEKCGYDGEIKIVTDDYGKLVWECPNCGNRDQNTLFVARRTCGYIGTQFWNQGRTQEIKDRVLHL

SEQ ID NO: 933 - protein, 768 aa, Unknown
  Description of Unknown: uncultivated organism sequence
  Category: MG60 effectors
  Description: MG60-146 effector
MFCSCKKKLCVVIYIYNATKTYDCAKKLIVYKSIIKGAEVMKIIKRNGAEETFDRQKIKDAIAKANNETDGTPELTDRQIDYISLVIEDHCNEMNRALSVEEIQELVETHIILQGAPETAKRYIRYRFTRNLARASNTTDNQILSLIECNNEEVKQENSNKNPTVNSVQRDYMAGEVSKDLTKRILLPEDIVKAHEEGLIHFHDADYFAQHMHNCDLVNLEDMLQNGTVISGTMIEKPHSFSTACNIATQIIAQVASNQYGGQSISLAHLAPFVQISREKITRQVRAEMEEFGIAADDEQVKSLVEKRVRDEIKRGVQTIQYQVVTLLTTNGQAPFVTVFMYLNEAKNEQEKKDLAIIIEEVLKQRIKGTKNEVGVWVTPAFPKLIYVLEEDNITEDSRFWYLTKLAAECTAKRMVPDYISEKIMLKLKIDKNGNGNCYTCMGCRSFLTPYVDENGKPKYYGRFNQGVVTINLVDVACTAARDGNKSEEKFWQVLDERLELCHRALQCRHERLEGTLSDAAPILWQYGALARLKKGEPIDKLLHGGYSTLSLGYAGLWECVYEITGKKLTEKEGEEFGLRVMQRLNDACAEWKAAENIDYSIYGTPLESTTYKFAKCLQNRFGIIKGVTDRNYITNSYHIHVTEKIDAFSKLELESKFQKLSPGGAISYVEVPNMQQNIPAVLEVMKFIYNNIMYAELNTKSDYCQVCGYDGEIQIVEEDGKLVWRCPNCGNEDQSKMNVARRTCGYIGSQFWNQGRTQEIKERVLHL

SEQ ID NO: 934 - protein, 768 aa, Unknown
  Description of Unknown: uncultivated organism sequence
  Category: MG60 effectors
  Description: MG60-147 effector
MFCYCKKKLCVVIYIYNATKTYDCAKKLIVYKSIIKGAEVMKIIKRNGAEETFDRQKIKDAIAKANNETDGTPELTDRQIDYISLVIEDHCNEMNRALSVEEIQELVETHIILQGAPETAKRYIRYRFTRNLARASNTTDNQILSLIECNNEEVKQENSNKNPTVNSVQRDYMAGEVSKDLTKRILLPEDIVKAHEEGLIHFHDADYFAQHMHNCDLVNLEDMLQNGTVISGTMIEKPHSFSTACNIATQIIAQVASNQYGGQSISLAHLAPFVQISREKITRQVRAEMEEFGIDADDEQVKSLVEKRVRDEIKRGVQTIQYQVVTLLTTNGQAPFVTVFMYLNEAKNEQEKKDLAIIIEEVLKQRIKGTKNEVGVWVTPAFPKLIYVLEEDNITEDSRFWYLTKLAAECTAKRMVPDYISEKIMLKLKIDKNGNGNCYTCMGCRSFLTPYVDENGKPKYYGRFNQGVVTINLVDVACTAARDGSKSEEKFWQVLDERLELCHRALQCRHERLEGTLSDAAPILWQYGALARLKKGEPIDKLLHGGYSTLSLGYAGLWECVYEITGKKLTEKEGEEFGLRVMQRLNDACAEWKAAENIDYSIYGTPLESTTYKFAKCLQNRFGIIKGVTDRNYITNSYHIHVTEKIDAFSKLELESKFQKLSPGGAISYVEVPNMQQNIPAVLEVMKFIYNNIMYAELNTKSDYCQVCGYDGEIQIVEEDGKLVWRCPNCGNEDQSKMNVARRTCGYIGTQFWNQGRTQEIKERVLHL

SEQ ID NO: 935 - protein, 816 aa, Unknown
  Description of Unknown: uncultivated organism sequence
  Category: MG60 effectors
  Description: MG60-148 effector
MQTNKQLNLAFDFVQYTGQNIFLTGKAGTGKTTFLKSLKEKSPKRMIVVAPTGVAAINAGGVTIHSFFQLSFAPQIGLENVQEKQNRFNKEKINIIRSLDLLVIDEISMVRADILDAIDRVLRRFRNRNRPFGGVQVLMIGDLQQLAPVVKNDEWNLLKREYETVYFFSSKALRETSYVSIELTHVFRQQDDKFIAILNKVRNNQLDQNALEALNNRFIPNFEPDDSEGFITLCTHNLHAHRINEAKLIQLKTNKQLFTAEVEGKFPEYSYPTEFKLEVKVGAQVMFVKNDPEPEKLFYNGKIGQVTRINQDIIYVICPDEEEEIAVTQLLWENVKYTIDKNSAEISESVEGSFYQYPLKLAWAITIHKSQGLTFERAIIDAEASFAHGQVYVALSRCKTLEGMVLSSQISNRSIINDGTVSGFIQNVEENQPGDKELNDSKLAYQKDLLIDVFRFENVKMQVNIISKLLRENSSAIPEVVTEHIRKIKSAVYSDLVDVSEKFRNQITQLLSVQPDIEQNQKLLERVSKAADYFSEKVKAILIDDFAKADLDVDNRTLRKQLKNSSGRLTEETELKLASFEICRTGFNVKQLLDTRAKTLIENNKPAPKKQKAKEIINLESIPHPELYNTLREWRLEKASELEKPAFFVFSQKTLIEMVNYLPVETATLKLINGFGSRKIEQFGADIIQIIQNYCDENNVQRMEIPLKEVKEKKPKIDTKKASFELYQSGKTVAEVAKERALTTSTIENHLAHYVKLGELDISKLISKEKLKIITDYFEKAESKSFGDAKAALGDNVSYGELRMGLSYLESLNEKK

SEQ ID NO: 936 - protein, 768 aa, Unknown
  Description of Unknown: uncultivated organism sequence
  Category: MG60 effectors
  Description: MG60-149 effector
MFCSCKKNLCVVIYIYDATKTYDCAKKLIVYKSIIKGAEVMKIIKRNGAEETFDRQKIKDAIAKANNETDGTPELTDRQIDYISLVIEDHCNEMNRALSVEEIQELVETHIILQGAPETAKRYIRYRFTRNLARASNTTDNQILSLIECNNEEVKQENSNKNPTVNSVQRDYMAGEVSKDLTKRILLPEDIVKAHEEGLIHFHDADYFAQHMHNCDLVNLEDMLQNGTVISGTMIEKPHSFSTACNIATQIIAQVASNQYGGQSISLAHLAPFVQISREKITRQVRAEMEEFGIDADDEQVKSLVEKRVRDEIKRGVQTIQYQVVTLLTTNGQAPFVTVFMYLNEAKNEQEKKDLAIIIEEVLKQRIKGTKNEVGVWVTPAFPKLIYVLEEDNITEDSRFWYLTKLAAECTAKRMVPDYISEKIMLELKIDKNGNGNCYTCMGCRSFLTPYVDENGKPKYYGRFNQGVVTINLVDVACTAARDGNKSEEKFWQVLDERLELCHRALQCRHERLEGTLSDAAPILWQYGALARLKKGEPIDKLLHGGYSTLSLGYAGLWECVYEITGKKLTEKEGEEFGLRVMQRLNDACAEWKAAENIDYSIYGTPLESTTYKFAKCLQNRFGIIKGVTDRNYITNSYHIHVTEKIDAFSKLELESKFQKLSPGGAISYVEVPNMQQNIPAVLEVMKFIYNNIMYAELNTKSDYCQVCGYDGEIQIVEEDGKLVWRCPNCGNEDQSKMNVARRTCGYIGSQFWNQGRTQEIKERVLHL

SEQ ID NO: 937 - protein, 768 aa, Unknown
  Description of Unknown: uncultivated organism sequence
  Category: MG60 effectors
  Description: MG60-150 effector
MFCSCKKNLRVVIYIYDATKTYDCAKKLIVYKSIIKGAEVMKIIKRNGAEETFDRQKIKDAIAKANNETDGTPELTDRQIDYISLVIEDHCNEMNRALSVEEIQELVETHIILQGAPETAKRYIRYRFTRNLARASNTTDNQILSLIECNNEEVKQENSNKNPTVNSVQRDYMAGEVSKDLTKRILLPEDIVKAHEEGLIHFHDADYFAQHMHNCDLVNLEDMLQNGTVISGTMIEKPHSFSTACNIATQIIAQVASNQYGGQSISLAHLAPFVQISREKITRQVRAEMEEFGIAADDEQVKSLVEKRVRDEIKRGVQTIQYQVVTLLTTNGQAPFVTVFMYLNEAKNEQEKKDLAIIIEEVLKQRIKGTKNEVGVWVTPAFPKLIYVLEEDNITEDSRFWYLTKLAAECTAKRMVPDYISEKIMLKLKIDKNGNGNCYTCMGCRSFLTPYVDENGKPKYYGRFNQGVVTINLVDVACTAARDGSKNEEKFWQVLDERLELCHRALQCRHERLEGTLSDAAPILWQYGALARLKKGEPIDKLLHGGYSTLSLGYAGLWECVYEITGKKLTEKEGEEFGLRVMQRLNDACAEWKAAENIDYSIYGTPLESTTYKFAKCLQNRFGIIKGVTDRNYITNSYHIHVTEKIDAFSKLELESKFQKLSPGGAISYVEVPNMQQNIPAVLEVMKFIYNNIMYAELNTKSDYCQVCGYDGEIQIVEEDGKLVWRCPNCGNEDQSKMNVARRTCGYIGSQFWNQGRTQEIKERVLHL

SEQ ID NO: 938 - protein, 844 aa, Unknown
  Description of Unknown: uncultivated organism sequence
  Category: MG60 effectors
  Description: MG60-151 effector
MPLDERIARLKKKLLTSPYEVCMARAYHFTQAYKETEGLDPAMRNALALKKTLENQKIFIYPDEFLAGSKTEKFLAGPLSVERGDFLRTLQMEMDILHLKQRPFLITEEEKKLFREVILPYWDGKTLRDHKAKEWEKKGLIDRKQGFFKRLFRMIKFMRYVGRENLRKIAGANRKAPLTFRRLKNLHALRYELACNNPSPAVFCFDVQGHLSLGVNKVIENGMDGIIKKAEDRLKRLEVEEPYNEKKKNFLKAVIISLESAIRYSERFAKLAEEMAKKTEDEKEKSRLLLIAKHCRHVPRYKPRTFHEALQSAWITHLVGEIQYGTHEVFAPGRIDQFLYPFYENDIRSGRITRDEAKALIQEFLIKLESNVEPIPEVGMETNAVLGNSQHVVTIGGLKRDGEDGTNELSYLILEAYEEMGGAVNQLAVRISKKTPFDFLKRACAVFRKANGIAFYNDEAIIEGLLADGMSIEDARDYCIVGCIETSGQSNTHGCVGGHELVLPVVLMQTLTRGKEPPPFIGQKEGIDCGDPSSFKTFEDFISAFKKQLAHQIKILVEATEGKDKAYREILPAPYVSALMDDCIEKAMDVTEGGARYDFTSIDVRGLATLVDSLLAIKRFVYEKKELSLTEFIKIIRNNFKGHEVLRQRIINEAPKFGRGDREADEMAKNVLHWIYEISQRYRNIRGGRFRVCYYSYGNHVIDGFMLGATPDGRLKGEPISNGVSPVNMGDFSCGPMGPMRSVAKFPPREISSGIALNMRFHPSFIKTQEGLITFAKMIKTYFEMGGMHIQPNVVSSETLRDAQKNPERYRDLIVKVSGYSAYFTDLGKSIQEDIISRYEFCRS

SEQ ID NO: 939 - protein, 1216 aa, Unknown
  Description of Unknown: uncultivated organism sequence
  Category: MG60 effectors
  Description: MG60-152 effector
MKRSFILFLLFILIVAIFVLPSLFTSSPKVQHLLKDTVSRELKAKVNYSDITWYWFPLPHLAFREAKVESPNFILYGSNAEIYPDWLSMLHGRFGVAGISLDDFHLLIKKISNDQDTSPNLPRWIKVRNGFIEISKNVSLPFPFPFKDRRPYIKKLYGKIGIDGPSVRLDLKGNTRQAQLIELKGNADLHQLTYSLKGHLRQFDLSALKINKLTKVKQFPHYGFINLDFSVSGNGVERSEGHIKAYSNCFVSGKSKKRVSAIFSCGSLELRYKYADGEANVVLESLDFKHPRLHLTGTLHFWKKDGLPWLKVDAKGRRLDLAEIRKVLLALSIRDKDVDDYCNVIRAGTVNWARVHLDAPASKWHSLSDMYIEGRAEDVKVYVKDEDFFVDSVSGPFEIVDGVLHVKEGLARLRNTKGSSGRLIFGLSKGREQFKLDIVLSAPPEDVKWALMKFTHEDTLHRELKRLSKLSGRIVGRLIIGDKKHDKKVKVQVQEARLSAFYKTLGAKVSIVQAHARYFDDTFSVSNFSGGVGPNFFKDVSAKVSWKDGHFKIKVNRGMGSVLAESILDFCNRFNLGQEFIDKYHVSASGRFRVKRLNLFFDAKVPSSFSYLVAGSPLGVSVETSLLPHKVFLKGGKLLVSTDKVSASRLKLSMAGSRFAIGLDLDHNHFHRWSGSVKVSGPIRRNLWKWLEKKGVELDEFTPRVPFFVRDFKLRFTKGEPREFVGTLYWKDDGISLFINARKSKGLFDLKRLSINAAGKRAELSFLKALGIKKRFSLGFKGELLGDTLDSILVENNMLDGRLQGDFSFGFSAHEKKAYSIDGRIHIEGFRWIWGLNDNLRFKKLDIEANKSHRGNISGLIRLFDDKIGINGTFKNGVGRLVCSLNLSAPVLSSQTISFIQKMSEAQKGTDAGTSSLSDQEQAKLFRELAKRLDLKIGFKVKEARYAVTDFSKEKKQGSHEVVLKNLKGNAEVQKSRLKRLEAFSDDTCGLDVYLKKERIGDRVISEFSVITPKGRQALFEQVLDCLGVEQDLITGPVTFNLYLRGGERVLLGNGNLGIKAKDGYIHRFGLISKIFSVVNIVDIFSLNKGLLEGTSPYKKMLIDAKIASGRVHLEKAYIKGSGINFYGTGDVYLDSKMLDLIIFVQPLKTVDTIITSLPIIGGIIGGKNKSLFAIPVKVSGDWNDPKVDTLQTKTVTDIFKKLIFNVLTAPFSLGH

SEQ ID NO: 940 - protein, 813 aa, Unknown
  Description of Unknown: uncultivated organism sequence
  Category: MG60 effectors
  Description: MG60-153 effector
MQTNKQLDLAFDFVQFTGQNIFLTGKAGTGKTTFLKSLKEKSPKRMIVVAPTGVAAINAGGVTIHSFFQLSFAPQIGLENVQEKQNRFNKEKINIIRSLDLLVIDEISMVRADILDAIDRVLRRFRNRNRPFGGVQVLMIGDLQQLAPVIKNDEWNLLKREYETVYFFSSKALRETSYVSIELTHVFRQQDDKFIAILNKVRNNQLDQNALESLNERYIPNFKPDDSEGFITLCTHNLHAHRINEAKLIQLKTNKQLFTAKVEGKFPEYSYPTEFKLEVKVGAQVMFVKNDPEPEKLFYNGKIGQVTRINQDIIYVICPDEEEEIAVTQLLWENVKYTIDKKTAEISESVEGSFYQYPLKLAWAITIHKSQGLTFERAIIDAEASFAHGQVYVALSRCKTLEGMVLSSQISNRSIINDGTVSGFIQNVEENQPGDKELSDSKLAYQKDLLLDVFRFENIKMHVNIISKLLRENSSAIPEVVTEHIRKIKSAVYSDLVDVSEKFQNQITHLLSAQPDIEQNPKLLERVSKAAGYFSEKVKAILIDNFSKADLDVDNRTLRKQLKNSSGRLTEETELKLASFEICKAGFQVKQLLDTRAKTLIDNNKPTSKKQKAKEIINLESIPHPELYNTLRAWRLEKASELEKPAFFVFSQKTLIEMVNYLPVETATLKLINGFGSRKIEQFGADIIQIIQKYCDENNVQRMEIPLKEVVEKKPKIDTKKLSFELYQAGKIVAEIAKERALTTNTIENHLAHYVKLGELDISKLISKEKLKIITDYFEKAESKSFGEAKTALGEQVSYGELRMGLSYFESRE

SEQ ID NO: 941 - protein, 750 aa, Unknown
  Description of Unknown: uncultivated organism sequence
  Category: MG60 effectors
  Description: MG60-154 effector
MVKKFLSKGAYHYQNDFFNDKIGFVILGGNMMRVIKRNGHTVDFDATKIENAILKAMKCGSGIIDEQCAKDIAREIEEWHRYSDGDISIYRIEGQVFEKLIEKGQILTAKAYEGYRKVREFQRETNTIDNEIYGIVNQTNKEAMEENSNKDATVLATQRDLIAGEFSKDYCRRLLLPPKIVQAHDDGIIHFHDMDYYIQKMHNCDLVNLKDMFAQGTVINDKLIETPKSLQTACTVATQIVQQVANGQYGGQTISLAHLSPYVRISYEKHKKNVINEGKMIGIDYSDEQIEKIAKSRLKDEIKAGIQTIQYQINTFSTTNGQAPFLSVFMYLKEEPEYIEETAMLIEETLRQRYVGMKNPVGAYVTPAFPKLLYVLDDNNVPQDSKYRYLTDLAVKCVAKRMMPDFISAKIMRENYEGQVFPCMGCRSFLSPWKDENGEYKWYGRFNQGVVTLNLADAGLSADHNLDNFWKILDERLELCKEALLLRHESLKGTIADVSPIHWRYGALARLKSGEKIDKLLENGYSTISLGYIGLYECVVALIGQTHTSKEGNELATKIMERLREACDSWKEETGLGFGLYGTPAESTTYTFARALKKRFGIVPGVTDKDYLTNSYHVNVREHIDAFSKLEVEAKFQKLSSGGAISYVEVTNMSQNLDALSALIDYMYETIQYAEINTKSDYCQECGFDGEILLDENREWYCPNCGNRNHKTLNVCRRTCGYLGDNFWNQGRTQEIAERFVHLDNHLYGE

SEQ ID NO: 942 - protein, 768 aa, Unknown
  Description of Unknown: uncultivated organism sequence
  Category: MG60 effectors
  Description: MG60-155 effector
MFCSCKKNLRVVIYIYNATKTYDCAKKLIVYKSIIKGAEVMKIIKRNGAEETFDRQKIKDAISKANNETDGTPELTDRQIDYISLVIEDHCNEMNRALSVEEIQELVETHIILQGAPETAKRYIRYRFTRNLARASNTTDNQILSLIECNNEEVKQENSNKNPTVNSVQRDYMAGEVSKDLTKRILLPEDIVKAHEEGLIHFHDADYFAQHMHNCDLVNLEDMLQNGTVISGTMIEKPHSFSTACNIATQIIAQVASNQYGGQSISLAHLAPFVQISREKITRQVRAEMEEFGIAADDEQVKSLVEKRVRDEIKRGVQTIQYQVVTLLTTNGQAPFVTVFMYLNEAKNEQEKKDLAIIIEEVLKQRIKGTKNEVGVWVTPAFPKLIYVLEEDNITEDSRFWYLTKLAAECTAKRMVPDYISEKIMLKLKIDKNGNGNCYTCMGCRSFLTPYVDENGKPKYYGRFNQGVVTINLVDVACTAARDGNKSEEKFWQVLDERLELCHRALQCRHERLEGTLSDAAPILWQYGALARLKKGEPIDKLLHGGYSTLSLGYAGLWECVYEIKGKKLTEKEGEEFGLRVMQRLNDACAEWKAAENIDYSIYGTPLESTTYKFAKCLQNRFGIIKGVTDRNYITNSYHIHVTEKIDAFSKLELESKFQKLSPGGAISYVEVPNMQQNIPAVLEVMKFIYNNIMYAELNTKSDYCQVCGYDGEIQIVEEDGKLVWRCPNCGNEDQSKMNVARRTCGYIGSQFWNQGRTQEIKERVLHL

SEQ ID NO: 943 - protein, 769 aa, Unknown
  Description of Unknown: uncultivated organism sequence
  Category: MG60 effectors
  Description: MG60-156 effector
MKVIKRDGTIVEYDREKIRIAIEKANKEVSRKEKATDSEIEEIMSYIEDLKKGRILVEDIQDIIEEKLMEIKRYELAKKYITYRYTRALVRKANTTDQSIKELIEGESEYWNNENANKNARVVTTQRDYLAGITSTDITRRFLLPEDVVKAHDEGIIHFHDADYFAQNALTNCELINLEDMLQNGTIMNGVMIEKPHRFITACTIATQIILAVTSSTYGGATVSLAHLAPFVRSSYEKYYKKYKENGLSKEQCEKFAKEDTKKEVADGVQTFNYQVNSMTNTNGQAPFLSVCMYLGETDEYKEELAMIIEEFLNQRILGFKNEKGVYITPAFPKLLYVLEEDNIHENSKYWYLTELAAKCTAKRMVPDYISEKIMKQMKVDANGDGQCYPCMGCRSFLTPYIDPVTKKPKYYGRFNQGVVTINLVDVALSSGKDLKKFWKIYDERLELCHKALQVRHERLAKATSDIAPILWQHGAFARLPKGASIHPLLHGGYSTISLGYAGLYECVKYMTGKSHTDNGDGKDFAIEVMKKMNEKCAEWKEAEDIDYSVYGTPIESTTYKFAKCLQKRFGKIKGITDKNYITNSYHVPVFEEIDAFSKLKLESEFQRLSPGGAISYVETPNLQNNLEVVLQIMKFIYDNIMYAELNTKSDYCQKCGYTGEILIDDNLEWYCPNCGNRDHNTLNVARRTCGYIGSNFWNKGRTQEIKERVLHIDNKDDDCDCDECNCDHANTDTSKEEKSEEKQMNFMDYDVEEEITKSKKHMKQPAMV

SEQ ID NO: 944 - protein, 868 aa, Unknown
  Description of Unknown: uncultivated organism sequence
  Category: MG60 effectors
  Description: MG60-157 effector
MRVIPKDTKLRATVYKNFTIWDIFVAIGVIGIEVLIGFSNLPGKVWIMLVAGVIMAPLFFPTDDGGRFYQNIVSMIQFRFMKKAYVGAEIKRFVPYKEIRDDGIIVYPDYFARVISVGQTEFRLLDEGMQNTKIAYFERVLKLTDIGASMDIVKIDRPINFDAFSASLFERVEKEKNELKKAVLEDRISQIDRLNNETKQFRPYYYIVIYDAKEDSLKDNTDTAVQMLNQMGLDSVILGQKEVVNFLKYCHTRFFDEREIDNVEPKDYVDYIMPKKLKFAGRNYTVDDVKAFTMTISDYPLSVANAWGSEIFNIDNTKVVLKIRPVDRLKAVKRIDKVVMELGSREENIRKASELIAKESHVESMGATLMSLQNENEVLFDCSLTVTAFNNANEDQLSFRKSIRHRIIQEGFKINNLSSQQINGFLASNISQVRSLKRYERGINSSSLAAVFPFVETSIIDEPNGIILGCNSHPVALDITKRDGSHTNSNVLILGKPGSGKTYAVKSIITQLYADNWRIHVLDVENEFSTLAKNVGGMIIDVGSATQGRINPFHIYGLLTDDGKQASPENIFDAHLIALESFFKIILEGISSDALEYINNLVVKCYEKRGITKSTDCSKFTAAQFPTFDDLMKILQEQPREGINPLDLANLQRAETYVAKFASGGRYASLWNGPSTLTTSSQFTVFNFQSLLSNKNTVVANAQMLLVMRYLEQEVINARDQNRDGKNLIRTAIVAEEAHAFTDPKFPVALDFLYQMAKRIRKYAGALFFITQNLRDGRSTPEIEAKTTAIFNCCQYSFIFSLPPQDINDLVELYKSSGGINEAEQQEIVTNQQGTAFLISSATERTSFSIVTTGVVESLFIREDEKQL

SEQ ID NO: 945 - protein, 773 aa, Unknown
  Description of Unknown: uncultivated organism sequence
  Category: MG60 effectors
  Description: MG60-158 effector
MSAAYGITIFSVRRVDFACQSPTTGHRKGLTSMKIIKRNGSEAVFDIMKIITAVTKANNVVKEDEQLTPMQIRRIAESVENSCLGMNRALSVEEIQDLVEHQIMAHGAYEVAKQYITYRYTRSLVRKSNTTDEKILSLIESNNEEVKQENSNKNPTVNAVQRDYMAGEVSKDLTARMLLPKEIVDAHEAGIIHFHDADYFAQHMHNCDLVNLEDMLQNGTVISGTLIEKPHSFSTACNISTQIIAQIASNQYGGQSISLTHLAPFVDISRQKIRKTVLEEIRTLGAAPDEAAISKVVEDRLREEIRRGVQTIQYQVVTLMTTNGQAPFITVFMYLGEARNEQEKHDLAIIIEETLKQRIEGVKNEKGVWITPAFPKLIYVLEEDNIHEGTKYWELTKLAARCTAKRMVPDYISEKKMRELKLSKGETPGHGDVYTCMGCRSFLTPDRSGNGWNNIANAGNYEPGKPKYYGRFNQGVVTINLVDVALSSGGAVDKFWRIFDERLELCYEALMCRHNRLKGTLSDAAPILWQYGALARLGKGEPIDKLLYGGYSTISLGYAGLYECVKYMTGKSHTDPAATPFALEVMQHMNDKCAEWKQKENIDFSLYGTPLESTTYKFAKCLQKRFGIIEGITDKNYITNSYHIHVSEHINAFDKLAFESQFQALSPGGAISYVEVPNMQNNIDAVLQVMQFIYENIMYAELNTKSDYCQICGFDGEIEIKEDKDGKLVWTCPQCGNTDQSKMNVARRTCGYIGTQYWNQGRTQEIRDRVLHL

SEQ ID NO: 946 - protein, 756 aa, Unknown
  Description of Unknown: uncultivated organism sequence
  Category: MG60 effectors
  Description: MG60-159 effector
MSFYDRRTTWLTPCGFTYSKADPLRDKDTLSERTRTIMKIIKRNGSEAEFDKNKIIRAISKANITVDESIRLTGKQIDRIAESVVLSCERLGRSPGVEEVQDMVEHQIMAHGAFEVAKNYITYRYTHDLIRRSNTTDEKILSLIECNNEEAKQENSNKNPVINSTQRDYMAGEVSRDLTDRLLLPPDIVKAHEEGIIHFHDTDYFAQHMHNCDLVNLEDMLQNGTVVTGTMLERPHSFSTACNIATQIIAQVASNQYGGQSISLAHLAPFVQVSREKIRRSVIAESKDFEIPLNEEQITNIVERRLREEISRGVQTIQYQVLTLLTTNGQAPFVTVFMYLGEAKNEREKKDLAMIIEETLEQRYKGVKNETGVWVTPAFPKLIYVLEEDNITEDSEYWYLTKLAAKCTAKRLVPDYISEKKMKELKEGNCFPVMGCRSALSPWKDENGNYKFYGRFNQGVVTLNLVDIACSSGGNYDKFWKIFDERLDLCYRALMCRHNRLMGTLSDAAPILWQYGACARLKKGEPIDKLLVGGYSTISLGYAGLCECVRYMTGKSHTDPSATPFALEVMRHMNDACEKWKKETTIGFGLYGTPLESTTYKFAKCLQKRFGIIPGVTDKGYITNSYHVHVTEHIDAFEKLKFESQFQALSTGGAISYVEVPNMQQNLDAVLEIIKFIYDNIMYAELNTKSDYCQVCGYDGEIEIKERDGKLVWVCPNCGNDDQNKMNVARRTCGYIGTQFWNQGRTQEIKERVLHL

SEQ ID NO: 947 - protein, 753 aa, Unknown
  Description of Unknown: uncultivated organism sequence
  Category: MG60 effectors
  Description: MG60-160 effector
MLEIVKRDCSKTNFDKQKIFNAIMKAMKSGSGIVKSEIAEKIANEIEHEAKSMEEIDIYQIEAMVFQKLIENNQILTAKAYESYRSVREFQRNTTNSTDDVILELLAGQSEYWNEENSNKNAMLITTQRDYIAGIESEDISKRMLLTPEIVHAQENGIAHFHDIDYFAMKAMYNCCLINLEDMLQNGTVISNVLIEKPHSFSTACNVATQIIAQVASSQFGGQTISLSHLAPFVDISRQRIKKQVEKELINANLSSVEYHNLVDSIVAERLKEEIKKGVQTIQYQVVTLMTTNGQAPFLSVFMYLNEVKDKQTKHDLAMLIEEVLLQRIQGVKNEKGVWVTPAFPKLLYVLEEDNIHKDSPYYYLTELAAKCTAKRMVPDYISEKKMKEYKIDKNGKGQCFPAMGCRSFLSPYLDKNNQPKYYGRFNQGVVTINLADVALSALKEYEESKFNLHDTSVESIFWKVLDERLELCHRTLRLRHERLKGTVSDVAPILWQHGAIARLDKGEKIDKLLYNDYSTISLGYAALYECVKTITGHSLTDNGIGEKFGLQVMQRLTDKCNQWKEEENIGYSVYGTPLESTTYKFAKCLRKRFGVIEGITDRDYVTNSYHIPVFENINAFDKLLIESKFQKLSAGGAISYVEVPNLTDNIEIVIQIIQYIYEHIMYAELNTKSDYCHVCGYDKEIEIVTDENTGKLIWKCPQCGNTDQRKMSVTRRTCGYLGSNFWNQGRTQEIKERVLHIDDIDLNESENV

SEQ ID NO: 948 - protein, 1045 aa, Unknown
  Description of Unknown: uncultivated organism sequence
  Category: MG60 effectors
  Description: MG60-161 effector
MIKVIKRDCSEIQFDKNKISKAILKAMKNGSGIIKPKIADDIANEIEQYCIDNQFDNIDISDIESIVYDKLISKKQRLTAKAYEGYRRIREFQRENVNTTDEEIEELLTGTSEYWMNENSNKDEKLVTTQRDYMAGIVSKDMSRRYLLTPEIVQAHDEGIIHFHDVDYFGQKTLHNCFSADTEFVTSCGVKKFSDFHDGDNVVVLDKDGMWRNATVKQFGKQEMYDVTFQSTRRTKTVTCTKNHRWILNDGSVTTNLKIGDSLIGLKDMLCTYKTETYDECNLFALGFLIGDGCDHNSANYYQVRLCGHKIEYADIFKKAGYKIDNIGDTNDLIAYKTGTIKQDFINSKAWKYMDRKSRALLFLGLYAADGTVNANKICTTDERIAEFIRDNSCLCGYHITSETTEIRDTNYKKDSKLIAFRFSKHQPMNQLWKVKSIVPHYNYHYENRGNKKEENAPINAWCVVEPITHSFTLSNGMVTGNCDLIDLEDMLQNGTVISGTLIEKPHSFSTACNIATQIIAQVASSQYGGQTITLSHLAPFVDVSRKKIREEVEEELNYINGGGIYKDQLSTIDEITESRLAKEVKKGVQTIQYQVVTLMTTNGQAPFLSVNMYLNEVKDEQTKADLALIIEEVLKQRIQGVKNEQGVWITPAFPKLLYVLEDDNIHEGDKYWYLTKLAAQCTAKRMVPDYISEKKMLEYKVDKNGNGNCYPCMGCRSFLTPYVDTNGKPKYYGRFNQGVVTINLPDIALSSNGDVETFWEIFDERTELCHKALQIRHKRLEGTPSDVAPILWRYGALARLKKGEVIDKLLHGGYSTLSLGYAGLYECVKFMTGNSHTDGDKGEKFGLEVMQALNDKCNKWKKEENIDYSLYGSPIESTTYKFAKCLKKRFGVIEGITDRDYITNSYHVPVFEKIDPFTKLSIESKFQKLSPGGAISYIECADLTHNTEAVLKVMQFIYDNIMYAELNTKSDYCQVCGYDGEIKIVDENNELIWECPNCGNRDKNKMNVARRTCGYIGSNFWNKGRTEEIAERYVHLDDHEHEVE

SEQ ID NO: 949 - protein, 921 aa, Unknown
  Description of Unknown: uncultivated organism sequence
  Category: MG60 effectors
  Description: MG60-162 effector
MKIVKRNGTEVEFDIKKIINAITKANETVEEKDKLSIEEIKNISDCVMVRVSQLPVDTNVEVIQDIVEEELDKHNASYTLKRNYMLYRYQHNELRKSNTIDKTILSLIKCENEDIKQENSNKNPVIISTQRDYMAGEVSKDLMRRYFIDPDLMKAHDEGLIHIHDMDYILQNCHNCDLINLEDMLNNGTVISGTAIDKPHSFSTACNIATQIIAQVASSQYGGQSITLSHLAPFVDVSRKAILKELKEEFPSIDEDKLKEVCHRRLLKEINKGVQIIQYQVVTLMTTNGQAPFITVFMYLNECKDEQTKNDLALIIEEVLKQRIIGVKNEKGVYITPAFPKLIYVLQEDNIEKGSKYYYLTELAAKCTAKRMVPDYISEKIMKEMKEGQVYPSMGAVVPESKVYWKIDGKAYYGPIEKMYHSMIDRYDDLEEDCQFGQEGNPNKDINLKDYNVEIYDNGAGKYVKCLMMNMNLASQFRMYKIRTYNPIDDTDINLVVTHDHPMMKLKSEFDPNLVTIDWNDPKDIDNKCEEIQAEYLKTGDYVFFTKEQRGIRTVEIVDQTIPKPVQILKVPIINNYDFVYDVTTETEHFMVNNLWSHNCRSFLTPWKDKNGKYKFYGRFNQGVCTINLIDVACSSGKNIDKFWKIFDERLDMCRRVLMIKHNRLLGTVSDVAPILWQNGALARLNKGEKIDKLLYGGYSTISLGYAGLYECVYYMTGKSHTDPSVKDFALSIMQHMNDICNKWKKETNIGFSVYGTPLESVTYKFAKCLKKRFGEIPEVTDHNYITNSYHCNVREHINAFDKLTMESEFQRLSPGGAISYVEVPNMQNNIPAVLQLLKHIYNTIMYAEINTKSDYCHECGYTGEIVIEENKDHKLIWKCPNCGNTDQTKMNVARRTCGYIGTNFWNQGRTQEIKDRVLHL

SEQ ID NO: 950 - protein, 768 aa, Unknown
  Description of Unknown: uncultivated organism sequence
  Category: MG60 effectors
  Description: MG60-163 effector
MFCSCKKNLCVVIYIYNATKTYDCVKKLIVYKSIIKGAEVMKIIKRNGAEETFDRQKIKDAIAKANNETDGTPELTDRQIDYISLVIEDHCNEMNRALSVEEIQELVETHIILQGAPETAKRYIRYRFTRNLARASNTTDNQILSLIECNNEEVKQENSNKNPIVNSVQRDYMAGEVSKDLTKRILLPEDIVKAHEEGLIHFHDADYFAQHMHNCDLVNLEDMLQNGTVISGTMIEKPHSFSTACNIATQIIAQVASNQYGGQSISLAHLAPFVQISREKITRQVRAEMEEFGIDADDEQVKSLVEKRVRDEIKRGVQTIQYQVVTLLTTNGQAPFVTVFMYLNEAKNEQEKKDLAIIIEEVLKQRIKGTKNEVGVWVTPAFPKLIYVLEEDNITEDSRFWYLTKLAAECTAKRMVPDYISEKIMLKLKIDKNGNGNCYTCMGCRSFLTPYVDENGKPKYYGRFNQGVVTINLVDVACTAARDGSKSEEKFWQVLDERLELCHRALQCRHERLEGTLSDAAPILWQYGALARLKKGEPIDKLLHGGYSTLSLGYAGLWECVYEITGKKLTEKEGEEFGLRVMQRLNDACAEWKAAENIDYSIYGTPLESTTYKFAKCLQNRFGIIKGVTDRNYITNSYHIHVTEKIDAFSKLELESKFQKLSPGGAISYVEVPNMQQNIPAVLEVMKFIYNNIMYAELNTKSDYCQVCGYDGEIQIVEEDGKLVWRCPNCGNEDQSKMNVARRTCGYIGSQFWNQGRTQEIKERVLHL

SEQ ID NO: 951 - protein, 773 aa, Unknown
  Description of Unknown: uncultivated organism sequence
  Category: MG60 effectors
  Description: MG60-164 effector
MSAAYGITIFSVRRVDFACQSPTTGHRKGLTSMKIIKRNGSEAVFDIMKIITAVTKANNVVKEDEQLTPMQIRRIAESVENSCLGMNRALSVEEIQDLVEHQIMAHGAYEVAKQYITYRYTRSLVRKSNTTDEKILSLIESNNEEVKQENSNKNPTVNAVQRDYMAGEVSKDLTARMLLPKEIVDAHEAGIIHFHDADYFAQHMHNCDLVNLEDMLQNGTVISGTLIEKPHSFSTACNISTQIIAQIASNQYGGQSISLTHLAPFVDISRQKIRKTVLEEIRTLGAAPDEAAISKVVEDRLREEIRRGVQTIQYQVVTLMTTNGQAPFITVFMYLGEARNEQEKHDLAIIIEETLKQRIEGVKNEKGVWITPAFPKLIYVLEEDNIHEGTKYWELTKLAARCTAKRMVPDYISEKKMRELKLSKGETPGHGDVYTCMGCRSFLTPDRSGNGWNNIANAGNYEPGKPKYYGRFNQGVVTINLVDVALSSGGAVDKFWRIFDERLELCYEALMCRHNRLKGTLSDAAPILWQYGALARLGKGEPIDKLLYGGYSTISLGYAGLYECVKYMTGKSHTDPAATPFALEVMQHMNDKCAEWKQKENIDFSLYGTPLESTTYKFAKCLQKRFGLVEGITDKNYITNSYHIHVSEHINAFDKLAFESQFQALSPGGAISYVEVPNMQSNIDAVLQVMQFIYENIMYAELNTKSDYCQICGFDGEIEIKEDKDGKLVWTCPQCGNTDQSKMNVARRTCGYIGTQYWNQGRTQEIRDRVLHL

SEQ ID NO: 952 - protein, 756 aa, Unknown
  Description of Unknown: uncultivated organism sequence
  Category: MG60 effectors
  Description: MG60-165 effector
MQQSIFDVCVIIGLWFKKKRRSEVFTMKVIKRDGHIVDYSPDKIEEAVSKANLEVSEEDRVSDIQIRNIIKYIEGLHKKRMLVEDIQDVIEKRLMTLGKYELAKEYITYRYTRELVRRSNTTDKSIKELIDGESEYWNTENSNKNAKVVTTQRDYLAGITSTDITRRFLLPEDIVTAHDQGIIHFHDADYFAQNALHNCDLINLDDMLQNGTNINGVMIEKPHRFLTAMTIATQLITAVSSSQYGGCTITLTHLAPFVRSSKEFYLKKYKNRKLTKAQVEKFANEDLKKEITDGVQTFQYQINSMTTTNGQAPFLSVCMYLGETEEYKDELAMIIEEVLKQRMEGMKNEKGVYITPAFPKLLYVLEEENINPKGKYYYLTELAARCTAKRMVPDYISEKVMKENKINSLGNGECFPCMGCRSFLTPDRMFNVGNISKALNYVENKGKYYGRFNQGVVTINLPDVALTSGKDMELFWKVFDDRLELCHRALQIRHKRLSKVTSDVAPILWQHGALARLEKGESIHELLHHGYSTISLGYAGLYECVKYMTGHSHTDNGKGHEFALEVMQHMNDKCNEWKEAEDIDYSLYGTPIESTTYKFAKCLRDRFGKIKGITDRDYITNSYHVPVFEEIDAFTKLKLESEFQRLSPGGAISYIETPNLENNIDVVMEVINFIYENIMYAELNTKSDYCQKCGYNGEILLDDDLEWYCPECGNRDHDTLNVARRTCGYIGTNFWNKGRTQEIKERVVHIDNKDDE

SEQ ID NO: 953 - protein, 1231 aa, Unknown
  Description of Unknown: uncultivated organism sequence
  Category: MG60 effectors
  Description: MG60-166 effector
MSLKIEDLETFKRHRYAVSESLSTDIVGRDREIEEISSKIDSVYCLTITGPAGVGKSRLAVAAIEHYCASHTDFEVLCTKSFSDYISALDEAIEEGRRYIIFIDDANTYPRLIELLEFLKYRNQEGNIKAILTVRDYLKGCLDSDIYMGFYEVKPLNDKSIEDALVKNTTIRNEDWLKQIAKIANGNIRVAFLAANEAIKNNKSLGSIYNQKDVLNRFYKDEMSKIDHSESLLITAGVIAFFKSIYLEQLFYIVPILKSVNLSKKSFIENVNILIKMKIVDDYHDVVKIADQCFADFLLNYTIVEKRYLKIKDLLLVGFKYYKERIVESIHTILHVYNTEEFVDHLRKEVTDACNNLEDDVSLKHDLESCFVQVIPEYVSREYIEGVENYSDKKDIKWLINVFSGLAFSNYNEIANKGILKLLKKTKNKTKEVYDAIKNTYEMRAERANERFQYQIALIKELQNGGLYNDEFNALVSSYLNFRFSYSCFTSKREMMHYTFSVDDNTAGILELRSTCWGYLFNCELSKAIDSIMDFANRHYIERNLEIIKNDLRCINTYLCEHDQSGFLNSVLYVKFIDEAKEYCFTDLLTANEKYLDFLDIVFERKLLGANYEGYEARYKNRVADYYNLHKDDIYDILNETDLFLNKYYKYQKTRLVNALVEVVDKFSNALFFLCTKNVIFPHLVIEEFLKNRNLDEAYALINQIDDETIKDEYLYNFYSYLSKENIEKDYGFIGWMNSKGDFKTNRTYHRDAMSLKNIAEKCGLDYVALLRKLYSKEKYNKFIAKAYLSYLIDNVETFKELLSLNQNLAIKIYEFLIANGEKDYESSVLIEILDVKRSYIKVFAKAFIEEEYYNDCNLDFIFEKEYCDSFLDECMKVMLSQKINFAPFKLRILISRNINQPNMERWIEKYIESNYKEDNVIELFFQALSEIDHQHKNAYLVLYYQKGHDINVLRQAILKKSHSYSNAKEHFGNEIKWLETLKKSLLNWNNTEEVKFIDTVIDDYKVRIKNDEIESLVDYGNQNILNELRERDFKTEVPLKDAFELYQSNKKFRDMLSSGYLSYKDGSFVNGKNDAVKFIDKLKDKKIICVEIKPVDKVGRLDYEQYLSSMKSIAKEFDNPKLVSLNDYLNALIAERKWNAQEFKDYTFLSRDIFSKIRNNKKNKMDKRTLVQILIGLRVSKRERDYLLELNQTSLSKYVKEDVLYSFILDAKLDIEVADELLRDIGEDGF

SEQ ID NO: 954 - protein, 783 aa, Unknown
  Description of Unknown: uncultivated organism sequence
  Category: MG60 effectors
  Description: MG60-167 effector
MMRVVKRDGKIVDFDESRIKIAIGKANNEVDESQRATEEEIEKIVEYVKKVKKDRILVEDIQDIIENKLMEYKRFELAKAYITYRYSRALVRKANTTDQTVKELVEGNSEYWNNENSNKNARVVTTQRDYLAGITSTDITRRLLLPPEIVKAHDEGIIHFHDADYFAQNALTNCCLINLNDMLQNGTVINGVMIEKPHRFVTACTIATQIILGVSSSQYGGCTVTLTHLAPFVRDSYNRSLKKYQDRNLPEEECKKFAMQDTKKEIADGVQTFNYQVNSMTNTNGQAPFLSVNMYLGETDEYKDELAMIIEEFLRQRMLGFKNEKGVYITPAFPKLLYVLEEDNIHKDSKYWYLTELAAKCTAKRMVPDYISEKMMKKLKINQYGEGDCYPCMGCRSFLTPDRVKGNVAKAKDYVEGKGKYYGRFNQGVVTINLPDVALSSKKDEKEFWKIFDERLELCHEALQLRHKRLSGITSDVAPLLWQYGAYARLNKGEKLDKLLHGGYSTLSLGYAGLYECVKYMTGDSHTDGGKGEKFALEVMQHMNDKCAEWKKAEDIDYSLYGTPIESTTYKFAKCLKKRFGTVEGVTDRNYITNSYHVPVFEEIDAFSKLKLESEFQRLSPGGAISYVETPNLQNNIEVVEQIIEFIYNNIMYAELNTKSDYCQKCGYTGEILIDDNLEWYCPNCGNRDHRTLNVARRTCGYIGTNFWNKGRTQEIKERVLHIDNKDFDAEKCTKCDEEANVASKCCNDSNESTECDKNVEKHEKKTRAKVSAKEKAMASVHA

SEQ ID NO: 955 - protein, 818 aa, Unknown
  Description of Unknown: uncultivated organism sequence
  Category: MG60 effectors
  Description: MG60-168 effector
MQTNKQLDLARNFVQYTGQNIFLTGKAGTGKTTFLKSLKEHSPKRMIVVAPTGVAAINAGGVTIHSFFQLSFAPQIGLENDRDKQNRFNKEKISIIRSLDLLVIDEISMVRADTLDAIDRVLRRFRSKSKPFGGVQVLMIGDLQQLAPVVKNEEWGLLRREYETVFFFSSKVLRKTSFVSIELTEVFRQHDDKFISILNKVRDNQLDQKSLEALNKRYLPGFVPGEDEGFITLCTHNIQAHRINESKLIQLKTDKKSYTAEIEGKFPEYSYPTDFKLVVKPGAQVMFVKNDPEPEKRFYNGKIGKITRFEEDVIYVNCPGDMEEIAVTPLLWENVKYTIDTKTAEISESVEGTFMQYPLKLAWAITIHKSQGLTFEKAIIDAGASFAHGQVYVALSRCKTLEGMVLSTPISERSIINDGTVSGFIQNVEENQPGEIELKNAKLAYQKELLFDIFSFETVKMQVNIINKLLRENSSSVPEVVVEHLKKIKSAVYSDLVEVAEKFQKQISTLLKDQPDVEQNNQLLERISKAATYFSEKTETIIETDFTRADLEVDNRVLRKQLKNSSTKLLEEANLKQVSFAICKNGFNVKELLTERAKAIVANNKPAGKKKKAKEIVNPENIPHPELYNTLREWRLEKAHEIEKPAFVVFSQKTLVELVNYLPVETATLKLINGFGERKIEQFGAGIIEIIRDYCDKNNIQRAEIPLKEGKEKKPKIDTKKVSFEMFKEGKTVEEIAVERALTPGTIENHLAHFVRLGELDIKLILDNDKLKKITDYFKSTKNKSFGDAKAHFGDAISYGELRMGLSYLESLEQTQSK

SEQ ID NO: 956 - protein, 753 aa, Unknown
  Description of Unknown: uncultivated organism sequence
  Category: MG60 effectors
  Description: MG60-169 effector
MKKLNIDHAQRSLILSRLEEKGIQEFVEFLQSKFKSESITRIMGSSHLFINSCPLCGHVGCFNIDSTMGIFNCFSCRGSGNAADLPMLFTNDIQEGLQALQEFTGLTLQLDKEDVQAQRKTNLYADVTEIYHKQLLDNEVVLNYLIQVRKRQIETIEKMQTGFCTSRADTSSQLKELGYSDEEKSKVLVPEGLFVYPYPDRYGVIQRFNTKNYFKATMRVSDGTQKVIEGYSIDKKKLLFNPNQKYAYGIIVEGEQDFAAIIENGDGNVVAMGGSPSADQINELRQFKKLYLCFDSDEPGKAFTQKVNNTLPDVKIYSIEIPHGYKDIDEYYTSYSNPVPVQSLLDSAQELINTESHGSVINNKVMLKNRDWQIEFDLTQLDIAKQMYKGNLKNTVNGKIVDNKNSIFLPNGMPKPLIEYADKLSQTIDEHYNCNFNKKTLFELSDIFYFSYNKPDIIKAAAVQLLEIEDKKERDACIASLTDKSFRNSVVREIIATENEMLKDQAVHYPLIKPGQAYIISEENPVAYIYFNKSEDDGKGNLIEMPCLLSSDKRIITLSDYTKVSPNQIVIVDGRFRLRDVIKGPLLSTDFCSLKQGYAKRYIEGEIEQEYLKPEYIIRKFEELFAKVYYNPDSNIYKVLALFSYATYLADLFGVLPYIYCTAQKGSGKSTILALLSKLCFNSVFVTDVTTASFIRISNLCATLIVDEFEGHSSRSKNQEDDLIPLIKSGYSKSSGGATRTNIEETYILLLKW

SEQ ID NO: 957 - protein, 844 aa, Unknown
  Description of Unknown: uncultivated organism sequence
  Category: MG60 effectors
  Description: MG60-170 effector
MPLDERIGRLKKKLLTSPYEVCMARAYHFTQAYKETEGLDPAIRNALALKKTLENQKIFIYPDEFLAGSKTEKFLSGPLSVERGDFLRTLQMEMDILHLKQRPFLITEEEKKLFREVILPYWDGKTLRDHKAKEWEKKGLIDRKQGFFKRLFRMIKFMRYVGRENLRKIAGANRKAPLTFRRLKNLHALRYELACNNPSPAVFCFDVQGHLSLGVNKVIENGMEGIIKKAEDRLKRLEVEEPYNEKKKNFLKAVTISLESAIRYSEKFAELSEEIAKKTEDEKEKNRLLLIAKHCRHVPRYKPRTFHEALQSAWITHLVGEIQYGTHEVFAPGRIDQFLYPFYENDIKSGRITRDEAKALIQEFLIKLESNVEPIPEVGMETNAVLGNSQHVVTIGGLKKDGEDGTNELSYLILEAYEEIGGAVNQLAVRISKKTPFDFLKRACAVFRKANGIAFYNDEAIIEGLLADGMSIEDARDYCIVGCIETSGQSNTHGCVGGHELVLPVVLIQTLTRGKEPPPFIGQKEGIDCGDPSSFKTFEDFISAFKKQLAHQIKILVEATEGKDKAYREILPAPYVSALMDDCIEKTMDVTEGGARYDFTSIDVRGLATLVDSLLAIKRFVYEKKELSLTDFIKIIRNNFKGHEVLRQRIINEAPKSGRGDGEADEMAKNVLHWIYEISQRYRNIRGGRFRVCYYSYGNHVIDGFMLGATPDGRLKGEPISNGVSPVNMGDFSCGPMGPMRSVAKFPPREISSGIALNMRFHPSFIKTEEGLITFAKMIKTYFEMGGMHIQPNVVSSETLMDAQKNPERYRDLIVKVSGYSAYFTDLGKSIQEDIISRYEFCRS

SEQ ID NO: 958 - protein, 625 aa, Unknown
  Description of Unknown: uncultivated organism sequence
  Category: MG60 effectors
  Description: MG60-171 effector
MQEEYLFKDNETICAFLKRLKDKDIASYKEILNETHCSKAYNDLKEHILQTLASLNRVKKAQELSKHKEYDLIRIYEEIQSMPSALFSYFKVSMNDIEAAMSASKKRLYLFKISNKDLSYAETSSQGKRKSRGRENLHTMYLKALLDGNKAFDIGSGSIYFRRKTDFGYTKETWEKGHHYAELKDRFLYPIISKRRYTVDHLQFHLSMTINYNADKNCKNINEMVNETIRNGAIEHIIGIDRGERNLLYASVIDLHGNIIEQCSLNIIPNKHNDLGTDYLKLLKERESIRQEERRSWDSIEKINELKTGYVSQAVHQVVKMVLKYHAIIVLEDLNEGFIRSRQKRERTVYAQFEKQLIEKLNYLVDKGIAEGEPGSATNGYQLTNPTNNNVKSNQSGILFYIPAWNTSNIDPTTGFVNLFNLRYQNREKTREFFDKFKSIKYNSEKKWLEFTFDYNDFTSKGKETQTIWTVCTYGPRIEAHKDSPKIWKKKTVEDINNKWLGFFNKWNITISEDLKEQIVKQDKKEFYKHLLDLFKLTLQMRNSDDKDDYIISPVMNTAHKFFKSCKDDTTLPIDADANGAYNIARKGLMWIKQMKDYKDTKKFKPDLKNRKWLNFAQQKPYKDE

SEQ ID NO: 959 - protein, 763 aa, Unknown
  Description of Unknown: uncultivated organism sequence
  Category: MG60 effectors
  Description: MG60-172 effector
MMRVVKRDGKIVDFDESRIKIAIGKANNEVDESQRATEEEIEKIVEYVKKVKKDRILVEDIQDIIENKLMEYKRFELAKAYITYRYSRALVRKANTTDQTVKELVEGNSEYWNNENSNKNARVVTTQRDYLAGITSTDITRRLLLPPEIVQAHDEGIIHFHDADYFAQNALTNCCLINLNDMLQNGTVINGVMIEKPHRFVTACTIATQIILGVSSSQYGGCTVTLTHLAPFVRDSYNRSLKKYQDRNLPEEECKKFAMQDTKKEIADGVQTFNYQVNSMTNTNGQAPFLSVNMYLGETDEYKDELAMIIEEFLKQRMLGFKNEKGVYITPAFPKLLYVLEEDNIHKDSKYWYLTELAAKCTAKRMVPDYISEKMMKKLKINQYGEGDCYPCMGCRSFLTPDRVKGNVAKAKDYVEGKGKYYGRFNQGVVTINLPDVALSSKKDEKEFWKIFDERLELCHEALQLRHKRLSGITSDVAPLLWQYGAYARLNKGEKLDKLLHGGYSTLSLGYAGLYECVKYMTGDSHTDGGKGEKFALEVMQHMNDKCAEWKKAEDIDYSLYGTPIESTTYKFAKCLKKRFGTVEGITDRNYITNSYHVPVFEEIDAFSKLKLESEFQRLSPGGAISYVETPNLQNNIEVVEQIIEFIYNNIMYAELNTKSDYCQKCGYTGEILIDDNLEWYCPNCGNRDHRTLNVARRTCGYIGTNFWNKGRTQEIKERVLHIDNKDFDAEKCTKCDENVEKPEKKTRAKVSAKEKAMASVHA

SEQ ID NO: 960 - protein, 783 aa, Unknown
  Description of Unknown: uncultivated organism sequence
  Category: MG60 effectors
  Description: MG60-173 effector
MMRVVKRDGKIVDFDESRIKIAIGKANNEVDESQRATEEEIEKIVEYVKKIKKDRILVEDIQDIIENKLMEYKRFELAKAYITYRYSRALVRKANTTDQTVKELVEGNSEYWNNENSNKNARVVTTQRDYLAGITSTDITRRLLLPPEIVKAHDEGIIHFHDADYFAQNALTNCCLINLNDMLQNGTVINGVMIEKPHRFVTACTIATQIILGVSSSQYGGCTVTLTHLAPFVRDSYNRSLKKYQDRNLPEEECKKFAMQDTKKEIADGVQTFNYQVNSMTNTNGQAPFLSVNMYLGETDEYKDELAMIIEEFLKQRMLGFKNEKGVYITPAFPKLLYVLEEDNIHKDSKYWYLTELAAKCTAKRMVPDYISEKMMKKLKINQYGEGDCYPCMGCRSFLTPDRVKGNVAKAKDYVEGKGKYYGRFNQGVVTINLPDVALSSKKDEKEFWKIFDERLELCHEALQLRHKRLSGITSDVAPLLWQYGAYARLDKGEKLDKLLHGGYSTLSLGYAGLYECVKYMTGDSHTDGGKGEKFALEVMQHMNDKCAEWKKAEDIDYSLYGTPIESTTYKFAKCLKKRFGTVEGITDRNYITNSYHVPVFEEIDAFSKLKLESEFQRLSPGGAISYVETPNLQNNIEVVEQIIEFIYNNIMYAELNTKSDYCQKCGYTGEILIDDNLEWYCPNCGNRDHRTLNVARRTCGYIGTNFWNKGRTQEIKERVLHIDNKDFDAEKCTKCDEEANVVSKCCNDSNESTECNKNVEKHEKKTRAKVSAKEKAMASVHA

SEQ ID NO: 961 - protein, 1222 aa, Unknown
  Description of Unknown: uncultivated organism sequence
  Category: MG60 effectors
  Description: MG60-174 effector
MLESFKDLYEVRKTVRFSLLKQNYEDFCKFENNILKDISFLNSLLKFEDEIKNIQKSNGKKMQDLLSKDILEDIIKNSFQTLKNQICSVIYNKVVFDTKTSERNKRYLIYIKTETWENLDFFIPKDYNNNWNYIPEEDFYKVKDSEIWYAIKFISKLIIDNELIPFNEGKFRNKLKNINKYNSNFWNFFELNTLNPFTVNRWKISEIVNSYELSLSQYKETLEDLNKEASTIANTILSDRYFENCRNQNESDGTVRYLFHIFSNCKNSSEKNIWQINHLILLVNKYESLKNGKKKYTNDEIEPKIKRLNKELRQLAKVRSELLWYQIHLIDNFQTEKFSFLIQSWKYYFVGMKKIWWENNLSQFQEFIDGLEGGNDKLLYLDSMTWGWFKKLFLSKQSDVVFTDGTRIKDLNGSILAKEEEILQLKKWIIEKIEKDINTFISKVTNDIFNEINSKEKIKFIEYLSQKWKKVDNLFKLWKKNKKQLIYGKELKEFCNSLYNFDSIKETYNLTKLEKEYLNQVMILLQTIKDKKYKIGTVEKDLSFLWGGFVEKAFDILDDLKNYFNDLGYKVIQKDVDLEKMLKQVKTWELEIFQIKSKDMPFHQDFINDRNCWIIEEVKNEKSDGFKKDLNTLYFEEFFKDIKNNNRNSRIWADFKIRWINSSENNDYESFWKKEKNQLRHSNNKENIEKFKNRFKRDRYSIEFSINLNATNHLTEEDFNTKISNKLKEKRETWSLRILSLDHGESSFLTYKIYQVEGNKYSIINQGWNFDNFKEIQDWEDKTTKRQENIQIDEKAIPYKDQKILDNYITKYHAMIQDQKRERQVEEAIKHFARKSISKIKEIISADTVDKNKEWVSDITKANVKKFIQYAIGHKEVFSLSNEENSIRNKNKGSNKSIENKKNGVEYSKRIEEFFQNKRLDVISLWEDTIRFDKINIFHILDYEFHFSYIKQEEWFIQQFPDQENIKEKIDYYLNQIQELLDDENKLIAFCNEIKNSFDGKSLADIDKLYNTPFYAYKNNFSLQLEQINNLKKWYASVLVGTISKRIMNGEVDIIVLENNLLYYGVDNSESFQKHMWAENHATFAEALINKLSFCLDKETSESYQFCYPIKVTERPQKFKNKNNGILFFVDENTTSLICPKCDQKLNRSKQDGDDHLHHNNKNPAWDECKKEPFEIQKSKNIVGEYQGMLFHDWDDLATYNIAKKALEYLEYLESQNNDETK

SEQ ID NO: 962 - protein, 885 aa, Unknown
  Description of Unknown: uncultivated organism sequence
  Category: MG60 effectors
  Description: MG60-175 effector
MKIIKRDGTIVDYDPEKIRVAIGKANNEVSKKEKATEEDINNIISYIEDLKKSRILVEDIQDIIEKKLMEIGKYQLAKQYITYRYTRALVRKANTTDQSIKELIDGESEYWNTENSNKNARVVTTQRDYLAGITSTDITRRFLLPEDVVKAHDEGIIHFHDADYFAQNALHNCDLINLEDMLQNGTSINGVMIEKPHRFLTAMTIATQIITAVNSSQYGGVTVTMTHLAPFVRESYKRILKKYQDRKFSKEDCEKYAKEDLRKEVKDGVQTFQYQINSMTTTNGQAPFLSVCLYLGETEEYKEELAMIIEEVLKQRTLGMKNEKGVYITPAFPKLIYVLEEDNMHENSKYWYLTELAAKCTAKRMVPDYISEKKMLELKVDKNGEGHCYPCMGCRSFLTPYVDPKTNKPKYYGRFNQGVVTINLVDAALSSGKDMEKFWKLFDERLELCHKALKIRHERLSKATSDVAPILWQHGALARLKKGESIHPLLHGGYSTLSLGYAGLYECVKYMTGHSHTDNGVGKEFGLKVMQKLNDKCKEWKEQEDIDYSVYGTPIESTTYKFSKCLRKRFGKIKGITDRDYITNSYHVPVFEEIDAFSKLKLESEFQQLSPGGAISYVETPNLQDNLEVVLQIIKFIYNNIMYAELNTKSDYCQKCGYDGEILIDDNLEWYCPNCGNRDHDTLNVARRTCGYIGSNFWNKGRTLINLYLPEIIAFKRGMINMRYNKIRKMDIADGPGVRVSIFMQGCTFNCKNCFNPETHDFNGGKEFTDSTINRVLELCENENIEGLSILGGEPMNPKNIEGTTKLAKAFKQKFPDKNLWAWSGFRFDKELKDKEVVKYLDVLVDGQYMDDLHNPTLKWKGSSNQRVINVQESLKKNEVILMQS

SEQ ID NO: 963 - protein, 755 aa, Unknown
  Description of Unknown: uncultivated organism sequence
  Category: MG60 effectors
  Description: MG60-176 effector
MHELIEKREPKEEKPMKIIKRNGAEVVFDIDKIIMAVTKANDAVDEKVRMTPLQIERISQSVQIACEEMGRSPSVEEIQDLVEKAIMAHGAFEVAKEYITYRYTRSLLRQSNTTDDRILSLIECNNEEVKQENANKNPTINAVQRDYMAGEVSKDITSRILLPKEVVDAHEAGIIHFHDADYYAQHMHNCDLVNLEDMLQNGTVISGTLIEKPHSFSTACNIATQIIAQVASNQYGGQSISLTHLAPFVQVSREKIRKTVEREMAAFGVAPAEETISKVVEDRLREEVRRGVQTIQYQVVTLMTTNGQAPFITVFMYLNEAKSEQEKKDLAMIIEETLRQRYEGVKNEKGVWITPAFPKLIYVLEEDNVREGTPYWYLTRLAAQCTAKRMVPDYISEKKMREYKLSKGETPGHGDVYTCMGCRSFLTPDRSGNGWDNVARAGNYEPGKPKYYGRFNQGVVTINLVDVALSSGRDMTKFWEVFEDRLELCHRALRCRHERLKGTLSDAAPILWQYGALARLPKGEPIDKLLYGGYSTISLGYAGLYECVKYMTGKSHTDDEAKPFALSVMQKMNDKCLQWKTAENIDYSLYGTPLESTTYKFAKCLQKRFGLIPGITDKSYITNSYHVHVTEPIDAFTKLRFEAEFQQLSPGGAISYVEVPNMQNNIDAVLEVMQFIYDNIMYAELNTKSDYCQVCGYDGEIEIKEDDGKLVWVCPQCGNTDQNKMNVARRTCGYIGTQFWNQGRTQEIKDRVLHL

SEQ ID NO: 964 - protein, 768 aa, Unknown
  Description of Unknown: uncultivated organism sequence
  Category: MG60 effectors
  Description: MG60-177 effector
MFCSCKKNLRVVIYIYDATKTYDCAKKLIVYKSIIKGAEVMKIIKRNGAEETFDRQKIKDAIAKANNETDGTPELTDRQIDYISLVIEDHCNEMNRALSVEEIQELVETHIILQGAPETAKRYIRYRFTRNLARASNTTDNQILSLIECNNEEVKQENSNKNPTVNSVQRDYMAGEVSKDLTKRILLPEDIVKAHEEGLIHFHDADYFAQHMHNCDLVNLEDMLQNGTVISGTMIEKPHSFSTACNIATQIIAQVASNQYGGQSISLAHLAPFVQISREKITRQVRAEMEEFGIAADDEQVKSLVEKRVRDEIKRGVQTIQYQVVTLLTTNGQAPFVTVFMYLNEAKNEQEKKDLAIIIEEVLKQRIKGTKNEVGVWVTPAFPKLIYVLEEDNITEDSRFWYLTKLAAECTAKRMVPDYISEKIMLKLKIDKNGNGNCYTCMGCRSFLTPYVDENGKPKYYGRFNQGVVTINLVDVACTAARDGNKSEEKFWQVLDERLELCHRALQCRHERLEGTLSDAAPILWQYGALARLKKGEPIDKLLHGGYSTLSLGYAGLWECVYEITGKKLTEKEGEEFGLRVMQRLNDACAEWKAAENIDYSIYGTPLESTTYKFAKCLQNRFGIIKGVTDRNYITNSYHIHVTEKIDAFSKLELESKFQKLSPGGAISYVEVPNMQQNIPAVLEVMKFIYNNIMYAELNTKSDYCQVCGYDGEIQIVEEDGKLVWRCPNCGNEDQSKMNVARRTCGYIGSQFWNQGRTQEIKERVLHL

SEQ ID NO: 965 - protein, 1488 aa, Unknown
  Description of Unknown: uncultivated organism sequence
  Category: MG60 effectors
  Description: MG60-178 effector
MKVNDSSLIDCYTRLPSHTARNIRELVESANLESRNALWREIDRFMTDISTAIQPFVFFIIGEWGEGKTTAFEGYLKFESEKANIQSTLISARTLFNCLKKIKEKEILESNVTSAILVAAILWAIVDEEKARGTKSYNIPDPRSLSIRDAVDYVYNALDCLFSSMKPSNKRLVVFIDEFEEILTIREEEIKDLIISGIVEFIEGKLGIISEKGKYAGMFHLVVSVTPAAYHMLGKDKRLTQLIGRFKRRIYRYQLKSITKEEAYRYIIAAIKYSFNRKQFDIPFSSPGIINTCYFITKGNLGALTQLFNILLTQSRSESPYKCKMYRIDYKRFLKYVKGKTIFVYGDEAKIIDEKFFNMLRMLEEELRNYPNIRRNNLINIFDIIWLLSVEYEPKSKLEIMRKLGLQEVDDVDTCVNILNGLFRARKRKMGKTIYEVYYVPWYSGIEEDLRKLFSEMSAILNLKLDDETIEKIIDLLTFYEISDDRLIPYLIWPAQETDSYYLVELTEGLIQEEEAIEIRRQFIKYVKDEGIRRDKMLIISHEILKNLYPAPEITYLDFIIDRNDRMRLWREARRELINNLLPEEKYINALSKLFENQSPLYGLKYGSEVFYLLEHSTGDVKYEIPTLIRVFVRPPDEEEINKFVKFLKNFMPPLTLIFHAHGFQKVQETIKITCGKVLELCTLQFVLLSQTTLLQLISYLKAIEEEKNSSHKRLLDEDKLKIRFKEIFEELEFPKIISEIIRDGIDKGWIIRDLDLQSTSDPSNLVDAFICFLSYPKRKMTIGDVWNFYKQLNELKIFGTKPGFSPRDIESYQQFYNYAQDLIKNGFLKIDGQYVEPVLTKIEERILKIIDNYDSSPIPISELKERFVTIAKTSNLFKDVFLNALEKRGIIEIRKNLLFKADIAERQEKLQRLYNTFKARIEKLKEEKIINVFRFVVSTKERGCNVIDPFEIEKFVDKIYHKVEYAQLSDENLFLRLATFLINFLNYHLNERIGIFTLINKAYNEALKERALFKQEIDNVKKKIHKIVVFLSSISHVPIEQIQLDELTTLKEIHYDVESVFSKSPGKSEVKDAVSKDSEAYKKFWIKRVKELRSSPIEYDFLNYGYYQLIKKKEKSKQLLLKIKDLISRIEEKERNIGERFNKLQEYLIRIEKMKSVDNENEFLGPSFSGELAQLLEKNIKSPTFYFKDIKNLTDVKSFLDNFLKEMIDIFENIRISVESLSNLQQSEFLIKKLYDFQAKKYNLSKKFLENSSYSQQLIELWTQFEKSISDQLKALKDEYEKELRIIKKTYIGSAVVSRIQELAKKISDKLISLKEKIQTNTKKILSLVKESIDELEKLYKRADQLYFAIEAVVGDSSKKKEAEYLHDEITVVSKEWKQLEKIFVAENSDSAEIIEFKKFLDMKSLLFSSLQKLEEILLTSGRLDNLDLKIFEITKEISEKEQTNIPISSIISYILNNVNQKLTENEILFKLYKLSNYGLIQINVVA

SEQ ID NO: 966 - protein, 756 aa, Unknown
  Description of Unknown: uncultivated organism sequence
  Category: MG60 effectors
  Description: MG60-179 effector
MQQSIFLVCVIIGLWFKKKRRSEVFIMKVIKRDGHIVDYSPDKIEEAVNKANLEVSEEDRVSDIQIRNIIKYIEGLHKKRMLVEDIQDVIEKRLMTLGKYELAKEYITYRYTRELVRRSNTTDKSIKELIDGESEYWNTENSNKNAKVVTTQRDYLAGITSTDITRRFLLPEDIVTAHDQGIIHFHDADYFAQNALHNCDLINLDDMLQNGTNINGVMIEKPHRFLTAMTIATQLITAVSSSQYGGCTITLTHLAPFVRSSKEFYLKKYKERKLTKAQIEKFAMEDLKKEITDGVQTFQYQINSMTTTNGQAPFLSVCMYLGETEEYKEELAMIIEEVLKQRMEGMKNEKGVYITPAFPKLLYVLEEENINPKGKYYYLTELAARCTAKRMVPDYISEKVMKENKINSLGNGDCFPCMGCRSFLTPDRMFNVGNISKALNYVENKGKYYGRFNQGVVTINLPDVALTSGKDMELFWKVFDDRLELCHRALQIRHKRLSKVTSDVAPILWQHGALARLEKGESIHELLHHGYSTISLGYAGLYECVKYMTGHSHTDNGKGHDFAIEVMQYMNDKCSEWKEAEDIDYSLYGTPIESTTYKFAKCLRDRFGKIKGITDRDYITNSYHVPVFEEIDAFTKLKLESEFQRLSPGGAISYIETPNLENNIDVVMEVINFIYENIMYAELNTKSDYCQKCGYSGEILLDDDLEWYCPECGNRDHDTLNVARRTCGYIGTNFWNKGRTQEIKERVVHIDNKDDE

SEQ ID NO: 967 - protein, 774 aa, Unknown
  Description of Unknown: uncultivated organism sequence
  Category: MG60 effectors
  Description: MG60-180 effector
MEKKIGRNDPCPCGSGKKFKHCCGKTPVLRALTQEEWEELYHSLNQRLIQYLRQPRFVDDFESAWDLYWDGEYEIEELNRLSKWEMGTFVNFLVFGYLLLSSNRSVIDHFLNKYRADLTLPERTMLDNMRKAFYGVYEVQEVRPGQGMKVKNIFDGTEFEIKEISGSKETVKWDVISGYICKIGEHYEFTGFINFVPRQIVGSLQAMLLNEHRMYQDEIESVNFSVFLKNNAFIVDQFIREYDAKPPVIVNKEGDEIVLCKLTYKIREKEKVLEWFASNSMFDIIPEKGKKTGDSRAHYTWWLKGDVARRLMYSKKEIKEPYSVFADVVIEKTSMTVELTSERRRDIAKTYLKKQLGNLIRLTKTEIKSLEEAQDEHKGDLNLHQSEHDELMMDPEVQKLIKQRMENYYYEEWVDKPIPALGGLTPIEAYSEAPDELEELLKTFEQQELRNKSNLNVYHLDVDKLRAHIAKMARESTADIPDSNFGEEEKLLVSGITYRIMQQFEIDPDKKNEFVIKEDRMGIFWIDEHPIIGVILDIRKNTITVDVLGITDKIISTDDVLYIFPPEKEDILLMTIDNMMRGIARGFEFYQQHNLELTSKAGRAFHAMITMLPEICELIIATVEKYSNKEVNITMKELRKDQCGKTVFIMKRKTLELAEEDFFRAILYPEKFFGPYLKLPQSKIKKFTDRFVRFIAYMASMCLFSLEYKRRYEFDDQRFDNLFFFVYDKQSKVLAEQLLPILEINGGCTPKNIERLKAYIPLHNFRLLRKVTIP

SEQ ID NO: 968 - protein, 1231 aa, Unknown
  Description of Unknown: uncultivated organism sequence
  Category: MG60 effectors
  Description: MG60-181 effector
MSLKIEDLETFKRHRYAVSESLSTDIVGRDREIEEISSKIDSVYCLTITGPAGVGKSRLAVAAIEHYCANHTDFEVLCTKSFSDYISALDEAIEEGRKYVIFIDDANTYPRLIELLEFLKYRNQEGNIKAILTVRDYLKGCLDSDIYMEFYEVKPLNDKSIEDALVKNTTIRNEDWLKQIAKIANGNIRVAFLAANEAIKNNKSLDSIYNQKDVLNRFYKDEISKIDHSESLLITAGIIAFFKSIYLEQLFYIVPILKSVNLSKKSFIENVNILIKMEIVDNYHDVVKIADQCFADFLLNYTIVEKRYLKIKDLLLVGFKYYKERIVESIHTILHVYNTEEFVDHLRKEVTDACNNLEDDVSLKHGIESCFAQVIPEYVSREYIEGVEKYSDQKDIKWLINVFSGLAFSNYNEIANKGVLKLLKKTKNKTKEVYDAIKNTYEMRAERANERFQYQIALIKELQNGGLYNDEFNALVSSYLNFRFSYSCFTSKREMMHYTFSVDDNTAGILELRSACWGYLFNCELSKAIDSIMDFANRHYIERNLEIIKNDLRCINTYLCEHDQSGFLNSVLYVKFIDEAKEYCFTDLLTANKKYLDFLDIVFERKLLGKNYEGYEARYKNRVTDYYNLHKDDIYDILNETDLFLNKYYKYQKTRLVNALVEVVDKFSNALFFLCTKNGIFPHLVIEEFLKNRNLDEVYALINQIDDETIKDEYLYNFYSYLSKENIEKDYGFIGWINSKGDFKTNRTYHRDAVSLNNIAEKCGLDYVALLKKLYSKEKYNKFIAKAYLSYLIDNVETFKELLSLNQNLAIKIYEFLIANGEKDYESSVLIEILDVKRSYIKVFAKAFIKEEYYNDCNLDFIFEKEYCDSFFNECMKVMLSQKTNSASSKLRILISKNINQPNMERWIEKYIESNYKEDNVIELFFQALSEIDHQHKNAYLVLYYQKGHDINVLRQAILNKSHSYSNAKEHFGNEIKWLETLKKSLLNWNNTEEVKFIDTVIDDYKVQIKNDEIESLVDYGNQNILNELRERDLKTEVSLKDAFELYQSDEKFRDMLSSGYLSYKDGSFVNGKNDPVKFIEKLKDKKIISVEIKPVDEVGRLDYEQYLSSMKSIAKEFDNPKLASLNDYLNALIDERGWKAQEFKENTFLSRDIFSKIRNNKKNKMDKKTLVQILIGLQVSKRERDYLLELNQTSLSKYVKEDVLYSFILDAKLDIGVADELLRDIGEDGF

SEQ ID NO: 969 - protein, 755 aa, Unknown
  Description of Unknown: uncultivated organism sequence
  Category: MG60 effectors
  Description: MG60-182 effector
MHELIEKREPKEEKPMKIIKRNGAEVVFDIDKIIMAVTKANDAVDEKVRMTPLQIERISQSVQIACEEMGRSPSVEEIQDLVEKAIMAHGAFEVAKEYITYRYTRSLLRQSNTTDDRILSLIECNNEEVKQENANKNPTINAVQRDYMAGEVSKDITSRILLPKEVVDAHEAGIIHFHDADYYAQHMHNCDLVNLEDMLQNGTVISGTLIEKPHSFSTACNIATQIIAQVASNQYGGQSISLTHLAPFVQVSREKIRKTVEREMAAFGVAPAEETISKVVEDRLREEVRRGVQTIQYQVVTLMTTNGQAPFITVFMYLNEAKSEQEKKDLAMIIEETLRQRYEGVKNEKGVWITPAFPKLIYVLEEDNVREGTPYWYLTRLAAQCTAKRMVPDYISEKKMREYKLSKGETPGHGDVYTCMGCRSFLTPDRSGNGWDNVARAGNYEPGKPKYYGRFNQGVVTINLVDVALSSGRDMTKFWEVFEDRLELCHRALRCRHERLKGTLSDAAPILWQYGALARLPKGEPIDKLLYGGYSTISLGYAGLYECVKYMTGKSHTDDEAKPFALSVMQKMNDKCLQWKTAENIDYSLYGTPLESTTYKFAKCLQKRFGLIPGITDKSYITNSYHVHVTEPIDAFTKLRFEAEFQQLSPGGAISYVEVPNMQNNIDAVLEVMQFIYDNIMYAELNTKSDYCQVCGYDGEIEIKEDDGKLIWVCPQCGNTDQNKMNVARRTCGYIGTQFWNQGRTQEIKDRVLHL

SEQ ID NO: 970 - protein, 768 aa, Unknown
  Description of Unknown: uncultivated organism sequence
  Category: MG60 effectors
  Description: MG60-183 effector
MFCSCKKKLCVVIYIYNATKTYDCAKKLIVYKSIIKGAEVMKIIKRNGAEETFDRQKIKDAIAKANNETDGTPELTDRQIDYISLVIEDHCNEMNRALSVEEIQELVETHIILQGAPETAKRYIRYRFTRNLARASNTTDNQILSLIECNNEEVKQENSNKNPTVNSVQRDYMAGEVSKDLTKRILLPEDIVKAHEEGLIHFHDADYFAQHMHNCDLVNLEDMLQNGTVISGTMIEKPHSFSTACNIATQIIAQVASNQYGGQSISLAHLAPFVQISREKITRQVRAEMEEFGIDADDEQVKSLVEKRVRDEIKRGVQTIQYQVVTLLTTNGQAPFVTVFMYLNEAKNEQEKKDLAIIIEEVLKQRIKGTKNEVGVWVTPAFPKLIYVLEEDNITEDSRFWYLTKLAAECTAKRMVPDYISEKIMLELKIDKNGNGNCYTCMGCRSFLTPYVDENGKPKYYGRFNQGVVTINLVDVACTAARDGNKSEEKFWQVLDERLELCHRALQCRHERLEGTLSDAAPILWQYGALARLKKGEPIDKLLHGGYSTLSLGYAGLWECVYEITGKKLTEKEGEEFGLRVMQRLNDACAEWKAAENIDYSIYGTPLESTTYKFAKCLQNRFGIIKGVTDRNYITNSYHIHVTEKIDAFSKLELESKFQKLSPGGAISYVEVPNMQQNIPAVLEVMKFIYNNIMYAELNTKSDYCQVCGYDGEIQIVEEDGKLVWRCPNCGNEDQSKMNVARRTCGYIGSQFWNQGRTQEIKERVLHL

SEQ ID NO: 971 - protein, 750 aa, Unknown
  Description of Unknown: uncultivated organism sequence
  Category: MG60 effectors
  Description: MG60-184 effector
MVKKFLSKGAYHYQNNFFNDKIGFVILGGNMMRVIKRNGHTVDFDATKIENAILKAMKCGSGIIDEQCAKDIAREIEEWHRYSDGDISIYRIEGQVFEKLIEKGQILTAKAYEGYRKVREFQRETNTIDNEIYGIVNQTNKEAMEENSNKDATVLATQRDLIAGEFSKDYCRRLLLPPKIVQAHDDGIIHFHDMDYYIQKMHNCDLVNLKDMFAQGTVINDKLIETPKSLQTACTVATQIVQQVANGQYGGQTISLAHLSPYVRISYEKHKKNVINEGKMIGIDYSDEQIEKIAKSRLKDEIKAGIQTIQYQINTFSTTNGQAPFLSVFMYLKEEPEYIEETAMLIEETLRQRYVGMKNPVGAYVTPAFPKLLYVLDDNNVPQDSKYRYLTDLAVKCVAKRMMPDFISAKIMRENYEGQVFPCMGCRSFLSPWKDENGEYKWYGRFNQGVVTLNLADAGLSADHNLDNFWKILDERLELCKEALLLRHESLKGTIADVSPIHWRYGALARLKSGEKIDKLLENGYSTISLGYIGLYECVVALIGQTHTSKEGNELATKIMERLREACDSWKEETGLGFGLYGTPAESTTYTFARALKKRFGIVPGVTDKDYLTNSYHVNVREHIDAFSKLEVEAKFQKLSSGGAISYVEVTNMSQNLDALSALIDYMYETIQYAEINTKSDYCQECGFDGEILLDENREWYCPNCGNRNHKTLNVCRRTCGYLGDNFWNQGRTQEIAERFVHLDNHLYGE

SEQ ID NO: 972 - protein, 768 aa, Unknown
  Description of Unknown: uncultivated organism sequence
  Category: MG60 effectors
  Description: MG60-185 effector
MFCSCKKKLCVVIYIYNATKTYDCAKKLIVYKSIIKGAEVMKIIKRNGAEETFDRQKIKDAIAKANNETDGTPELTDRQIDYISLVIEDHCNEMNRALSVEEIQELVETHIILQGAPETAKRYIRYRFTRNLARASNTTDNQILSLIECNNEEVKQENSNKNPTVNSVQRDYMAGEVSKDLTKRILLPEDIVKAHEEGLIHFHDADYFAQHMHNCDLVNLEDMLQNGTVISGTMIEKPHSFSTACNIATQIIAQVASNQYGGQSISLAHLAPFVQISREKITRQVRAEMEEFGIAADDEQVKSLVEKRVRDEIKRGVQTIQYQVVTLLTTNGQAPFVTVFMYLNEAKNEQEKKDLAIIIEEVLKQRIKGTKNEVGVWVTPAFPKLIYVLEEDNITEDSRFWYLTKLAAECTAKRMVPDYISEKIMLKLKIDKNGNGNCYTCMGCRSFLTPYVDENGKPKYYGRFNQGVVTINLVDVACTAARDGSKNEEKFWQVLDERLELCHRALQCRHERLEGTLSDAAPILWQYGALARLKKGEPIDKLLHGGYSTLSLGYAGLWECVYEITGKKLTEKEGEEFGLRVMQRLNDACAEWKAAENIDYSIYGTPLESTTYKFAKCLQNRFGIIKGVTDRNYITNSYHIHVTEKIDAFSKLELESKFQKLSPGGAISYVEVPNMQQNIPAVLEVMKFIYNNIMYAELNTKSDYCQVCGYDGEIQIVEEDGKLVWRCPNCGNEDQSKMNVARRTCGYIGSQFWNQGRTQEIKERVLHL

SEQ ID NO: 973 - protein, 755 aa, Unknown
  Description of Unknown: uncultivated organism sequence
  Category: MG60 effectors
  Description: MG60-186 effector
MHELIEKREPKEEKPMKIIKRNGAEVVFDIDKIIMAVTKANDAVDEKVRMTPLQIERISQSVQIACEEMGRSPSVEEIQDLVEKAIMAHGAFEVAKEYITYRYTRSLLRQSNTTDDRILSLIECNNEEVKQENANKNPTINAVQRDYMAGEVSKDITSRILLPKEVVDAHEAGIIHFHDADYYAQHMHNCDLVNLEDMLQNGTVISGTLIEKPHSFSTACNIATQIIAQVASNQYGGQSISLTHLAPFVQVSREKIRKTVEREMAAFGVAPAEETISKVVEDRLREEVRRGVQTIQYQVVTLMTTNGQAPFITVFMYLNEAKSEQEKKDLAMIIEETLRQRYEGVKNEKGVWITPAFPKLIYVLEEDNVREGTPYWYLTRLAAQCTAKRMVPDYISEKKMREYKLSKGETPGHGDVYTCMGCRSFLTPDRSGNGWDNVARAGNYEPGKPKYYGRFNQGVVTINLVDVALSSGRDMTKFWEVFEDRLELCHRALRCRHERLKGTLSDAAPILWQYGALARLPKGEPIDKLLYGGYSTISLGYAGLYECVKYMTGKSHTDDEAKPFALSVMQKMNDKCLQWKTAENIDYSLYGTPLESTTYKFAKCLQKRFGLVPGITDKSYITNSYHVHVTEPIDAFTKLRFEAEFQQLSPGGAISYVEVPNMQNNIDAVLEVMQFIYDNIMYAELNTKSDYCQVCGYDGEIEIKEDDGKLIWVCPQCGNTDQNKMNVARRTCGYIGTQFWNQGRTQEIKDRVLHL

SEQ ID NO: 974 - protein, 755 aa, Unknown
  Description of Unknown: uncultivated organism sequence
  Category: MG60 effectors
  Description: MG60-187 effector
MHELIEKREPKEEKPMKIIKRNGAEVVFDIDKIIMAVTKANDAVDEKVRMTPLQIERISQSVQIACEEMGRSPSVEEIQDLVEKAIMAHGAFEVAKEYITYRYTRSLLRQSNTTDDRILSLIECNNEEVKQENANKNPTINAVQRDYMAGEVSKDITSRILLPKEVVDAHEAGIIHFHDADYYAQHMHNCDLVNLEDMLQNGTVISGTLIEKPHSFSTACNIATQIIAQVASNQYGGQSISLTHLAPFVQVSREKIRKTVEREMAAFGVAPAEETISKVVEDRLREEVRRGVQTIQYQVVTLMTTNGQAPFITVFMYLNEAKSEQEKKDLAMIIEETLRQRYEGVKNEKGVWITPAFPKLIYVLEEDNVREGTPYWYLTRLAAQCTAKRMVPDYISEKKMREYKLSKGETPGHGDVYTCMGCRSFLTPDRSGNGWDKVARAGNYEPGKPKYYGRFNQGVVTINLVDVALSSGRDMTKFWEVFEDRLELCHRALRCRHERLKGTLSDAAPILWQYGALARLPKGEPIDKLLYGGYSTISLGYAGLYECVKYMTGKSHTDDEAKPFALSVMQKMNDKCLQWKTAENIDYSLYGTPLESTTYKFAKCLQKRFGLVPGITDKSYITNSYHVHVTEPIDAFTKLRFEAEFQQLSPGGAISYVEVPNMQNNIDAVLEVMQFIYDNIMYAELNTKSDYCQVCGYDGEIEIKEDDGKLIWVCPQCGNTDQNKMNVARRTCGYIGTQFWNQGRTQEIKDRVLHL

SEQ ID NO: 975 - protein, 755 aa, Unknown
  Description of Unknown: uncultivated organism sequence
  Category: MG60 effectors
  Description: MG60-188 effector
MHELIEKREPKEEKPMKIIKRNGAEVVFDIDKIIMAVTKANDAVDEKVRMTPLQIERISQSVQIACEEMGRSPSVEEIQDLVEKAIMAHGAFEVAKEYITYRYTRSLLRQSNTTDDRILSLIECNNEEVKQENANKNPTINAVQRDYMAGEVSKDITSRILLPKEVVDAHEAGIIHFHDADYYAQHMHNCDLVNLEDMLQNGTVISGTLIEKPHSFSTACNIATQIIAQVASNQYGGQSISLTHLAPFVQVSREKIRKTVEREMAAFGVAPAEETISKVVEDRLREEVRRGVQTIQYQVVTLMTTNGQAPFITVFMYLNEAKSEQEKKDLAMIIEETLRQRYEGVKNEKGVWITPAFPKLIYVLEEDNVREGTPYWYLTRLAAQCTAKRMVPDYISEKKMREYKLSKGETPGHGDVYTCMGCRSFLTPDRSGNGWDNVARAGNYEPGKPKYYGRFNQGVVTINLVDVALSSGRDMTKFWEVFEDRLELCHRALRCRHERLKGTLSDAAPILWQYGALARLPKGEPIDKLLYGGYSTISLGYAGLYECVKYMTGKSHTDDEAKPFALSVMQKMNDKCLQWKTAENIDYSLYGTPLESTTYKFAKCLQKRFGLVPGITDKSYITNSYHVHVTEPIDAFTKLRFEAEFQQLSPGGAISYVEVPNMQSNIDAVLEVMQFIYDNIMYAELNTKSDYCQVCGYDGEIEIKEDDGKLVWVCPQCGNTDQNKMNVARRTCGYIGTQFWNQGRTQEIKDRVLHL

SEQ ID NO: 976 - protein, 773 aa, Unknown
  Description of Unknown: uncultivated organism sequence
  Category: MG60 effectors
  Description: MG60-189 effector
MSAAYGITIFSVRRVDFACQSPTTGHRKGLTSMKIIKRNGSEAVFDIMKIITAVTKANNVVKEDEQLTPMQIRRIAESVENSCLGMNRALSVEEIQDLVEHQIMAHGAYEVAKQYITYRYTRSLVRKSNTTDEKILSLIESNNEEVKQENSNKNPTVNAVQRDYMAGEVSKDLTARMLLPKEIVDAHEAGIIHFHDADYFAQHMHNCDLVNLEDMLQNGTVISGTLIEKPHSFSTACNISTQIIAQIASNQYGGQSISLTHLAPFVDISRQKIRKTVLEEIRTLGAAPDEAAISKVVEDRLREEIRRGVQTIQYQVVTLMTTNGQAPFITVFMYLGEARNEQEKHDLAIIIEETLKQRIEGVKNEKGVWITPAFPKLIYVLEEDNIHEGTKYWELTKLAARCTAKRMVPDYISEKKMRELKLSKGETPGHGDVYTCMGCRSFLTPDRSGNGWNNIANAGNYEPGKPKYYGRFNQGVVTINLVDVALSSGGAVDKFWRIFDERLELCYEALMCRHNRLKGTLSDAAPILWQYGALARLGKGEPIDKLLYGGYSTISLGYAGLYECVKYMTGKSHTDPAATPFALEVMQHMNDKCAEWKQKENIDFSLYGTPLESTTYKFAKCLQKRFGLVEGITDKNYITNSYHIHVSEHVNAFDKLAFESQFQALSPGGAISYVEVPNMQSNIDAVLQVMQFIYENIMYAELNTKSDYCQICGFDGEIEIKEDKDGKLVWTCPQCGNTDQSKMNVARRTCGYIGTQYWNQGRTQEIRDRVLHL

SEQ ID NO: 977 - protein, 896 aa, Unknown
  Description of Unknown: uncultivated organism sequence
  Category: MG60 effectors
  Description: MG60-191 effector
MAKTSTFAEATKRNVLEFARYKDFDRSLVQLGRRGGKYQKAADRIDSVLGKASRGESNPFHGLKVTKHGENRVDKCVKYDLGDGIRLITIQDSGVVLFCFAGTHTECDEWLDRNRGSTLIRDSKGQIKLNPLNIVKEGFAGFREPLKPITGKLYELIKPDYYFDKLVDSLPRSVVREIEGLEAWASDEDLLAIAERIDDQEVSDAFLDVFALLKKDEIEKAVERIRLFMGESQPIAMLTKEEIAALAESDQIRKISPNDPNYPEVLRHFARHGSYMDWMLYLHPDQQDIVDRTFSGPAKLVGVSGSGKTCVIVKRAIRLARDNPDEKVLVLTLNRQLARLIEDMVEAAAVEEIASRVLVLPLFRLCQELLHRFEPKNDRLYDDITWKSHEHIDEIWREFYRCELNNNDAAVLLPLHDSLISRGIDAEEYIREEFDWIRSAFPPDRRTDYLHAERVGRSYPLDKRFRAIILEGLEAWELKMKHIGVTDYLGLSTALNRHLDKLHEEYRFVLIDESQDFGTIEFRLVRRLTMEGQDSLFLCGDAAQQVQTKHGSLRDAGINIPSARSIRLTKNYRNSREILSAAYEVLVNNLSEEMLDSPDFDVLDPEHGNFSSSAPLILEADSLEEEIAYAREFVEDVVENKGEQKCCIALCGYSLYQIQEFGKRIGVPVLDGNIVVGKEDLYLSDLEHTKGFEFDAMLILNCKHGVIPNPGVPEKEQYRDLARFYVAMTRAKNHLVLSFSSTQSPYLVGVDEYFLSERWENYIDRERLRIVGVPLTIDEIRADHEQIEHVPDLLDMSGTEFLYTRHAIGLSSLLIDKLRRLIAGSKTRGAGGKQTPIGWRSIRAAAHDIEVYPGSRQVFGAEGLRQFRELVEKISEIDETSEQSPACPNWRPTKKR

SEQ ID NO: 978 - protein, 1025 aa, Unknown
  Description of Unknown: uncultivated organism sequence
  Category: MG60 effectors
  Description: MG60-192 effector
MEKFKNIFEVRKALRFELKASKITRENLEKENIYKNPVNILYKNKLEKWLNYSRTVFENDLKYFLDNSKNIILNLEKIKNLLDNTRFSEIFVEKKIFELIDKDFYIKFAKNKLSWWRSSSLQEIKKNLDWKWINLIKNYYLEIFENIENLIISIENLSEKESSFSKNEIKKFLRKISLEFIRIYNFLEKFDIKNKDFNKNLKEYIKKVINFKTFFEEIKSYYFISENQSSWILVRRFWFNEKSLKRRQPKEIKEELEENLKSFNEKLEIKEKLEEERQKLIQDFDLKLKTEKFEELLHPEKWSEIRKKKEKTKEEQEKLDDIDNQFKELKKLRNKDEEISKKTQELNRYKKDLWNLKVKINNLEKELENNLALTHYAKLLTNEINWEKLYYLVLIPIENKFILDEYISDEWNLEILEYNTLTFSALKKLALSYDWTMGIYWDKKEEINKKSNLKRWIVDLYIDLENWERQEEFYKIKRYVINLIKTYKNIFGNIYFDFKRLYDTKSLDEFKIEFDKQWYNLKWKNIDLEIIKKLEKEWKLEFYQIYNKDFYKNPDFFDIPYSIKEQKEERQRRRKSQNVKWNNNLFTIYWENFINDIANWNEEVRLNSDCWYFVKLKKEDKENHRYDRNKIIWNFGLIFNPGKKLTKKYDEKENIKKFNEIYKKEIKKVKNKSFIWIDRWEKELLTFCLIDENWNCIKNKNWEYIIWDFNLINNKWDFIPKDKCKYIDISWKEYKDLLGNFLPDFTHPENIISWKKSFQFDDEKNLYYFKLNHNARLYLLEWENKRYKIVNKEWKEIFLKDENWNNVIDYYLLFQSEVYKRHILKKTWNIKLEDVQELRWWYISNIIKQLNNWIVKYNWIIILENLDKTQIDEKWNIYKTNKEKVLEKTLWATIYQEIETLLNRKYNYFIFKDQDIWWLQLTPKVNNISDIKNLEKSKKNVNLWNIVFIDEYLTSKECPICKNQLFRDKKKWDNVYHNEKYPWNNWCSFDTRTNTYWFDFIKSWDDLAAYNIAKKGKEYIENLSN

SEQ ID NO: 979 - protein, 755 aa, Unknown
  Description of Unknown: uncultivated organism sequence
  Category: MG60 effectors
  Description: MG60-193 effector
MHELIEKREPKEEKPMKIIKRNGAEVVFDIDKIIMAVTKANDAVDEKVRMTPLQIERISQSVQIACEEMGRSPSVEEIQDLVEKAIMAHGAFEVAKEYITYRYTRSLLRQSNTTDDRILSLIECNNEEVKQENANKNPTINAVQRDYMAGEVSKDITSRILLPKEVVDAHEAGIIHFHDADYYAQHMHNCDLVNLEDMLQNGTVISGTLIEKPHSFSTACNIATQIIAQVASNQYGGQSISLTHLAPFVQVSREKIRKTVEREMAAFGVAPAEETISKVVEDRLREEVRRGVQPIQYQVVTLMTTNGQAPFITVFMYLNEAKSEQEKKDLAMIIEETLRQRYEGVKNEKGVWIAPAFPKLIYVLEEDNVREGTPYWYLTRLAAQCTAKRMVPDYISEKKMREYKLSKGETPGHGDVYTCMGCRSFLTPDRSGNGWDNVARAGNYEPGKPKYYGRFNQGVVTINLVDVALSSGRDMTKFWEIFEDRLELCHRALRCRHERLKGTLSDAAPILWQYGALARLPKGEPIDKLLYGGYSTISLGYAGLYECVKYMTGKSHTDDEAKPFALSVMQKMNDKCLQWKTAENIDYSLYGTPLESTTYKFAKCLQKRFGLIPGITDKSYITNSYHVHVTEPIDAFTKLRFEAEFQQLSPGGAISYVEVPNMQNNIDAVLEVMQFIYDNIMYAELNTKSDYCQVCGYDGEIEIKEDDGKLVWVCPQCGNTDQNKMNVARRTCGYIGTQFWNQGRTQEIKDRVLHL

SEQ ID NO: 980 - protein, 768 aa, Unknown
  Description of Unknown: uncultivated organism sequence
  Category: MG60 effectors
  Description: MG60-194 effector
MFCSCKKKLCVVIYIYDATKTYDCAKKLIVYKSIIKGAEVMKIIKRNGAEETFDRQKIKDAIAKANNETDGTPELTDRQIDYISLVIEDHCNEMNRALSVEEIQELVETHIILQGAPETAKRYIRYRFTRNLARASNTTDNQILSLIECNNEEVKQENSNKNPTVNSVQRDYMAGEVSKDLTKRILLPEDIVKAHEEGLIHFHDADYFAQHMHNCDLVNLEDMLQNGTVISGTMIEKPHSFSTACNIATQIIAQVASNQYGGQSISLAHLAPFVQISREKITRQVRAEMEEFGIDADDEQVKSLVEKRVRDEIKRGVQTIQYQVVTLLTTNGQAPFVTVFMYLNEAKNEQEKKDLAIIIEEVLKQRIKGTKNEVGVWVTPAFPKLIYVLEEDNITEDSRFWYLTKLAAECTAKRMVPDYISEKIMLELKIDKNGNGNCYTCMGCRSFLTPYVDENGKPKYYGRFNQGVVTINLVDVACTAARDGNKSEEKFWQVLDERLELCHRALQCRHERLEGTLSDAAPILWQYGALARLKKGEPIDKLLHGGYSTLSLGYAGLWECVYEITGKKLTEKEGEEFGLRVMQRLNDACAEWKAAENIDYSIYGTPLESTTYKFAKCLQNRFGIIKGVTDRNYITNSYHIHVTEKIDAFSKLELESKFQKLSPGGAISYVEVPNMQQNIPAVLEVMKFIYNNIMYAELNTKSDYCQVCGYDGEIQIVEEDGKLVWRCPNCGNEDQSKMNVARRTCGYIGSQFWNQGRTQEIKERVLHL

SEQ ID NO: 981 - protein, 755 aa, Unknown
  Description of Unknown: uncultivated organism sequence
  Category: MG60 effectors
  Description: MG60-195 effector
MHELIEKREPKEEKPMKIIKRNGAEVVFDIDKIIMAVTKANDAVDEKVRMTPLQIERISQSVQIACEEMGRSPSVEEIQDLVEKAIMAHGAFEVAKEYITYRYTRSLLRQSNTTDDRILSLIECNNEEVKQENANKNPTINAVQRDYMAGEVSKDITSRILLPKEVVDAHEAGIIHFHDADYYAQHMHNCDLVNLEDMLQNGTVISGTLIEKPHSFSTACNIATQIIAQVASNQYGGQSISLTHLAPFVQVSREKIRKTVEREMAAFGVAPAEETISKVVEDRLREEVRRGVQPIQYQVVTLMTTNGQAPFITVFMYLNEAKSEQEKKDLAMIIEETLRQRYEGVKNEKGVWIAPAFPKLIYVLEEDNVREGTPYWYLTRLAAQCTAKRMVPDYISEKKMREYKLSKGETPGRGDVYPCMGCRSFLTPDRSGNGWDNVARAGNYEPGKPKYYGRFNQGVVTINLVDVALSSGRDMTKFWEIFEDRLELCHRALRCRHERLKGTLSDAAPILWQYGALARLKKGEKIDKLLYGGYSTISLGYAGLYECVKYMTGKSHTDDEAKPFALSVMQKMNDKCLQWKTAENIDYSLYGTPLESTTYKFAKCLQKRFGLIPGITDKSYITNSYHVHVTEPIDAFTKLRFEAEFQQLSPGGAISYVEVPNMQNNIDAVLEVMQFIYDNIMYAELNTKSDYCQVCGYDGEIEIKEDDGKLVWVCPQCGNTDQNKMNVARRTCGYIGTQFWNQGRTQEIKDRVLHL

SEQ ID NO: 982 - protein, 817 aa, Unknown
  Description of Unknown: uncultivated organism sequence
  Category: MG60 effectors
  Description: MG60-196 effector
MAETLICTQCGSHKLKKLSDTQYVCDSCGTTTDLDLFNNEIGLKLNLAMTTRQTAKFDEAKSLYEQVKSILRPDQCAPEVYFGLFACEYKVLFELDNRTGNRVPIFYSSSESNVFDNKNLKKALEQARDVSFSKFEEYNELAMKVEAARMSYQKLSKLVTPFDIFICFKKTDLDGISDTRDYSTAMSLYSKLVDKFPKYHIFFSEKTLAEIPLTEYEPNIYYALHTSKILMVVSSKRDYLESQWVKNEWTRFLAINKANAIIPIYLKGTNVNIFPSEILKNNAYEEGDYDRIFTSIDSIMNSERYVKERDAEKKRKKDEIFEEVQKRLSKSFNAPNSNLSNMFKRMINDLSDGVFENAQKICDSIFNVDAEHPLAWLYSYLIDKKLTSLEQLKDQYESNWTEDRAIKKAIEFSKIDGYQDERNKIEDELYKWISYMVTEAIDLTHRKKYDDARSKLVKVATHVEEFGRDHRFDYFYHNFLLEMNCTNTNDLVSLQGIEKNAYFSKALKYANENQHIQLDEIIKVAKDNASKYQEQIIKNNTQLEASFAKLDLAVKSKFDEGNKLIELCHENEKEAKIKIKNFEDEAKKSKEQVILQKAEIIEKKAELAKYYSSRSEKMSRFLCNIRAIILGTVTYSILFIYAPGTVILSFTFIIPLLIIAILFNFINISIHKRQRDGRTIKGFVIFGIISGMILLNIPLLIGYSRNRYYKKIDSKTRKLDNDIYSKDQQLKTIEDKKQIDIKSEKEFIDRRMQYAKKVTEIMDTITSRSNQLKKDYPIFSLDKGITLKVKLEKDMNMFKESMVKLDEQIYDISHIAF

SEQ ID NO: 983 - protein, 755 aa, Unknown
  Description of Unknown: uncultivated organism sequence
  Category: MG60 effectors
  Description: MG60-197 effector
MHELIEKREPKEEKPMKIIKRNGAEVVFDIDKIIMAVTKANDAVDEKVRMTPLQIERISQSVQIACEEMGRSPSVEEIQDLVEKAIMAHGAFEVAKEYITYRYTRSLLRQSNTTDDRILSLIECNNEEVKQENANKNPTINAVQRDYMAGEVSKDITSRILLPKEVVDAHEAGIIHFHDADYYAQHMHNCDLVNLEDMLQNGTVISGTLIEKPHSFSTACNIATQIIAQVASNQYGGQSISLTHLAPFVQVSREKIRKTVEREMAAFGVAPAEETISKVVEDRLREEVRRGVQTIQYQVVTLMTTNGQAPFITVFMYLNEAKSEQEKKDLAMIIEETLRQRYEGVKNEKGVWITPAFPKLIYVLEEDNVREGTPYWYLTRLAAQCTAKRMVPDYISEKKMREYKLSKGETPGHGDVYTCMGCRSFLTPDRSGNGWDNVARAGNYEPGKPKYYGRFNQGVVTINLVDVALSSGRDVTKFWEVFEDRLELCHRALRCRHERLKGTLSDAAPILWQYGALARLPKGEPIDKLLYGGYSTISLGYAGLYECVKYMTGKSHTDDEAKPFALSVMQKMNDKCLQWKTAENIDYSLYGTPLESTTYKFAKCLQKRFGLVPGITDKSYITNSYHVHVTEPIDAFTKLRFEAEFQQLSPGGAISYVEVPNMQNNIDAVLEVMQFIYDNIMYAELNTKSDYCQVCGYDGEIEIKEDDGKLIWVCPQCGNTDQNKMNVARRTCGYIGTQFWNQGRTQEIKDRVLHL

SEQ ID NO: 984 - protein, 755 aa, Unknown
  Description of Unknown: uncultivated organism sequence
  Category: MG60 effectors
  Description: MG60-198 effector
MHELIEKREPKEEKPMKIIKRNGAEVVFDIDKIIMAVTKANDAVDEKVRMTPLQIERISQSVQIACEEMGRSPSVEEIQDLVEKAIMAHGAFEVAKEYITYRYTRSLLRQSNTTDDRILSLIECNNEEVKQENANKNPTINAVQRDYMAGEVSKDITSRILLPKEVVDAHEAGIIHFHDADYYAQHMHNCDLVNLEDMLQNGTVISGTLIEKPHSFSTACNIAAQIIAQVASNQYGGQSISLTHLAPFVQVSREKIRKTVEREMAVFGVSPAEETISKVVEDRLREEVRRGVQTIQYQVVTLMTTNGQAPFITVFMYLNEAKNEQEKKDLAMIIEETLRQRYEGVKNEKGVWITPAFPKLIYVLEEDNVREGTPYWYLTRLAAQCTAKRMVPDYISEKKMREYKLSKGETPGHGDVYTCMGCRSFLTPDRSGNGWDNVARAGNYEPGKPKYYGRFNQGVVTINLVDVALSSGRDMTKFWEVFEDRLELCHRALRCRHERLKGTLSDAAPILWQYGALARLPKGEPIDKLLYGGYSTISLGYAGLYECVKYMTGKSHTDDEAKPFALSVMQKMNDKCLQWKTAENIDYSLYGTPLESTTYKFAKCLQKRFGLIPGITDKSYITNSYHVHVTEPIDAFTKLRFEAEFQQLSPGGAISYVEVPNMQNNIDAVLEVMQFIYDNIMYAELNTKSDYCQVCGYDGEIEIKEDDGKLIWVCPQCGNTDQNKMNVARRTCGYIGTQFWNQGRTQEIKDRVLHL

SEQ ID NO: 985 - protein, 832 aa, Unknown
  Description of Unknown: uncultivated organism sequence
  Category: MG60 effectors
  Description: MG60-199 effector
MSLSFFATCPKGLENLLLKELVSLGATEVKETVAGVSFKGDFALGMRVCMWTRLASRVLLEISEFYAGTDTDLYLGALAVDYEKYFEVSNTIAVSFKGTSEAIRNTQYGALKIKDAVCDYFLKRNGIRPNVDKDNPDILITCHLDRKDNAHLLFDLSGNALHMRDFNRHTGMAPLKENLACAMLLRSGYNGSNLVDPMCGSGTLLLEAAAMATDTAPGICRDHYGFLQLKLCDRSAYTSLVEEMHKRSREGMLKFKQSGYKLFGFDADERIIDIALENAKKSGFADIIQFQVQSVETLVNPFDDLNDETQNKNAPSFFVITNPPYGQRMGNFNELISLYTKLGAVFKEQFRGAVCAVISSSEDLLSCLRLHADKIYKLYNGELLCQLRIFSIRQGEEGSESLSKDNLATDFANRLRKNLLKMNKWAKTLGLEAYRVYDADVPEYAAAIDYYKGYYVISTYKAQNKVSEKIEKRHELDMLGATIEVTGVSGSKVILKSREVKKGNSQYERLREDNSALIEIREGPFAFKVNLYDYLDTGLFLDGRLIRQYLYEHASNCSVLNLFAYTCSASVAAALGGASLITSVDMSKTYLEWGYENFLLNQIEAHSHEFIQADVLAFVSKDPEHKYDLIYVDPPTFSNSKRMQNTFDVRRDHLQLLGNLTRFLRDGAEVVFCTNLRSFRIDERLDEFGYSVTDLSSKTLPFDFKRNEHIHHCYSLIYHEKERRCEPVAFVSSNVNPKWSKVLYGIRKTNEQEITPKNKSVNGRPSRASTMVRFNASGMTEIHTDGNRDTSAFRHNNNRNFKSSKLRPAALRPKSSAKPRVFGPEGVKEGVQ

SEQ ID NO: 986 - protein, 1202 aa, Unknown
  Description of Unknown: uncultivated organism sequence
  Category: MG60 effectors
  Description: MG60-200 effector
MFDDLKNLYEVRKTVRFELKPYRKTREVLKWNDSYDNLDAFIKHIKEDFQKDFNWNEFCKWQYQYFLDESRILFDFISHHICIHISDDDWNIKTTTSIQFNFKWLKGIFKNIPALKKCLDFKSLMKKILEIEEEYSECFRFFEMEKERKNEKQSDISEYLRKIAFLNRNTLTIFQFLWNNQERTTDEHILKRYQAMLSDLWETFEKLNNTIIASHQNETTGACFGKFTFNKYALFRREAEDLKEKYKQHKQKVEKYVDRMIQDEDFTEDNGRNITIDTWTIHKLVLKKENSGLQSILKTFNFHRDLDEVISELDEINGNLLNQYIQEFQDEYKKDTSIIDVEFHVFKTKEWREMKIYDKTGKPPKLKELFDRDYNATIKVQPWQTLEGYEYLYLIWKENTTWEEKKKQKLANKFLRILFKQEFINSDFNTIKKFRDALSRQRGKIRQDVRTSGREFIQEAMIRYYGNILEKDWYYFLALTRKEDIPDNSIENITMEKYIRNMAEKWDFSIFLYSQLSFRSLEKLCLMEDGDLIIHSELTEQWNKYKNQKKDIEWGCRHHKTSFDKYCEECNLVKEGKQKQFLERFRDHIVDAIEKLRNDSKYKGEDWSIFIPEIEKLSSIEKIVHFIDEKFYKLKKKYINANKVFELAEQWKVLLFQLYNKDFSIYDENFVSHEERLEENEHWEATKMQSSTKRASNKQPNLFTLYWKEIFQLSDTSLWQEGGIFFRKADTEKIEKRFRNNKFFWAFDVRFNKWKVIAKTKLCEKKEKFQQSTIDAINIITKRNVVNNQKIKENIVFVGIDRGKKEHLSIGFYDNNLNHLWIIGNTNFVKKIGVNQINFSICFRSKITYFDDQTELNIYKQIATNEYYFDEYWKVEEGHHLELLGLRDYHVKRIFTQDINGNYFVWLKNGWRFILNKWKYWYKIVDKDNNELVLHDTLDGKEIIDYYLLFESERYKRILDINSELQYSTNMKNLKKWYIAIVKDFFKQKIQEFSEKWKEIVFALENQSTNKGTITKDYKGASIISEIEEELLNSFVYLKYKAKSLLNGIQLGITIKKDELNTLSKSGKKTNAEYGHYWHFLFVNPDFTSEACPVCNKDINLFDIDRWNDKEENKNNQKSLSKLYWHWKWKLWESNMHHCDNPGNCPNIESHISTQNTSKCDYHMKDNRKWFDFLTSWDDLATYNIAKKAKEYLEFLSEQSSR

SEQ ID NO: 987 - protein, 755 aa, Unknown
  Description of Unknown: uncultivated organism sequence
  Category: MG60 effectors
  Description: MG60-201 effector
MHELIEKREPKEEKPMKIIKRNGAEVVFDIDKIIMAVTKANDAVDEKVRMTPLQIERISQSVQIACEEMGRSPSVEEIQDLVEKAIMAHGAFEVAKEYITYRYTRSLLRQSNTTDDRILSLIECNNEEVKQENANKNPTINAVQRDYMAGEVSKDITSRILLPKEVVDAHEAGIIHFHDADYYAQHMHNCDLVNLEDMLQNGTVISGTLIEKPHSFSTACNIATQIIAQVASNQYGGQSISLTHLAPFVQVSREKIRKTVEREMAAFGVAPAEETISKVVEDRLREEVRRGVQTIQYQVVTLMTTNGQAPFITVFMYLNEAKSEQEKKDLAMIIEETLRQRYEGVKNEKGVWITPAFPKLIYVLEEDNVREGTPYWYLTRLAAQCTAKRMVPDYISEKKMREYKLSKGETPGHGDVYTCMGCRSFLTPDRSGNGWDNVAGAGNYEPGKPKYYGRFNQGVVTINLVDVALSSGRDMTKFWEVFEDRLELCHRALRCRHERLKGTLSDAAPILWQYGALARLPKGEPIDKLLYGGYSTISLGYAGLYECVKYMTGKSHTDDEAKPFALSVMQKMNDKCLQWKTAENIDYSLYGTPLESTTYKFAKCLQKRFGLIPGITDKSYITNSYHVHVTEPIDAFTKLRFEAEFQQLSPGGAISYVEVPNMQNNIDAVLEVMQFIYDNIMYAELNTKSDYCQVCGYDGEIEIKEDDGKLIWVCPQCGNTDQNKMNVARRTCGYIGTQFWNQGRTQEIKDRVLHL

SEQ ID NO: 988 - protein, 755 aa, Unknown
  Description of Unknown: uncultivated organism sequence
  Category: MG60 effectors
  Description: MG60-202 effector
MHELIEKREPKEEKPMKIIKRNGAEVVFDIDKIIMAVTKANDAVDEKVRMTPLQIERISQSVQIACEEMGRSPSVEEIQDLVEKAIMAHGAFEVAKEYITYRYTRSLLRQSNTTDDRILSLIECNNEEVKQENANKNPTINAVQRDYMAGEVSKDITSRILLPKEVVDAHEAGIIHFHDADYYAQHMHNCDLVNLEDMLQNGTVISGTLIEKPHSFSTACNIATQIIAQVASNQYGGQSISLTHLAPFVQVSREKIRKTVEREMAAFGVAPAEETISKVVEDRLREEVRRGVQTIQYQVVTLMTTNGQAPFITVFMYLNEAKSEQEKKDLAMIIEETLRQRYEGVKNEKGVWITPAFPKLIYVLEEDNVREGTPYWYLTRLAAQCTAKRMVPDYISEKKMREYKLSKGETPGHGDVYTCMGCRSFLTPDRSGNGWDNVARAGNYEPGKPKYYGRFNQGVVTINLVDVALSSGRDMTKFWEVFEDRLELCHRALRCRHERLKGTLSDAAPILWQYGALARLPKGEPIDKLLYGGYSTISLGYAGLYECVKYMTGKSHTDDEAKPFALSVMQKMNDKCLQWKTAENIDYSLYGTPLESTTYKFAKCLQKRFGLVPGITDKSYITNSYHVHVTEPIDAFTKLRFEAEFQQLSPGGAISYVEVPNMQNNIDAVLEVMQFIYDNIMYAELNTKSDYCQVCGYDGEIEIKEDDGKLVWVCPQCGNTDQNKMNVARRTCGYIGTQFWNQGRTQEIKDRVLHL

SEQ ID NO: 989 - protein, 761 aa, Unknown
  Description of Unknown: uncultivated organism sequence
  Category: MG60 effectors
  Description: MG60-203 effector
MHKAALPFGAVMFALYSSVSYFSEGCFSVMKIIKRNGSEAAFDISKIIVAIGKANATVDESIRMTPVQIQRIAESVVLSCERLGRSPSVEEVQDMVEKQIMAHGAFEVAKNYITYRYTRTLVRQSNTTDDKILSLIECNNEEAKQENSNKNPVVNSTQRDYMAGEVSRDITNRILLPKEIVEAHNEGVIHFHDTDYFAQHMHNCDLVNLEDMLQNGTVITGTLIERPHSFSTACNIATQIIAQVASNQYGGQSISLAHLAPFVDVSRKKIRAQVEAEMAELGVERDEAKLSSIVEKRLREEIRRGVQTIQYQVVTLLTTNGQAPFVTVSMYLGEAKNEQEKKDLAMVIEETLLQRYQGVKNEKGVWVTPAFPKLIYTLDEDNIYPDSPYYYLTELAAKCTARRMVPDYISAKKMRELKGDVYTCMGCRSFLTPDRFTDAGVGNIANALNYEPGKHKYYGRFNQGVVTINLPDVALSSGGNVEKFWQIFEDRLELCHRALQYRHNRLKGTLSDAAPILWQYGACARLKKGEPIDKLLYDGYSTISLGYAGLYECVKFMTGRSHTDPTATPFALQIMQKMNDKCKQWKEAENIDYSLYGTPLESTTYKFAKCLQKRFGIIPGVTDKGYITNSYHVHVTEKIDAFTKLGFEAQFQHLSPGGAISYVEVPDMQNNIEAVLQVMRFIYDNIIYAELNTKSDYCQKCGWDGEITIKEQDGKLVWTCPQCGNQDQDTMNVARRTCGYIGTQFWNQGRTQEIKDRVLHL

SEQ ID NO: 990 - protein, 768 aa, Unknown
  Description of Unknown: uncultivated organism sequence
  Category: MG60 effectors
  Description: MG60-204 effector
MFCSCKKNLCVVIYIYDATKTYDCAKKLIVYKSIIKGAEVMKIIKRNGAEETFDRQKIKDAIAKANNETDGTPELTDRQIDYISLVIEDHCNEMNRALSVEEIQELVETHIILQGAPETAKRYIRYRFTRNLARASNTTDNQILSLIECNNEEVKQENSNKNPTVNSVQRDYMAGEVSKDLTKRILLPEDIVKAHEEGLIHFHDADYFAQHMHNCDLVNLEDMLQNGTVISGTMIEKPHSFSTACNIATQIIAQVASNQYGGQSISLAHLASFVQISREKITRQVRAEMEEFGIAADDEQVKSLVEKRVRDEIKRGVQTIQYQVVTLLTTNGQAPFVTVFMYLNEAKNEQEKKDLAIIIEEVLKQRIKGTKNEVGVWVTPAFPKLIYVLEEDNITEDSRFWYLTKLAAECTAKRMVPDYISEKIMLKLKIDKNGNGNCYTCMGCRSFLTPYVDENGKPKYYGRFNQGVVTINLVDVACTAARDGNKSEEKFWQVLDERLELCHRALQCRHERLEGTLSDAAPILWQYGALARLKKGEPIDKLLHGGYSTLSLGYAGLWECVYEITGKKLTEKEGEEFGLRVMQRLNDACAEWKAAENIDYSIYGTPLESTTYKFAKCLQNRFGIIKGVTDRNYITNSYHIHVTEKIDAFSKLELESKFQKLSPGGAISYVEVPNMQQNIPAVLEVMKFIYNNIMYAELNTKSDYCQVCGYDGEIQIVEEDGKLVWRCPNCGNEDQSKMNVARRTCGYIGSQFWNQGRTQEIKERVLHL

SEQ ID NO: 991 - protein, 755 aa, Unknown
  Description of Unknown: uncultivated organism sequence
  Category: MG60 effectors
  Description: MG60-205 effector
MHELIEKREPKEEKPMKIIKRNGAEVVFDIDKIIMAVTKANDAVDEKVRMTPLQIERISQSVQIACEEMGRSPSVEEIQDLVEKAIMAHGAFEVAKEYITYRYTRSLLRQSNTTDDRILSLIECNNEEVKQENANKNPTINAVQRDYMAGEVSKDITSRILLPKEVVDAHEAGIIHFHDADYYAQHMHNCDLVNLEDMLQNGTVISGTLIEKPHSFSTACNIATQIIAQVASNQYGGQSISLTHLAPFVQVSREKIRKTVEREMAAFGVAPAEETISKVVEDRLREEVRRGVQTIQYQVVTLMTTNGQAPFITVFMYLNEAKSEQEKKDLAMIIEETLRQRYEGVKNEKGVWITPAFPKLIYVLEEDNVRDGTPYWYLTRLAAQCTAKRMVPDYISEKKMREYKLSKGETPGHGDVYTCMGCRSFLTPDRSGNGWDNVARAGNYEPGKPKYYGRFNQGVVTINLVDVALSSGRDMTKFWEVFEDRLELCHRALRCRHERLKGTLSDAAPILWQYGALARLPKGEPIDKLLYGGYSTISLGYAGLYECVKYMTGKSHTDDEAKPFALSVMQKMNDKCLQWKTAENIDYSLYGTPLESTTYKFAKCLQKRFGLIPGITDKSYITNSYHVHVTEPIDAFTKLRFEAEFQQLSPGGAISYVEVPNMQNNIDAVLEVMQFIYDNIMYAELNTKSDYCQVCGYDGEIEIKEDDGKLIWVCPQCGNTDQNKMNVARRTCGYIGTQFWNQGRTQEIKDRVLHL

SEQ ID NO: 992 - protein, 761 aa, Unknown
  Description of Unknown: uncultivated organism sequence
  Category: MG60 effectors
  Description: MG60-206 effector
MHKAALPFGAVMFALYSSVSYFSEGCFSVMKIIKRNGSEAAFDISKIIVAIGKANATVDESTRMTPVQIQRIAESVVLSCEKLGRSPSVEEVQDMVEKQIMAHGAFEVAKNYITYRYTRTLVRQSNTTDDKILSLIECNNEEAKQENSNKNPVVNSTQRDYMAGEVSRDITNRILLPKEIVEAHNEGVIHFHDTDYFAQHMHNCDLVNLEDMLQNGTVITGTLIERPHSFSTACNIATQIIAQVASNQYGGQSISLAHLAPFVDVSRKKIRAQVEAEMAELGVERDEAKLSSIVEKRLREEIRRGVQTIQYQVVTLLTTNGQAPFVTVSMYLGEAKNEQEKKDLALVIEETLLQRYQGVKNEKGVWVTPAFPKLIYTLDEDNIYPDSPYYYLTELAAKCTARRMVPDYISAKKMRELKGDVYTCMGCRSFLTPDRFTDAGVGNIANALNYEPGKHKYYGRFNQGVVTINLPDVALSSGGNVEKFWQIFEDRLELCHRALQYRHNRLKGTLSDAAPILWQYGACARLKKGEPIDKLLYDGYSTISLGYAGLYECVKFMTGRSHTDPTATPFALQIMQKMNDKCKQWKEAENIDYSLYGTPLESTTYKFAKCLQKRFGIIPGVTDKGYITNSYHVHVTEKIDAFTKLGFEAQFQHLSPGGAISYVEVPDMQNNIEAVLQVMRFIYDNIIYAELNTKSDYCQKCGWDGEIIIKEQDGKLVWTCPQCGNQDQDTMNVARRTCGYIGTQFWNQGRTQEIKDRVLHL

SEQ ID NO: 993 - protein, 768 aa, Unknown
  Description of Unknown: uncultivated organism sequence
  Category: MG60 effectors
  Description: MG60-207 effector
MFCSCKKNLCVVIYIYNATKTYDCAKKLIVYKSIIKGAEVMKIIKRNGAEETFDRQKIKDAIAKANNETDGTPELTDRQIDYISLVIEDHCNEMNRALSVEEIQELVETHIILQGAPETAKRYIRYRFTRNLARASNTTDNQILSLIECNNEEVKQENSNKNPTVNSVQRDYMAGEVSKDLTKRILLPEDIVKAHEEGLIHFHDADYFAQHMHNCDLVNLEDMLQNGTVISGTMIEKPHSFSTACNIATQIIAQVASNQYGGQSISLAHLAPFVQISREKITRQVRAEMEEFGIAADDEQVKSLVEKRVRDEIKRGVQTIQYQVVTLLTTNGQAPFVTVFMYLNEAKNEQEKKDLAIIIEEVLKQRIKGTKNEVGVWVTPAFPKLIYVLEEDNITEDSRFWYLTKLAAECTAKRMVPDYISEKIMLKLKIDKNGNGNCYTCMGCRSFLTPYVDENGKPKYYGRFNQGVVTINLVDVACTAARDGSKSEEKFWQVLDERLELCHRALQCRHERLEGTLSDAAPILWQYGALARLKKGEPIDKLLHGGYSTLSLGYAGLWECVYEITGKKLTEKEGEEFGLRVMQRLNDACAEWKAAENIDYSIYGTPLESTTYKFAKCLQNRFGIIKGVTDRNYITNSYHIHVTEKIDAFSKLELESKFQKLSPGGAISYVEVPNMQQNIPAVLEVMKFIYNNIMYAELNTKSDYCQVCGYDGEIQIVEEDGKLVWRCPNCGNEDQSKMNVARRTCGYIGSQFWNQGRTQEIKERVLHL

SEQ ID NO: 994 - protein, 755 aa, Unknown
  Description of Unknown: uncultivated organism sequence
  Category: MG60 effectors
  Description: MG60-208 effector
MHELIEKREPKEEKPMKIIKRNGAEVVFDIDKIIMAVTKANDAVDEKVRMTPLQIERISQSVQIACEEMGRSPSVEEIQDLVEKAIMAHGAFEVAKEYITYRYTRSLLRQSNTTDDRILSLIECNNEEVKQENANKNPTINAVQRDYMAGEVSKDITSRILLPKEVVDAHEAGIIHFHDADYYAQHMHNCDLVNLEDMLQNGTVISGTLIEKPHSFSTACNIATQIIAQVASNQYGGQSISLTHLAPFVQVSREKIRKTVEREMAAFGVAPAEETISKVVEDRLREEVRRGVQTIQYQVVTLMTTNGQAPFITVFMYLNEAKSEQEKKDLAMIIEETLRQRYEGVKNEKGVWITPAFPKLIYVLEEDNVREGTPYWYLTRLAAQCTAKRMVPDYISEKKMREYKLSKGETPGHGDVYTCMGCRSFLTPDRSGNGWDNVARAGNYEPGKPKYYGRFNQGVVTINLVDVALSSGRDVTKFWEVFEDRLELCHRALRCRHERLKGTLSDAAPILWQYGALARLPKGEPIDKLLYGGYSTISLGYAGLYECVKYMTGKSHTDDEAKPFALSVMQKMNDKCLQWKTAENIDYSLYGTPLESTTYKFAKCLQKRFGLIPGITDKSYITNSYHVHVTEPIDAFTKLRFEAEFQQLSPGGAISYVEVPNMQNNIDAVLEVMQFIYDNIMYAELNTKSDYCQVCGYDGEIEIKEDDGKLIWVCPQCGNTDQNKMNVARRTCGYIGTQFWNQGRTQEIKDRVLHL

SEQ ID NO: 995 - protein, 939 aa, Unknown
  Description of Unknown: uncultivated organism sequence
  Category: MG60 effectors
  Description: MG60-209 effector
MFNFTPKIGEKEISIVKALTTNEIEDLRNRIASYDPFQLFEVNPHNDKEIICPICGNGNGENHTGVKPSNENNHWIFHCFKCERFNGDLLSVIASENNLSTKGEDFFKVLTIGARIINFNFNLNHTTFSSNKKTKKDVPKAELDLIHTDILETQKNLRDLIEEQGGKWRGLTLETLEHFHCGYILNWIPPKIRLKYAQGQRDKLPVTSRRVILPTQNHYNAVMIDSDRNTENKSYWKMHAGHKEPFGLDFIPADADLIIIVEGEVDAMSIYQATDTNIYVFSTGGAGEKKFISELEEKFQGRKLPHIIILFDSDESGRNGANNLRENLIQRGFLVVVKFIDESDIKIDSNDILQEQGDAALKLRLDNLISAAQIEFAEIEKEMAESEAKRKSDPLYLDEETRAKLFGGGITDFDNAERLVLLFGDKFRYFKDLDRWVFYTNDFWTIAPTGKSSALFHFGRKTAEFIEFNATADADKKIAENFVKKFENHRYLSPICSMVKGLEEIYITQEDLDKHQMLLNCANGVVDLETGKLYKHDPSLYFTKKSPVVYNPECNSIDFEKFMQDVLPNEETRRAVLRYLGYCLCGDIREEKALFIVGDGRNGKGTLAKVLMAILDDYATPFKIDALLQRRFDKDGDAATPEFAKLEGRRLAIANEIPQGKNLDVAHFKDLTGGDQISIRRLHQEATTIKNPTHHFILCGQHYPEIKDANDLGLRERIIAVRFPQSFTGENCDPNLKKKLLTPENLSGALNILVQECINWQREGLIISDDMKAEKQEYLDANNFIQDFISEYCVFDADKKILRKELLSVLKENYRSEIAGLSDQALTDMLKKIEGVEYKNNIGKKHLSYFYGIGLSDEKQNSLEFAAVNKNDKTFNLQEHSNNLSDSEAEKLVLKMESEGYSNEEIIEELIKGGIDSSFAHEHLNHLKPENIPDHCIPF

SEQ ID NO: 996 - protein, 755 aa, Unknown
  Description of Unknown: uncultivated organism sequence
  Category: MG60 effectors
  Description: MG60-210 effector
MHELIEKREPKEEKPMKIIKRNGAEVVFDIDKIIMAVTKANDAVDEKVRMTPLQIERISQSVQIACEEMGRSPSVEEIQDLVEKAIMAHGAFEVAKEYITYRYTRSLLRQSNTTDDRILSLIECNNEEVKQENANKNPTINAVQRDYMAGEVSKDITSRILLPKEVVDAHEAGIIHFHDADYYAQHMHNCDLVNLEDMLQNGTVISGTLIEKPHSFSTACNIATQIIAQVASNQYGGQSISLTHLAPFVQVSREKIRKTVEREMAAFGVAPADETISKVVEDRLREEVRRGVQTIQYQVVTLMTTNGQAPFITVFMYLNEAKSEQEKKDLAMIIEETLRQRYEGVKNEKGVWITPAFPKLIYVLEEDNVREGTPYWYLTRLAAQCTAKRMVPDYISEKKMREYKLSKGETPGHGDVYTCMGCRSFLTPDRSGNGWDNVARAGNYEPGKPKYYGRFNQGVVTINLVDVALSSGRDMTKFWEVFEDRLELCHRALRCRHERLKGTLSDAAPILWQYGALARLPKGEPIDKLLYGGYSTISLGYAGLYECVKYMTGKSHTDDEAKPFALSVMQKMNDKCLQWKTAENIDYSLYGTPLESTTYKFAKCLQKRFGLVPGITDKSYITNSYHVHVTEPIDAFTKLRFEAEFQQLSPGGAISYVEVPNMQNNIDAVLEVMQFIYDNIMYAELNTKSDYCQVCGYDGEIEIKEDDGKLVWVCPQCGNTDQNKMNVARRTCGYIGTQFWNQGRTQEIKDRVLHL

SEQ ID NO: 997 - protein, 783 aa, Unknown
  Description of Unknown: uncultivated organism sequence
  Category: MG60 effectors
  Description: MG60-211 effector
MMRVVKRDGKIVDFDESRIKIAIGKANNEVDESQRATEEEIEKIVEYVKKVKKDRILVEDIQDIIENKLMEYKRFELAKAYITYRYSRALVRKANTTDQTVKELVEGNSEYWNNENSNKNARVVTTQRDYLAGITSTDITRRLLLPPEIVKAHDEGIIHFHDADYFAQNALTNCCLINLNDMLQNGTVINGVMIEKPHRFVTACTIATQIILGVSSSQYGGCTVTLTHLAPFVRDSYNRSLKKYQDRNLPEEECKKFAMQDTKKEIADGVQTFNYQVNSMTNTNGQAPFLSVNMYLGETDEYKDELAMIIEEFLRQRMLGFKNEKGVYITPAFPKLLYVLEEDNIHKDSKYWYLTELAAKCTAKRMVPDYISEKMMKKLKINQYGEGDCYPCMGCRSFLTPDRVKGNVAKAKDYVEGKGKYYGRFNQGVVTINLPDVALSSKKDEKEFWKIFDERLELCHEALQLRHKRLSGITSDVAPLLWQYGAYARLNKGEKLDKLLHGGYSTLSLGYAGLYECVKYMTGDSHTDGGKGEKFALEVMQHMNDKCAEWKKAEDSDYSLYGTPIESTTYKFAKCLKKRFGTVEGVTDRNYITNSYHVPVFEEIDAFSKLKLESEFQRLSPGGAISYVETPNLQNNIEVVEQIIEFIYNNIMYAELNTKSDYCQKCGYTGEILIDDNLEWYCPNCGNRDHRTLNVARRTCGYIGTNFWNKGRTQEIKERVLHIDNKDFDAEKCTKCDEDVNVVSKCCNDSNESTESDKNVEKHEKKTRAKVSAKEKAMASVHA

SEQ ID NO: 998 - protein, 762 aa, Unknown
  Description of Unknown: uncultivated organism sequence
  Category: MG60 effectors
  Description: MG60-212 effector
MRVVKRDGKIVDFDESRIKIAIGKANNEVDESQRATEEEIEKIVEYVKKVKKDRILVEDIQDIIENKLMEYKRFELAKAYITYRYSRALVRKANTTDQTVKELVEGNSEYWNNENSNKNAKVVTTQRDYLAGITSTDITRRLLLPPEIVKAHDEGIIHFHDADYFAQNALTNCCLINLNDMLQNGTVINGVMIEKPHRFLTACTIATQIILGVSSSQYGGCTVTLTHLAPFVRDSYNRILKKYQDRNLPEEECKKFAMQDTKKEIADGVQTFNYQVNSMTNTNGQAPFLSVNMYLGETDEYKDELAMIIEEFLKQRMLGFKNEKGVYITPAFPKLLYVLEEDNIHKDSKYWYLTELAAKCTAKRMVPDYISEKMMKKLKINQYGEGDCYPCMGCRSFLTPDRVKGNVAKAKDYVEGKGKYYGRFNQGVVTINLPDVALSSKKDEKEFWKIFDERLELCHEALQLRHKRLSGITSDVAPLLWQYGAYARLDKGEKLDKLLHGGYSTLSLGYAGLYECVKYMTGDSHTDGGKGEKFALEVMQHMNDKCAEWKKAEDIDYSLYGTPIESTTYKFAKCLKKRFGTVEGITDRNYITNSYHVPVFEEIDAFSKLKLESEFQRLSPGGAISYVETPNLQNNIEVVEQIIEFIYNNIMYAELNTKSDYCQKCGYTGEILIDDNLEWYCPNCGNRDHRTLNVARRTCGYIGTNFWNKGRTQEIKERVLHIDNKDFDAEKCTKCDENVEKHEKKTRAKVSAKEKAIASVHA

SEQ ID NO: 999 - protein, 763 aa, Unknown
  Description of Unknown: uncultivated organism sequence
  Category: MG60 effectors
  Description: MG60-213 effector
MYIQPIITVSDTTHKFNFVKLFFQKNKNSLRDVWRGNGMKIIKRNGEEVVFDLKKIITAISKANNEVPPSEQLAGSTINSIAENIEKQCAAENHEMNVEAIQDLVEKAIMKAGAFDIAKKYITYRYQHQLMRRANSTDSQILSLLECNNEEVKQENSNKNSTVVSVQRDYMAGEVSKDITKRFLLDEDIVKAHDEGLIHFHDADYFAQHMHNCDLVNLEDMLQNGTVISGTKIDTPHSFSTACNIATQIIAQVASSQYGGQSISLAHLAPFVEVSRKKFQRETMRVEEQTGVKFTDEQFKKIVEMRIRDEITRGVQTIQYQVVTLMTTNGQSPFITVFMYLNEAKNEQEKADLAMIIEEMLKQRYQGVKNEKGFWVTPAFPKLIYVLEPDNIEPGSKYYSLTELAAKCTARRLVPDYISEKKMLELKVDANGKGNCYPCMGCRSFLTPYLDEHGKPKYYGRFNQGVVTINLVDVACSSNGDYKSFWEIFDERLELCHKALMRRHQRLLGTPSDVAPILWQHGALARLEKGETIDKLLFGGYSTISLGYAGLCECVRYMTGKPHTDPSATPFAIEIMKHLNEKCAEWKAESNIAFSLYGTPLESTTYKFAKCLKKRFGEIPGVTDKNYITNSYHVHVTEQMDAFTKLSFESQFQELSPGGAVSYVEVPNMENNIPAVMTLLKHIYENIMYAELNTKSDCCQKCGYTGEIQIVTDSDNKLVWQCPNCGNKDQATMNVARRTCGYIGTQYWNQGRTQEIKERVLHL

SEQ ID NO: 1000 - protein, 756 aa, Unknown
  Description of Unknown: uncultivated organism sequence
  Category: MG60 effectors
  Description: MG60-214 effector
MQQSIFDVCVIIGLWFKKKRRSEVFTMKVIKRDGHIVDYSPDKIEEAVSKANLEVSEEDRVSDIQIRNIIKYIEGLHKKRMLVEDIQDVIEKRLMTLGKYELAKEYITYRYTRELVRRSNTTDKSIKELIDGESEYWNTENSNKNAKVVTTQRDYLAGITSTDITRRFLLPEDIVTAHDQGIIHFHDADYFAQNALHNCDLINLDDMLQNGTNINGVMIEKPHRFLTAMTIATQLITAVSSSQYGGCTITLTHLAPFVRSSKEFYLKKYKNRKLTKAQVEKFATEDLKKEITDGVQTFQYQINSMTTTNGQAPFLSVCMYLGETEEYKDELAMIIEEVLKQRMEGMKNEKGVYITPAFPKLLYVLEEENINPKGKYYYLTELAARCTAKRMVPDYISEKVMKENKINSLGNGECFPCMGCRSFLTPDRMFNVGNISKALNYVENKGKYYGRFNQGVVTINLPDVALTSGKDMELFWKVFDDRLELCHRALQIRHKRLSKVTSDVAPILWQHGALARLEKGESIHELLHHGYSTISLGYAGLYECVKYMTGHSHTDNGKGHEFALEVMQHMNDKCNEWKEAEDIDYSLYGTPIESTTYKFAKCLRDRFGKIKGITDRDYITNSYHVPVFEEIDAFTKLKLESEFQRLSPGGAISYIETPNLENNIDVVMEVINFIYENIMYAELNTKSDYCQKCGYNGEILLDDDLEWYCPECGNRDHDTLNVARRTCGYIGTNFWNKGRTQEIKERVVHIDNKDDE

SEQ ID NO: 1001 - protein, 753 aa, Unknown
  Description of Unknown: uncultivated organism sequence
  Category: MG60 effectors
  Description: MG60-215 effector
MLEIVKRDCSKTNFDKQKIFNAIMKAMKSGSGIVKSEIAEKIANEIENEVKSMEEIDIYQIEAMVFQKLIENNQILTAKAYESYRSVREFQRNTTNSTDDAILELLAGQSEYWNEENSNKNAMLITTQRDYMAGIESEDISKRMLLTPEIVHAHENGIIHFHDIDYFAMKAMYNCCLINLEDMLQNGTVISNVLIEKPHSFSTACNVATQIIAQVASSQFGGQTISLSHLAPFIDVSRQKIKKQVEKELINANLTSVEYHNLVDSIVAKRLKEEIKKGVQTIQYQVVTLMTTNGQAPFLSVFMYLNEVKDKQTKHDLAMLIEEVLLQRIQGVKNEKGVWVTPAFPKLLYVLEEDNIHKNSPYYYLTELAAKCTVKRMVPDYISEKKMKECKIDKNGKGQCFPCMGCRSFLSPYLDKNSQPKYYGRFNQGVVTINLADVALSALKEYEESKLNLHNTSVESIFWKILDERLELCHRTLRLRHERLKGTVSDVAPILWQHGAIARLNKGEKIDKLLYNDYSTISLGYAALYECVKAITKHTLTDNGIGEKFGLQVMQRLTDKCNQWKEEENIGYSVYGTPLESTTYKFAKCLRKRFGVIEGITDRDYVTNSYHIPVFENINAFDKLLIESKFQKLSAGGAISYVEVPNLTDNIEIVIQIIQYIYEHIMYAELNTKSDYCHVCGYDKEIEIVTDANTGKLIWKCPQCGNTDQRKMSVTRRTCGYLGSNFWNQGRTQEIKERVLHIDDMDLNESENV

SEQ ID NO: 1002 - protein, 768 aa, Unknown
  Description of Unknown: uncultivated organism sequence
  Category: MG60 effectors
  Description: MG60-216 effector
MFCSCKKNLCVVIYIYDATKTYDCAKKLIVYKSIIKGAEVMKIIKRNGAEETFDRQKIKDAIAKANNETDGTPELTDRQIDYISLVIEDHCNEMNRALSVEEIQELVETHIILQGAPETAKRYIRYRFTRNLARASNTTDNQILSLIECNHEEVKQENSNKNPTVNSVQRDYMAGEVSKDLTKRILLPEDIVKAHEEGLIHFHDADYFAQHMHNCDLVNLEDMLQNGTVISGTMIEKPHSFSTACNIATQIIAQVASNQYGGQSISLAHLAPFVQISREKITRQVRAEMEEFGIDADDEQVKSLVEKRVRDEIKRGVQTIQYQVVTLLTTNGQAPFVTVFMYLNEAKNEQEKKDLAIIIEEVLKQRIKGTKNEVGVWVTPAFPKLIYVLEEDNITEDSRFWYLTKLAAECTAKRMVPDYISEKIMLKLKIDKNGNGNCYTCMGCRSFLTPYVDENGKPKYYGRFNQGVVTINLVDVACTAARDGNKSEEKFWQVLDERLELCHRALQCRHERLEGTLSDAAPILWQYGALARLKKGEPIDKLLHGGYSTLSLGYAGLWECVYEITGKKLTEKEGEEFGLRVMQRLNDACAEWKAAENIDYSIYGTPLESTTYKFAKCLQNRFGIIKGVTDRNYITNSYHIHVTEKIDAFSKLELESKFQKLSPGGAISYVEVPNMQQNIPAVLEVMKFIYNNIMYAELNTKSDYCQVCGYDGEIQIVEEDGKLVWRCPNCGNEDQSKMNVARRTCGYIGSQFWNQGRTQEIKERVLHL

SEQ ID NO: 1003 - protein, 769 aa, Unknown
  Description of Unknown: uncultivated organism sequence
  Category: MG60 effectors
  Description: MG60-218 effector
MKVIKRDGTIVEYDREKIRIAIEKANKEVSRKEKATDSEIEEIMSYIEDLKKGRILVEDIQDIIEEKLMEIKRYELAKKYITYRYTRALVRKANTTDQSIKELIEGESEYWNNENANKNARVVTTQRDYLAGITSTDITRRFLLPEDVVKAHDEGIIHFHDADYFAQNALTNCELINLEDMLQNGTIMNGVMIEKPHRFITACTIATQIILAVTSSTYGGATVSLAHLAPFVRSSYEKYYKKYKDNGLSKEQCEKFAKEDTKKEVADGVQTFNYQVNSMTNTNGQAPFLSVCMYLGETDEYKEELAMIIEEFLNQRILGFKNEKGVYITPAFPKLLYVLEEDNIHENSKYWYLTELAAKCTAKRMVPDYISEKIMKQMKVDANGDGQCYPCMGCRSFLTPYIDPVTKKPKYYGRFNQGVVTINLVDVALSSGKDLKKFWKIYDERLELCHKALQARHERLAKATSDIAPILWQHGAFARLPKGASIHPLLHGGYSTISLGYAGLYECVKYMTGKSHTDNGDGKDFAIEVMKKMNEKCAEWKDAEDIDYSVYGTPIESTTYKFAKCLQKRFGKIKGITDKNYITNSYHVPVFEEIDAFSKLKLESEFQRLSPGGAISYVETPNLQNNLEVVLQIMKFIYDNIMYAELNTKSDYCQKCGYTGEILIDDNLEWYCPNCGNRDHNTLNVARRTCGYIGSNFWNKGRTQEIKERVLHIDNKDDDCDCDECNCDHANTDTNKEEKSEEKQMNFIDYDVEEEITKSKKRMKQPAMV

SEQ ID NO: 1004 - protein, 755 aa, Unknown
  Description of Unknown: uncultivated organism sequence
  Category: MG60 effectors
  Description: MG60-219 effector
MHELIEKREPKEEKPMKIIKRNGAEVVFDIDKIIMAVTKANDAVDEKVRMTPLQIERISQSVQIACEEMGRSPSVEEIQDLVEKAIMAHGAFEVAKEYITYRYTRSLLRQSNTTDDRILSLIECNNEEVKQENANKNPTINAVQRDYMAGEVSKDITSRILLPKEVVDAHEAGIIHFHDADYYAQHMHNCDLVNLEDMLQNGTVISGTLIEKPHSFSTACNIATQIIAQVASNQYGGQSISLTHLAPFVQVSREKIRKTVEREMAAFGVVPAEETISKVVEDRLREEVRRGVQTIQYQVVTLMTTNGQAPFITVFMYLNEAKSEQEKKDLAMIIEETLRQRYEGVKNEKGVWITPAFPKLIYVLEEDNVREGTPYWYLTRLAAQCTAKRMVPDYISEKKMREYKLSKGETPGHGDVYTCMGCRSFLTPDRSGNGWDNVARAGNYEPGKPKYYGRFNQGVVTINLVDVALSSGRDMTKFWEVFEDRLELCHRALRCRHERLKGTLSDAAPILWQYGALARLPKGEPIDKLLYGGYSTISLGYAGLYECVKYMTGKSHTDDEAKPFALSVMQKMNDKCLQWKTAENIDYSLYGTPLESTTYKFAKCLQKRFGLIPGITDKSYITNSYHVHVTEPIDAFTKLRFEAEFQQLSPGGAISYVEVPNMQNNIDAVLEVMQFIYDNIMYAELNTKSDYCQVCGYDGEIEIKEDDGKLIWVCPQCGNTDQNKMNVARRTCGYIGTQFWNQGRTQEIKDRVLHL

SEQ ID NO: 1005 - protein, 1226 aa, Unknown
  Description of Unknown: uncultivated organism sequence
  Category: MG60 effectors
  Description: MG60-220 effector
MKVIKRNGSEVLYNQQKIKDAVSKANAEVSRVERLSQAQITAIANNVTKIIEQSSHAVSIEDIQNYVEKEIMAMRGYEVAQKYITYRYKRALARQSNTTDERILSIIGLENEEVKQENANKNPTINSTQRDYMAGEVSKDLTTRILLPQDIVDAHNNGLIHFHDADYYAQKMHNCFTGDTKFMTHKGAKRFDSFKDGESVFVRDMHNEIRKATVHIYGEQRVQKVTFKMLGKNKKKTVKCTPNHRWILEDKKVTTALKVGDVLFSNSYSHYEKWKVEKIEFKGIEKVYCVEEPITHSFTLEDGMVTGNCDLINLEDMLQNGTVISGTMIEKPHSFHTACNITTQVIAQVASSQFGGQSFSLAHLVPFVDISRKKIKKEILEENLINKIVESDEIINKKVEFRLKEEIKRGIQTIQYQILTLMTTNGQAPFVTMFLWLDEVEEGQARDDMAMLVEEVLNQRIQGVKNEKGVYITPAFPKVIYLLDEDNIHEDSKYYYLTELAAKCTAKRMVPDYISGKVMRELKEGDIYPCMGCVDGAEVVTYKYLDNVYVESFERMWNRLSNYFKVELQPNKKDFVMKTPGVKIYDHQSGYVDNYGIIKNHTNRWLQISFSNGRVLTCTPDHPFETTDKRIIMAKDLTPNDMINIDTLSNYSSNNLISMKENRAWLYGFALCDSTYYDNFTASIAENSENEIKEFFTNMLLSEYKLETKCIYRNRGEKGKYIDLRAVSNNDNSLMNLKLDFIKAFEGKAKKDRHIPNEVFSWQNSAKLAFLAGMIDADGYLNSSMRLTKIQLGSTNKELAIQQALLAQTCGMPSRIYLNHYKSNCRDMIRYRVEFIPSIDLLKYIKCEKKYSLKDSTIARKNSSISDNDFVTITSVDELEKAGFSYDVTTESEHFTVSGLYSHNCRSFLTVDRTKENLGNAKNYNPNKHKYYGRFNQGVVTINLVDVACSSYGDMNKFWEILDERLELCHRALKERHKRLLGTPSDVAPILWQHGALARLEKGEKIDKLLYDGYSTISLGYAGLYEMCMRMTEKSHTDPEAKPFALAVMQKLNDKCNEWKEKENIDYSLYGTPMESTTFKFARCLQRRFGIIKDVTDHDYITNSYHVNVRENIDAFTKLSFESEFQKLSPGGAISYVEVPNMQDNIPAVLAVLKHIYNNIMYAELNTKSDYCQVCGYEGEIQIVRDKHKKLIWKCPNCGNTDHNKMNTARRTCGYIGTNDFNQGVT

SEQ ID NO: 1006 - protein, 752 aa, Unknown
  Description of Unknown: uncultivated organism sequence
  Category: MG60 effectors
  Description: MG60-221 effector
MIFLLIFIKNTISCGHQQKQTQNIVSKVTSYFFYKLSSLIPMAIKKVIKRNGSEAVYDPEKIRVAIQKANHEVPEDDQASDFLISEIIRSLELAKKWTVPIEEIQDFIEMQLIKMNKAELAKKYIIYRYQRALVRKANTTDDSILTLIHNDNKEVGQENSNKDASIASTQRDLIAWEVSKDLTRRMLLPDDIREAHDEGVLHFHDMDYFIQPIFNCCLVNIKDMFENGTVMNGKLVETPKSFQVACTVMTQIIASVASSQYGGQSVNIKHLGKYLYATKQKYLKKYKESCPELSDEEIQKIVDIRVKDELASWVQTIQYQINTLMTTNGQSPFVTLFLELDEKDEYIQETAEIIEEIFKQRLQGIKNEVWVYVTPAFPKLVYVLDECNILKGGKYDYLTKLAVKCSAKRMYPDYISAKKMREIECGNVFAPMGCRSFLAPWKDENWEYKFEGRFNQWVVTINLPQIWILANHSEEKYFKLLDERLELCRKALMCRHERLKGTVSDISPIHWQYWAIARLKKGEKIDKYLYGWYSTISLGYIGLYESSILITGEPHTTEKWQAFALKVMRTLKAAVTKWKEESGIGFALYGTPAESLCYRFAKIDKKKFGEIKDVTDKWYYTNSYHVDVREHIDALSKLAFEAQFQSISTWGAISYIEMPNMQKNLPALESLVQFMYDNIMYAEFNTKSDYCHCCGFDGEIIVNEDNEWECPQCHNKNQRKMNVTRRTCWYLGENFWNAGKTKEISKRVLHVS

SEQ ID NO: 1007 - protein, 783 aa, Unknown
  Description of Unknown: uncultivated organism sequence
  Category: MG60 effectors
  Description: MG60-222 effector
MMRVVKRDGKIVDFDESRIKIAIGKANNEVDESQRATEEEIEKIVEYVKKVKKDRILVEDIQDIIENKLMEYKRFELAKAYITYRYSRALVRKANTTDQTVKELVEGNSEYWNNENSNKNARVVTTQRDYLAGITSTDITRRLLLPPEIVKAHDEGIIHFHDADYFAQNALTNCCLINLNDMLQNGTVINGVMIEKPHRFVTACTIATQIILGVSSSQYGGCTVTLTHLAPFVRDSYNRSLKKYQDRNLPEEECKKFAMQDTKKEIADGVQTFNYQVNSMTNTNGQAPFLSVNMYLGETDEYKDELAMIIEEFLRQRMLGFKNEKGVYITPAFPKLLYVLEEDNIHKDSKYWYLTELAAKCTAKRMVPDYISEKMMKKLKINQYGEGDCYPCMGCRSFLTPDRVKGNVAKAKDYVEGKGKYYGRFNQGVVTINLPDVALSSKKDEKEFWKIFDERLELCHEALQLRHKRLSGITSDVAPLLWQYGAYARLNKGEKLDKLLHGGYSTLSLGYAGLYECVKYMTGDSHTDGGKGEKFALEVMQHMNDKCAEWKKAEDIDYSLYGTPIESTTYKFAKCLKKRFGTVEGVTDRNYITNSYHVPVFEEIDAFSKLKLESEFQRLSPGGAISYVETPNLQNNIEVVEQIIEFIYNNIMYAELNTKSDCCQKCGYTGEILIDDNLEWYCPNCGNRDHRTLNVARRTCGYIGTNFWNKGRTQEIKERVLHIDNKDFDAEKCTKCDEDVNVVSKCCNDSNESTESDKNVEKHEKKTRAKVSAKEKAMASVHA

SEQ ID NO: 1008 - protein, 1125 aa, Unknown
  Description of Unknown: uncultivated organism sequence
  Category: MG60 effectors
  Description: MG60-223 effector
MLEIVKRDCSKTNFDKQKIFNAIMKAMKSGSGIVKSEIAEKIANEIENEVKSMEEIDIYQIEAMVFQKLIENNQILTAKAYESYRSVREFQRNTTNSTDDAILELLAGQSEYWNEENSNKNAMLITTQRDYMAGIESEDISKRMLLTPEIVHAHENGIIHFHDIDYFAMKAMYNCCLINLEDMLQNGTVISNVLIEKPHSFSTACNVATQIIAQVASSQFGGQTISLSHLAPFIDVSRQKIKKQVEKELINANLTSVEYHNLVDSIVAKRLKEEIKKGVQTIQYQVVTLMTTNGQAPFLSVFMYLNEVKDKQTKHDLAMLIEEVLLQRIQGVKNEKGVWVTPAFPKLLYVLEEDNIHKNSPYYYLTELAAKCTVKRMVPDYISEKKMKECKIDKNGKGQCFPCMGCVDGKEVVTYKYNNDVYTESFERMWDRLSKYFEISKQPNLVDFVMKTHGVKIYDQKAGFVDNYGIIKNHNSEWLRITFSNGRTIMCTPDHPFETTDGRVISAKNLTENDFIEIDKTSSFKTPSIYTMKENRAWLYGFALCDSTYYDGFTASIASVNETEIETNFVNIINDEYGLNTNSINRERGKKGTYKDLRVVSNGDNEYIKLRIELIKAFEGKAKANRHIPNEVFSWTQNAKLAFIAGMIDADGYLNTTAKKAIVQIGSINKELAIQQALLVQTCGMFAKIYHNHYNANHKDKIRYRVEFTPTEKLLSFIKCNKKTDLFNSILKNTKKSIADTNICAITNVEHIHKEGFSYDVTTSSEHFTVSGIYSHNCRSFLSPYLDKNSQPKYYGRFNQGVVTINLADVALSALKEYEESKLNLHNTSVESIFWKILDERLELCHRTLRLRHERLKGTVSDVAPILWQHGAIARLNKGEKIDKLLYNDYSTISLGYAALYECVKAITKHTLTDNGIGEKFGLQVMQRLTDKCNQWKEEENIGYSVYGTPLESTTYKFAKCLRKRFGVIEGITDRDYVTNSYHIPVFENINAFDKLLIESKFQKLSAGGAISYVEVPNLTDNIEIVIQIIQYIYEHIMYAELNTKSDYCHVCGYDKEIEIVTDTNTGKLIWKCPQCGNTDQRKMSVTRRTCGYLGSNFWNQGRTQEIKERVLHIDDMDLNESENV

SEQ ID NO: 1009 - protein, 921 aa, Unknown
  Description of Unknown: uncultivated organism sequence
  Category: MG60 effectors
  Description: MG60-224 effector
MKIVKRNGTEVEFDIKKIINAITKANKTVEEKDKLSIEEIKNISDCVMVRVSQLPVDTNVEVIQDIVEEELDKHNASYTLKRNYMLYRYQHNELRKSNTIDKTILSLIKCENEDIKQENSNKNPVIISTQRDYMAGEVSKDLMRRYFIDPDLMKAHDEGLIHIHDMDYILQNCHNCDLINLEDMLNNGTVISGTAIDKPHSFSTACNIATQIIAQVASSQYGGQSITLSHLAPFVDVSRKAILKELKEEFSSIDDDKLKEVCHRRLLKEINKGVQIIQYQVVTLMTTNGQAPFITVFMYLNECKDEQTKNDLALIIEEVLKQRIIGVKNEKGVYITPAFPKLIYVLQEDNIEKGSKYYYLTELAAKCTAKRMVPDYISEKIMKEMKEGQVYPSMGAVVPESKVYWKIDGKAYYGPIEKMYHSMIDRYDDLEEECQFGQEGNPNKDIDLKDYNIEIYDNGAGKYVKCLMMNMNLASQFRMYKIRTYNPIDDTDINLVVTHDHPMMKLKSGFDPNLVTIDWNDPKDIDNKCEEIQAEYLKTGDYVFFAKEQRGIRTVEIVDQTIPKPVQILKVPIINNYDFVYDVTTESEHFMVNNLWSHNCRSFLRPWKDENGKYKFYGRFNQGVCTINLIDVACSSGKNIEKFWKIFDERLDMCRRVLMIKHNRLLGTVSDVAPILWQNGALARLNKGEKIDKLLYGGYSTISLGYAGLYECVYYMTGKSHTDPSVKDFALSIMQHMNDMCAKWKKETNIGFSVYGTPLESVTYKFAKCLKKRFGEIPEVTDHNYITNSYHCNVREHINAFDKLTMESEFQRLSPGGAISYVEVPNMQNNIPAILQLLKHIYNTIMYAEINTKSDYCHECGYTGEIVIEENEDHKLIWKCPNCGNTDQTKMNVARRTCGYIGTNFWNQGRTQEIKDRVLHL

SEQ ID NO: 1010 - protein, 1019 aa, Unknown
  Description of Unknown: uncultivated organism sequence
  Category: MG60 effectors
  Description: MG60-225 effector
MKIIKRNGEEAIFDYHKIEIAISKANLEAPMKEQLSAETIHNIALNIEKQCQKENHEMNVEDIQDIVEKEIMKAGAFDIAKKYITYRYQHELMRKANSTDSQIMSLLECNNEEVKQENSNKNSTVVSVQRDYMAGEVSKDITKRFLLDEDIVQAHNEGIIHFHDSDYFAQHMHNCLAKETRFITDKGVRSFADFSDGERVTVLTKDGNWKGATVKKYGTQKLYRFTFYNSKKEHTQQVLATENHRWYLADGTVTTALKEGDKLVSAPVLYHQDEDYHSFNENEKLLWCKGFALGDSTVEYLAADTQNNSTRIRLCGEKDSQWLERFSIAGCKVREQVFENGDKSAVVYDYHKEIPAFKNVGEIRAFLNGLYCADGKMAVNNPHSRTYRIQSSNKTVIDFLREYAPVAGLYITAENDLTGENGRPYTILFSFNPDFSFAYTVLSKEFAREDEVWCLEVDDEHNFVLANGIVTGNCDLVNLEDMLQNGTVISGTKIDTPHSFSTACNIATQIIAQVASSQYGGQSISLTHLAPFVDVSRKKIAREMHRMEEETGVYYTEAQFNHIVHERLKDEITRGVQTIQYQVVTLMTTNGQSPFVTVFMYLNEAKDAQTKADLALIIEEVLKQRYQGVKNEAGYWVTPAFPKLIYVLEEDNINEGAPYFYLTELAAKCTARRMVPDYISEKKMKSLKEGNCYPCMGCRSFLTVYRDENGKPKFYGRFNQGVVTINLVDVACSSGGDYDKFWQILDERLKLCYRALMARHRRLLGTPSDVAPILWQNGALARLKKGEVIDKLLYNGYSTISLGYAGLCECVRYMTGKSHTDSEATPFALRVMKTLNEACDKWREKTNIAFSIYGTPMESTTYKFAKCLKRRFGEIEGVTDKNYITNSYHIHVTEKVDAFTKLTFESQFQELSPGGAVSYVEVPNMEGNIPAVIALLKHIYEKIMYAELNTKSDCCQKCGYTGEIRIVTDSENKLVWQCPQCGNTDQSTMNVARRTCGYIGTQFWNQGRTQEIKERVLHL

SEQ ID NO: 1011 - protein, 1020 aa, Unknown
  Description of Unknown: uncultivated organism sequence
  Category: MG60 effectors
  Description: MG60-226 effector
MVVIKRNGERVDFDPRKIEVAILKAFAEVRSESDDDIRECAKRIAHEIESTGKDLSVEEIQDMVEKKLMATKYKNVAKAYVEYRYKHKLIREFNTTDKTIKELLCGESDYWNNENSNKNARVVTTQRDYIAGITSTDIARRLLLPADVVEADDEGIIHFHDKDYFAQLSLHNCFDVTTRFITSNGVKAFSDFNDCDEATVLTHTGEWKRARVRKYGKQDLYRIVLKRGHGKEHIVYATANHRWFLQDGSVTTNLHVGDSLMKTPVIANVNLDDADVFEKQLWCKGFAFGDGQYCKAWDGTKIRLCGHKNKYARIFRAAGYTCTSPGNFENGDQEAHIPRYNKNEIPEMTPAETRYFVYGLLCADGDHPTSKGNTKANEFKGIQVTGEEKNFQVYNLLNIAGYYVSGYTDITGKTNYGERSDVTRRYAIQANQSHCNWKVQAIEYAKTDYVWCLNVEDCHSFVLEGGIVTGNCELVNLEDMLQHGTVLNGVMIRKPHRLLTATTIATQIITAVTSSSYGGCTINLSHLAPFVRDSYNAYVKKYRDRGVDEQTTKEWAELDTKKEIADSVQTFNYQCNSMTNTNGQAPFLSVFMYLNDAPEYQKETAMLIEEFLNQRLLGFQNETGHYVTPAFPKLLYVLDENNITEDSEYWYLTELAAKCTAKRMVPDYMSAKIMRRDKIDKNGNGNVYGCMGCRSFLTPYVDKDGKPKYWGRFNQGVVTINLPDIALSSGGDMEKFWKIFDERMALCHKALRCRHERLALATSDVAPILWQNGALARLPKGSPIHPLLHDGYSTLSLGYAGLYECVKYMTGESHSHGKGKEFGLRVMQTLNDFCKKWKEEESIDYSLYGTPIESTTYKFSKCLKKRFGIIEGITDKDYITNSYHISVREKIDPFEKLAIEAEYQKLSPGGAISYVECADLTQNPTAVLEVMRFIYDNIMYAELNTKSDYCQVCGYDGEIQIIDENGKLSWRCPNCGNEDQTKMNVARRTCGYIGTQFWNQGRTQEIKERYVHIDNHEVGE

SEQ ID NO: 1012 - protein, 1093 aa, Unknown
  Description of Unknown: uncultivated organism sequence
  Category: MG60 effectors
  Description: MG60-227 effector
MMNQEKSIESNIIREDERVILKKGAYEDGEFTETLPADLTDIDDWAFLDARFGGRETIEIPPCVKRIGGAAFAGCDLKYLVIPPSVESIGKDGEEGVFSGSQLENVTLSAQIEELPVWAFCECGKLRRVELPKHLRKIGMSAFYYCYSMEEIRFPEMLERIEEGAFSSCHSLQKIDLPKYLREIGDEAFEHCSSLEEIHLSESLERIGNEAFYSCSSLKEIHLPESLKHIGERAFFRCEQLRRVVFPDHEVLLGKGIFEYCSSELEICNVHVGDRSHCVEGWAYHDMPIKDVTISADVKEIENGAFSLCSRLEAVSFEEPSQLEKIGFSAFCGCKNLNHIQLPDSIRILDDSSFSECESIEQIDLPRGLLRLGNKVFARCKRLKQIIIPQGVQEIGHEMFSLCGSLERVQLPDSVAVISDRMFAYCTSLPEIDLPGNVIEIGNEAFHGCAKLNICIPRSVTKIGFRAFAATALKEVVIPTGVKEIASQTFENCEMLRKVTLPEGLEKIGTRAFASCSALEEIEIPDSVTHIDALAFQNCTALRSIVLSEHTKVEQGPEINSYDVPIDEYRSGVMWTQTEDEDVAAYQELLRRVVSIRPKAWNEEREENKEEKIAFNQEQKRAVEAIQGPVMIISCAGAGKTTVLLERARQMVRMGIAPEKILITTFSRAAAYDMRERFERNADICGVKFSTIHGLCRIILTSAYFYEADVVLSDEEKIRFFMECHSKKNEQDGFVGFYMDISGRISRYIIGHYEQSLPEIENKPELSKLEQDDTFLHLYHAYQAFKKARKKLDYDDLLVETHKCLASNEAIRNHWQGMLDYIMIDEYQDTSRLQAEIFFLLAGKKRNICVVGDDDQSIYAFRGTQKQVFDLFMKKYPDAQKRFLGMNYRSREYIIRAADCLIRHNRNRLEKNLEADRKEPGNILLKKASGRENQAYIVVECIKRLLQSGSNPSDIAILYRIRNESSMVVRLLEEAGIAYDKKESVEEMIQRIVAGGEKHDLQPHEDGHGVVLSTFHAAKGLEWKYVFIISANQGITPLKRLTESVDIEEERRLFYVAVTRAKDTLAILYIENNMASEDNSMQKPSMFLSEMGL

SEQ ID NO: 1013 - protein, 1267 aa, Unknown
  Description of Unknown: uncultivated organism sequence
  Category: MG60 effectors
  Description: MG60-228 effector
MNEQISHLTSYIEALKKISSEAEIRGNFLNLLRKTLIKEDNFEWRTVEQSVHQKGLFVGRIDLSVGRVVFEFKRSLKDKKKRREGIQQLKTYLSSDEFKDAPFGILTDGKTFEVYKLENGELYPVDNFSLPDFEHLPDLSEEEVKALKKFLYKLDAYLLGNLKVPLTSSTIVRFFGYNSQVFAKVYSALREAYERVKDLKEVSLKFNQWKRYMELVYGKNLQDELFFRHTYLSVLIKILSGKLLEVPYDSIWELLSGEVFERFGIKNYVDKDFFGWIFEEEIKNDLDELFEEIDRLLEFKFEMGNLSEELEEDLLKELYQNIVTRGEREILGEYYTPDWLVERILGEVLKDKDIRTLKVLDPACGSGSFLFFAIKRKREENVPLREILSSVIGLDINPLAVLIARSNYLLALGKEFLKNRHEEIFLPVYTADALRVYVSKHTDLYGSKISVELNGFKVEIPIPPKSSDREQDLKITDLYIERIVEWAKEQVPKKEERFVEDFWRWLERNYPEEEKIISPYFAGYSRSFERQILELVRKKGDDIWTFVLKNIYKPLFLKEKFDLIVGNPPWLVYNSMHRGLQKFFEEFLKAYRIKYGGHLKTHLELATAFLVLTAGFYLKPEGEIAFVMPHSLLNGDQNSWFRKSYHSLMAQERNFPTLSLDILKIFDLKEVSPLFNVPSVVIFAKKKNEGFKKEIPATVFKGKLPKRNARFGEAQKYLTEIDKTLYFVETGKVNYWVYDPQRLGVSPYKNHFREGATIVPRSFWFVEIEKSPYGFSEKSIPIRSKKLGDEKVEFELRGNVPKRFFFKTLLSKRLYPFGFTEFDLVVLPLKITSKEEEELKELKEEIDTVYRWLREYKATGKDYEDLFAKTVNLASSITEFVQNPEYTEKSKKELLDYLLRFKELLTDEATYFCSNPDLPSYYWWESENADFSKPYEVLKHVKSATKPEKFYKLLDYYDFRNKVSIGECPNCGEILDRKPEKVFKCPNCGFEVNLSSAGDILKKWVNLSREVPKPFKDWLLEAQELWEKHRGEKADKDNIIDWLNYRNKLTNQPVEGGYLVLYTTSGSNLAALWIKNSPKFVIDTKTFFGLFETLEEAIYVSTLLNSPLISHKVKEYQSKGLFGARDFHKVIFNLPIPPYDPADPLHQKLVIFGKKARKKAMHPVIRNWLKGVHPNRIRTLGRWVVENELKEIDKLVAQLLELDVNLSFPKKDFRFFKTEKEAKKWIKENKERIDNEKVYPAKVLAVKYEIPFSKIAEFEVGVEFESV

SEQ ID NO: 1014 - protein, 755 aa, Unknown
  Description of Unknown: uncultivated organism sequence
  Category: MG60 effectors
  Description: MG60-229 effector
MHELIEKREPKEEKPMKIIKRNGAEVVFDIDKIIMAVTKANDAVDEKVRMTPLQIERISQSVQIACEEMGRSPSVEEIQDLVEKAIMAHGAFEVAKEYITYRYTRSLLRQSNTTDDRILSLIECNNEEVKQENANKNPTINAVQRDYMAGEVSKDITSRILLPKEVVDAHEAGIIHFHDADYYAQHMHNCDLVNLEDMLQNGTVISGTLIEKPHSFSTACNIATQIIAQVASNQYGGQSISLTHLAPFVQVSREKIRKTVEREMAAFGVAPAEETISKVVEDRLREEVRRGVQTIQYQVVTLMTTNGQAPFITVFMYLNEAKSEQEKKDLAMIIEETLRQRYEGVKNEKGVWITPAFPKLIYVLEEDNVREGTPYWYLTRLAAQCTAKRMVPDYISEKKMREYKLSKGETPGHGDVYTCMGCRSFLTPDRSGNGWDNVARAGNYEPGKPKYYGRFNQGVVTINLVDVALSSGRDMTKFWEVFEDRLELCHRALRCRHERLKGTLSDAAPILWQYGALARLPKGEPIDKLLYGGYSTISLGYAGLYECVKYMTGKSHTDDEAKPFALSVMQKMNDKCLQWKTAENIDYSLYGTPLESTTYKFAKCLQKRFGLIPGITDKSYITNSYHVHVTEPIDAFTKLRFEAEFQQLSPGGAISYVEVPNMQQNLDAVLEVMKFIYDHIMYAELNTKSDYCQVCGYDGEIEIKEDDGKLIWVCPQCGNTDQNKMNVARRTCGYIGTQFWNQGRTQEIKDRVLHL

SEQ ID NO: 1015 - protein, 756 aa, Unknown
  Description of Unknown: uncultivated organism sequence
  Category: MG60 effectors
  Description: MG60-230 effector
MQQSIFDVCVIIGLWFKKKRRSEVFTMKVIKRDGHIVDYSPDKIEEAVSKANLEVSEEDRVSDIQIRNIIKYIEGLHKKRMLVEDIQDVIEKRLMTLGKYELAKEYITYRYTRELVRRSNTTDKSIKELIDGESEYWNTENSNKNAKVVTTQRDYLAGITSTDITRRFLLPEDIVTAHDQGVIHFHDADYFAQNALHNCDLINLDDMLQNGTNINGVMIEKPHRFLTAMTIATQLITAVSSSQYGGCTITLTHLAPFVRSSKEFYLKKYKDRKLTKAQVEKFAAEDLKKEITDGVQTFQYQINSMTTTNGQAPFLSVCMYLGETEEYKDELAMIIEEVLKQRMEGMKNEKGVYITPAFPKLLYVLEEENINPKGKYYYLTELAARCTAKRMVPDYISEKVMKENKINSLGNGECFPCMGCRSFLTPDRMFNVGNISKALNYVENKGKYYGRFNQGVVTINLPDVALTSGKDMELFWKVFDDRLELCHRALQIRHKRLSKVTSDVAPILWQHGALARLEKGESIHELLHHGYSTISLGYAGLYECVKYMTGHSHTDNGKGHEFALEVMQHMNDKCNEWKEAEDIDYSLYGTPIESTTYKFAKCLRDRFGKIKGITDRDYITNSYHVPVFEEIDAFTKLKLESEFQRLSPGGAISYIETPNLENNIDVVMEVINFIYENIMYAELNTKSDYCQKCGYNGEILLDDDLEWYCPECGNRDHDTLNVARRTCGYIGTNFWNKGRTQEIKERVVHIDNKDDE

SEQ ID NO: 1016 - protein, 768 aa, Unknown
  Description of Unknown: uncultivated organism sequence
  Category: MG60 effectors
  Description: MG60-231 effector
MFCSCKKNLRVVIYIYDATKTYDCAKKLIVYKSIIKGAEVMKIIKRNGAEETFDRQKIKDAIAKANNETDGTPELTDRQIDYISLVIEDHCNEMNRALSVEEIQELVETHIILQGAPETAKRYIRYRFTRNLARASNTTDNQILSLIECNNEEVKQENSNKNPTVNSVQRDYMAGEVSKDLTKRILLPEDIVKAHEEGLIHFHDADYFAQHMHNCDLVNLEDMLQNGTVISGTMIEKPHSFSTACNIATQIIAQVASNQYGGQSISLAHLAPFVQISREKITRQVRAEMEEFGIDADDEQVKSLVEKRVRDEIKRGVQTIQYQVVTLLTTNGQAPFVTVFMYLNEAKNEQEKKDLAIIIEEVLKQRIKGTKNEVGVWVTPAFPKLIYVLEEDNITEDSRFWYLTKLAAECTAKRMVPDYISEKIMLKLKIDKNGNGNCYTCMGCRSFLTPYIDENGKPKYYGRFNQGVVTINLVDVACTAARDGNKSEEKFWQVLDERLELCHRALQCRHERLEGTLSDAAPILWQYGALARLKKGEPIDKLLHGGYSTLSLGYAGLWECVYEITGKKLTEKEGEEFGLRVMQRLNDACAEWKAAENIDYSIYGTPLESTTYKFAKCLQNRFGIIKGVTDRNYITNSYHIHVTEKIDAFSKLELESKFQKLSPGGAISYVEVPNMQQNIPAVLEVMKFIYNNIMYAELNTKSDYCQVCGYDGEIQIVEEDGKLVWRCPNCGNEDQSKMNVARRTCGYIGSQFWNQGRTQEIKERVLHL

SEQ ID NO: 1017 - protein, 768 aa, Unknown
  Description of Unknown: uncultivated organism sequence
  Category: MG60 effectors
  Description: MG60-232 effector
MFCSCKKNLCVVIYIYNATKTYGCAKKLIVYKSIIKGAEVMKIIKRNGAEETFDRQKIKDAIAKANNETDGTPELTDRQIDYISLVIEDHCNEMNRALSVEEIQELVETHIILQGAPETAKRYIRYRFTRNLARASNTTDNQILSLIECNNEEVKQENSNKNPTVNSVQRDYMAGEVSKDLTKRILLPEDIVKAHEEGLIHFHDADYFAQHMHNCDLVNLEDMLQNGTVISGTMIEKPHSFSTACNIATQIIAQVASNQYGGQSISLAHLAPFVQISREKITRQVRAEMEEFGIDADDEQVKSLVEKRVRDEIKRGVQTIQYQVVTLLTTNGQAPFVTVFMYLNEAKNEQEKKDLAIIIEEVLKQRIKGTKNEVGVWVTPAFPKLIYVLEEDNITEDSRFWYLTKLAAECTAKRMVPDYISEKIMLKLKIDKNGNGNCYTCMGCRSFLTPYVDENGKPKYYGRFNQGVVTINLVDVACTAARDGSKSEEKFWQVLDERLELCHRALQCRHERLEGTLSDAAPILWQYGALARLKKGEPIDKLLHGGYSTLSLGYAGLWECVYEITGKKLTEKEGEEFGLRVMQRLNDACAEWKAAENIDYSIYGTPLESTTYKFAKCLQNRFGIIKGVTDRNYITNSYHIHVTEKIDAFSKLELESKFQKLSPGGAISYVEVPNMQQNIPAVLEVMKFIYNNIMYAELNTKSDYCQVCGYDGEIQIVEEDGKLVWRCPNCGNEDQSKMNVARRTCGYIGSQFWNQGRTQEIKERVLHL

SEQ ID NO: 1018 - protein, 757 aa, Unknown
  Description of Unknown: uncultivated organism sequence
  Category: MG60 effectors
  Description: MG60-233 effector
MKVVKRDGTIVDFDEERIRTAISKANNEVEKDEVATEKEIEEIVDYVKHLKKKRILVEDIQDLIENKLMEFKRFSLAREYITYRYNRALIRKANTTDQSIKELIDGTSEYWNSENSNKNAKIVTTQRDYLAGITSTDITRRLLLTPEIVKAHDEGIIHFHDADYFAQNALNNCCLINLNDMLQNGTVINGMMIEKPHRFITACTIATQIILGVSSSQYGGCTVTLTHLAPFVRDSYNRHLKRYEDRNLPHKKAKEYAMQDTKKEIADGVQTFNYQVNSMTNTNGQAPFLSVNMYLGETEEYKEELAMIIEEFLNQRILGFKNEKGVYITPAFPKLLYVLEEDNIHKDSKYWYLTELAAKCTAKRMVPDYISEKMMKQLKINQYGEGDCYPCMGCRSFLTPDRVKGNLSKAKDYVEGKGKYYGRFNQGVVTINLPDVALSSKQNMDEFWKIFDERLELCHKALQLRYKRLSMITSDAAPLLWQHGAFARLGKGEKILPLLHNGYSTLSLGYAGLYECVKYMTGKSHTDGNEGENFGLEVMQHMNDKCAEWKAAEDIDYSLYGSPIESTTYKFAKCLKNRFGTVKGITDRNYITNSYHVPVFEEIDAFSKLKLESKFQRLSPGGAISYVETPNLQNNIEAVEEIIEFIYNNIMYAEINTKSDYCQKCGFDGEILTDENLEWYCPNCGNRDHDTLNVARRTCGYIGTNFWNKGRTQEIKERVLHVDNKDYEAPHAHCEHENCECEEKVKEDVKVGVQIQF

SEQ ID NO: 1019 - protein, 804 aa, Unknown
  Description of Unknown: uncultivated organism sequence
  Category: MG60 effectors
  Description: MG60-234 effector
MNQGSPLVSIIVRTKDRPHLLKEALESIEVQTYRPLEVVLVNDGGCALPKEVYEALLKDIPLQWIDLEENQGRARAGNKGIEAARGDYIGFLDDDDRFLPHHVELLVACLEGWDYKVCYSDAEICQRVFDPSQKVYEIKDCRPFASRDFDLLDLLLENFIPLPCILFTRRCLLEAGGFDPTFELYEDWDLLLRIGNLHPFYHVPEVTVRYIQWSQKLQIAQGEYHQGLQQISYGRIIEKHRQLLTPEMAKAILRVFKDLERTQARLNQVTDECKMLEKALREEREKEKHLTGRIRQLSERIESLTHEQRKLQESHQEVLKEKRSLEHQLALIRGSRAWRFIQRYGRLRNALRSSLKPFKGKRIEHLQKGLRVVKTEGVKGLQRRVSQYVTLPSVKRGIYPYVPVDGKEVSLGRIAEDLPLSVTVIIPTRNAGPEFGRTLKKIRNQEGLKDLEILVIDSGSHDKTLDMAREAGARVLEISPEEFHHAGTRNLAAQHARGDVLVFTVQDATPAGDDWLYRLVQPIQQGKADAVSARQIPRTDADLFARWATWGYFEYLGYAEDTVRQGVDARRMDIHQRRRLFHLDSVCLAIPKGLFERYPFQRAYAEDLDLGKRLFERGHALLAQVSNAVIHSHNRPADYFFLREYVNVKSLQAILGQCPEPRPLKEILSTLAWAYDQFCAEVGPWMEAMGKEHKPPSEAMGQLMARLREAFKRGERRVSPGERDPLLYRWLNEDGECQAHVLKVLEGRFLGVLGSLREYLSSHSDWGFPLPEVAVALHKCFAVAAGGAVAEMGGELPSKLIKGI

SEQ ID NO: 1020 - protein, 763 aa, Unknown
  Description of Unknown: uncultivated organism sequence
  Category: MG60 effectors
  Description: MG60-235 effector
MMRVVKRDGKIVDFDESRIKMAIGKANNEVDESQRATEEEIEKIVEYVKKIKKDRILVEDIQDIIENKLMEYKRFELAKAYITYRYSRALVRKANTTDQTVKELVEGNSEYWNNENSNKNARVVTTQRDYLAGITSTDITRRLLLPPEIVKAHDEGIIHFHDADYFAQNALTNCCLINLNDMLQNGTVINGVMIEKPHRFVTACTIATQIILGVSSSQYGGCTVTLTHLAPFVRDSYNRSLKKYQDRNLPEEECKKFAMQDTKKEIADGVQTFNYQVNSMTNTNGQAPFLSVNMYLGETDEYKDELAMIIEEFLKQRMLGFKNEKGVYITPAFPKLLYVLEEDNIHKDSKYWYLTELAAKCTAKRMVPDYISEKMMKKLKINQYGEGDCYPCMGCRSFLTPDRVKGNVAKAKDYVEGKGKYYGRFNQGVVTINLPDVALSSKKDEKEFWKIFDERLELCHEALQLRHKRLSGITSDVAPLLWQYGAYARLNKGEKLDKLLHGGYSTLSLGYAGLYECVKYMTGDSHTDGGKGEKFALEVMQHMNDKCAEWKKAEDIDYSLYGTPIESTTYKFAKCLKKRFGTVEGITDRNYITNSYHVPVFEEIDAFSKLKLESEFQRLSPGGAISYVETPNLQNNIEVVEQIIEFIYNNIMYAELNTKSDYCQKCGYTGEILIDDNLEWYCPNCGNRDHRTLNVARRTCGYIGTNFWNKGRTQEIKERVLHIDNKDFDAEKCTKCDENVEKPEKKTRAKVSAKEKAMASVHA

SEQ ID NO: 1021 - protein, 781 aa, Unknown
  Description of Unknown: uncultivated organism sequence
  Category: MG60 effectors
  Description: MG60-236 effector
MIISGTRYCVFALHKQQYLVWFVKYRKINANYVEIIEVPYRGVFNMENRDQMSEIHVKTNVIKRNGQEVSFDISKIINAIGKANKEVESIHQMNEFQIRAVADMIAKRIASFPHAVNVEDIQDMVEKGIMEMRGYEVAQKYVRYRYKREISRKSNTTDDGILSLIDLSNEEVKQENSNKNPVINSTQRDYMAGEVSKDLTKRLLLPEDIVKAHEEGIIHFHDADYFAQREHNCDLINLEDMLQNGTVISQTLIEKPHSFFTACNVTTQIVAQVASNQYGGQSFTLAHLAPFVDVSRKKITKEVMEERKETGESMDPGIIEKIVERRLKEEIKSGIQTIQYQLITLMTCNGQAPFVTMFMYLDEVPDGQTRKDLAMIIEEVLRQRMQGVKNEKGVWITPAFPKLIYVLDEDNIHDDSPYYYLTKLAAECTAKRMVPDYISAKIMKQMKNGDVYPCMGCRSFLTPDTEGLGPKGQHKYYGRFNQGVVTINLVDVACSSGGDMDKFWKILEDRLELCHRALRCRHERLLGTVSDVAPILWQYGALARLKKGETIDKLLFNNYSTISLGYAGLYEMCVRMLGVSHTTEEGRKFALAVMQKLNDKCAEWRKKENISYSVYGTPMESTTYKFAKCLQKRFGIIPGVTDKNYITNSYHVHVTEKIDAFHKLKFESEFQKLSPGGAISYIEVPNMQTNIPAVLTVMKYIYENIMYAELNTKSDYCMVCGYDGEIKIVEDENGKLVWECPNCGNRDQHKMSVARRTCGYIGTQFWNQGRTQEIKDRVLHL

SEQ ID NO: 1022 - protein, 772 aa, Unknown
  Description of Unknown: uncultivated organism sequence
  Category: MG60 effectors
  Description: MG60-237 effector
MLQGSFLLYMESRILNELKDIPEQKLVVGPIVQQLIQGGWKFEQLIFGKNEWKIPKTPSEASKREKGHSFDYFPVDIAVFDTPENCGDYRHILFIIECKQPTVEVGLQQLETYLSLEPHAKLGIWANNPESASEALYVYKNAKGLSLPQKGTIKQLPSISSSLSPNSEALCFDNMVIPSKDILYHAFSDLLDKVVAQDGNVTRREEQLDQLCNLVLLKLDSDKQGKIDTTSEVYFRPFATDSATASFIKEKFASFIDVYPDIFVSKSDQELRFDDTTIHEVVERLCRFNLIDISADTVSIAFQVLRSAALKQEEGQYFTPKQVIQAAIKLMDVSLSDIIIDPACGTGGFLIQSLIEMKDRYPNQEKEISRWAQLHIYGIDKDAIGIKLTKAIMQILNDGSAHCVRGDSVLTHTWKNKYQHLLSNQFKNGRFTKIFTNPPFGTNLKIKYSEAKKSGLSLLEYVETGKDIELGLLMFNRCYDLLKEGGRLCIVLPETYFFSPSYKYVRDWAFTRMKPICVANVPMDAFQGFCRAKTNLYIFEKLPSDFSGYTGSEEVLFLNPSTCGIYKNGSDRFVVDAQGKRTDVIDNKLLDCSIQVANGDLSNAFSVPLQKVIASDVLVPQYYDLSLQSPFETLTDKLNVQSISIGDLIDSGIISLFNGHGSPSNDLRNGCIPYVKVSDIRNLRINVNPTNLIPLELATKFWKSDHSNLKEWDLISPSRASSNIGEFAILLPGEENIVLTKEVFIIRVNPNSLGIDAFYLLWALSLMQTRKQ

SEQ ID NO: 1023 - protein, 769 aa, Unknown
  Description of Unknown: uncultivated organism sequence
  Category: MG60 effectors
  Description: MG60-238 effector
MKVIKRDGTIVEYDREKIRIAIEKANKEVSRKEKATDSEIEEIMSYIEDLKKGRILVEDIQDIIEEKLMEIKRYELAKKYITYRYTRALVRKANTTDQSIKELIEGESEYWNNENANKNARVVTTQRDYLAGITSTDITRRFLLPEDVVKAHDEGIIHFHDADYFAQNALTNCELINLEDMLQNGTIMNGVMIEKPHRFITACTIATQIILAVTSSTYGGATVSLAHLAPFVRSSYEKYYKKYKDNGLSKEQCEKFAKEDTKKEVADGVQTFNYQVNSMTNTNGQAPFLSVCMYLGETDEYKEELAMIIEEFLNQRILGFKNEKGVYITPAFPKLLYVLEEDNIHENSKYWYLTELAAKCTAKRMVPDYISEKKMKELKVDKNGDGQCYPCMGCRSFLTPYIDPVTNKPKYYGRFNQGVVTINLVDVALSSGKDLKKFWKIYDERLELCHKALQARHERLAKATSDIAPILWQHGAFARLPKGASIHPLLHGGYSTISLGYAGLYECVKYMTGKSHTDNGDGKDFAIEVMKKLNEKCQEWKEAEDIDYSVYGTPIESTTYKFAKCLQKRFGKIKGITDKNYITNSYHVPVFEEIDAFSKLKLESEFQRLSPGGAISYVETPNLQNNLEVVLQIMKFIYDNIMYAELNTKSDYCQKCGYTGEILIDDNLEWYCPNCGNRDHNTLNVARRTCGYIGSNFWNKGRTQEIKERVLHIDNKDDDCDCDECNCDHANTDTSKEEKSEEKQMNFMDYDVEEEITKSKKRMKQPAMV

SEQ ID NO: 1024 - protein, 768 aa, Unknown
  Description of Unknown: uncultivated organism sequence
  Category: MG60 effectors
  Description: MG60-239 effector
MFCSCKKNLCVVIYIYNATKTYDCAKKLIVYKSIIKGAEVMKIIKRNGAEETFDRQKIKDAIAKANNETDGTPELTDRQIDYISLVIEDHCNEMNRALSVEEIQELVETHIILQGAPETAKRYIRYRFTRNLARASNTTDNQILSLIECNNEEVKQENSNKNPTVNSVQRDYMAGEVSKDLTKRILLPEDIVKAHEEGLIHFHDADYFAQHMHNCDLVNLEDMLQNGTVISGTMIEKPHSFSTACNIATQIIAQVASNQYGGQSISLAHLAPFVQISREKITRQVRAEMEEFGIDADDEQVKSLVEKRVRDEIKRGVQTIQYQVVTLLTTNGQAPFVTVFMYLNEAKNEQEKKDLAIIIEEVLKQRIKGTKNEVGVWVTPAFPKLIYVLEEDNITEDSRFWCLTKLAAECTAKRMVPDYISEKIMLKLKIDKNGNGNCYTCMGCRSFLTPYVDENGKPKYYGRFNQGVVTINLVDVACTAARDGSKSEEKFWQVLDERLELCHRALQCRHERLEGTLSDAAPILWQYGALARLKKGEPIDKLLHGGYSTLSLGYAGLWECVYEITGKKLTEKEGEEFGLRVMQRLNDACAEWKAAENIDYSIYGTPLESTTYKFAKCLQNRFGIIKGVTDRNYITNSYHIHVTEKIDAFSKLELESKFQKLSPGGAISYVEVPNMQQNIPAVLEVMKFIYNNIMYAELNTKSDYCQVCGYDGEIQIVEEDGKLVWRCPNCGNEDQSKMNVARRTCGYIGSQFWNQGRTQEIKERVLHL

SEQ ID NO: 1025 - protein, 768 aa, Unknown
  Description of Unknown: uncultivated organism sequence
  Category: MG60 effectors
  Description: MG60-240 effector
MFCSCKKKLCVVIYIYNATKTYDCAKKLIVYKSIIKGAEVMKIIKRNGAEETFDRQKIKDAIAKANNETDGTPELTDRQIDYISLVIEDHCNEMNRALSVEEIQELVETHIILQGAPETAKRYIRYRFTRNLARASNTTDNQILSLIECNNEEVKQENSNKNPTVNSVQRDYMAGEVSKDLTKRILLPEDIVKAHEEGLIHFHDADYFAQHMHNCDLVNLEDMLQNGTVISGTMIEKPHSFSTACNIATQIIAQVASNQYGGQSISLAHLAPFVQISREKITRQVRAEMEEFGIDADDEQVKSLVEKRVRDEIKRGVQTIQYQVVTLLTTNGQAPFVTVFMYLNEAKNEQEKKDLAIIIEEVLKQRIKGTKNEVGVWVTPAFPKLIYVLEEDNITEDSRFWYLTKLAAECTAKRMVPDYISEKIMLKLKVDKNGNGNCYTCMGCRSFLTPYVDENGKPKYYGRFNQGVVTINLVDVACTAARDGNKSEEKFWQVLDERLELCHRALQCRHERLEGTLSDAAPILWQYGALARLKKGEPIDKLLHGGYSTLSLGYAGLWECVYEITGKKLTEKEGEEFGLRVMQRLNDACAEWKAAENIDYSIYGTPLESTTYKFAKCLQNRFGIIKGVTDRNYITNSYHIHVTEKIDAFSKLELESKFQKLSPGGAISYVEVPNMQQNIPAVLEVMKFIYNNIMYAELNTKSDYCQVCGYDGEIQIVEEDGKLVWRCPNCGNEDQSKMNVARRTCGYIGSQFWNQGRTQEIKERVLHL

SEQ ID NO: 1026 - protein, 778 aa, Unknown
  Description of Unknown: uncultivated organism sequence
  Category: MG60 effectors
  Description: MG60-241 effector
MLHCLKKCAAGNGWDRSERIENSEQHRETGKAQGENTMKIIKRNGAEETFRIEKIIVAITKANNAAEEAERLTPLQIDRIAQAVEIRCEEMNRSLSVEEIQDLVEDQIMAHGAFEVAKRYITYRYTRSLVRQSNTTDDRILSLIECNNEEVKQENANKNPTINAVQRDYMAGEVSKDITRRILLPRDIVEAHEAGIIHFHDADYYAQHMHNCDLVNLEDMLQNGTVISGTLIEKPHSFSTACNIATQIIAQIASNQYGGQSISLTHLAPFVDVSRRKIRESVVREIRELGAEAAEERISKIVEERLREEIKRGVQTIQYQVVTLMTTNGQAPFITVFMYLGEARNPQEKHDLAIIIEETLRQRYQGVKNEKGVWITPAFPKLIYVLEEDNIHEDSKYFYLTRLAAECTARRMVPDYISEKKMRELKLSKGETPGNGDVYTCMGCRSFLTPDSSGNGWDNVANAGNYEPGKPKYYGRFNQGVVTLNLVDVALSSGKEMDKFWKIFDERLDLCYRALMCRHERLKGTLSDAAPILWQYGALARLPKGEPIDKLLYNGYSTISLGYAGLYECVKYMTGKSHTDPSATPFALDVMRYLNAACAKWRAETHIDFSLYGTPLESTTYKFAKCLQKRFGIVPGVTDKSYITNSYHIHVTEKINAFDKLAFESQFQALSPGGAISYVEVPDMQNNIDAVLEVMKFIYDNIMYAELNTKSDYCQVCGYDGEIEVLEDTDGKLVWTCPNCGNTDQSKMNVARRTCGYIGTQFWNQGRTQEIKERVLHL

SEQ ID NO: 1027 - protein, 763 aa, Unknown
  Description of Unknown: uncultivated organism sequence
  Category: MG60 effectors
  Description: MG60-242 effector
MYIQPIITVSDTTHKFNFVKLFFQKNKNSLRDVRRGNGMKIIKRNGEEVVFDLKKIITAISKANNEVPPSEQLAGSTINSIAENIEKQCAAENHEMNVEAIQDLVEKAIMKAGAFDIAKKYITYRYQHQLMRRANSTDSQILSLLECNNEEVKQENSNKNSTVVSVQRDYMAGEVSKDITKRFLLDEDIVKAHDEGLIHFHDADYFAQHMHNCDLVNLEDMLQNGTVISGTKIDTPHSFSTACNIATQIIAQVASSQYGGQSISLAHLAPFVEVSRKKFQRETMRVEEQTGVKFTDEQFKKIVEMRIRDEITRGVQTIQYQVVTLMTTNGQSPFITVFMYLNEAKNEQEKADLAMIIEEMLKQRYQGVKNEKGFWVTPAFPKLIYVLEPDNIEPGSKYYSLTELAAKCTARRLVPDYISEKKMLELKVDANGKGNCYPCMGCRSFLTPYLDEHGKPKYYGRFNQGVVTINLVDVACSSNGDYKSFWEIFDERLELCHKALMRRHQRLLGTPSDVAPILWQHGALARLEKGEKIDKLLFGGYSTISLGYAGLCECVRYMTGKPHTDPSATPFAIEIMKHLNEKCAEWKAASNIAFSLYGTPLESTTYKFAKCLKKRFGEIPGVTDKNYITNSYHVHVTEQMDAFTKLSFESQFQELSPGGAVSYVEVPNMENNIPAVMTLLKHIYENIMYAELNTKSDCCQKCGYTGEIQIVTDSDNKLVWQCPNCGNKDQATMNVARRTCGYIGTQYWNQGRTQEIKERVLHL

SEQ ID NO: 1028 - protein, 768 aa, Unknown
  Description of Unknown: uncultivated organism sequence
  Category: MG60 effectors
  Description: MG60-243 effector
MFCSCKKNLCVVIYIYNATKTYDCAKKLIVYKSIIKGAEVMKIIKRNGAEETFDRQKIKDAIAKANNETDGTPELTDRQIDYISLVIEDHCNEMNRALSVEEIQELVETHIILQGAPETAKRYIRYRFTRNLARASNTTDNQILSLIECNNEEVKQENSNKNPTVNSVQRDYMAGEVSKDLTKRILLPEDIVKAHEEGLIHFHDADYFAQHMHNCDLVNLEDMLQNGTVISGTMIEKPHSFSTACNIATQIIAQVASNQYGGQSISLAHLAPFVQISREKITRQVRAEMEEFGIDADDEQVKSLVEKRVRDEIKRGVQTIQYQVVTLLTTNGQAPFVTVFMYLNEAKNEQEKKDLAIIIEEVLKQRIKGTKNEVGVWVTPAFPKLIYVLEEDNITEDSRFWYLTKLAAECTAKRMVPDYISEKIMLKLKIDKNGNGNCYTCMGCRSFLTPYVDENGKPKYYGRFNQGVVTINLVDVACTAARDGSKSEEKFWQVLDERLELCHRALQCRHERLEGTLSDAAPILWQYGALARLKKGEPIDKLLHGGYSTLSLGYAGLWECVYEITGKKLTEKEGEEFGLRVMQRLNDACAEWKAAENIDYSIYGTPLESTTYKFAKCLQNRFGIIKGVTDRNYITNSYHIHVTEKIDAFRKLELESKFQKLSPGGAISYVEVPNMQQNIPAVLEVMKFIYNNIMYAELNTKSDYCQVCGYDGEIQIVEEDGKLVWRCPNCGNEDQSKMNVARRTCGYIGSQFWNQGRTQEIKERVLHL

SEQ ID NO: 1029 - protein, 768 aa, Unknown
  Description of Unknown: uncultivated organism sequence
  Category: MG60 effectors
  Description: MG60-244 effector
MFCSCKKKLCVVIYIYNATKTYDCAKKLIVYKSIIKGAEVMKIIKRNGAEETFDRQKIKDAIAKANNETDGTPELTDRQIDYISLVIEDHCNEMNRALSVEEIQELVETHIILQGAPETAKRYIRYRFTRNLARASNTTDNQILSLIECNNEEVKQENSNKNPTVNSVQRDYMAGEVSKDLTKRILLPEDIVKAHEEGLIHFHDADYFAQHMHNCDLVNLEDMLQNGTVISGTMIEKPHSFSTACNIATQIIAQVASNQYGGQSISLAHLAPFVQISREKITRQVRAEMEEFGIAADDEQVKSLVEKRVRDEIKRGVQTIQYQVVTLLTTNGQAPFVTVFMYLNEAKNEQEKKDLAIIIEEVLKQRIKGTKNEVGVWVTPAFPKLIYVLEEDNITEDSRFWYLTKLAAECTAKRMVPDYISEKIMLKLKVDKNGNGNCYTCMGCRSFLTPYVDENGKPKYYGRFNQGVVTINLVDVACTAARDGSKSEEKFWQVLDERLELCHRALQCRHERLEGTLSDAAPILWQYGALARLKKGEPIDKLLHGGYSTLSLGYAGLWECVYEITGKKLTEKEGEEFGLRVMQRLNDACTEWKAAENIDYSIYGTPLESTTYKFAKCLQNRFGIIKGVTDRNYITNSYHIHVTEKIDAFSKLELESKFQKLSPGGAISYVEVPNMQQNIPAVLEVMKFIYNNIMYAELNTKSDYCQVCGYDGEIQIVEEDGKLVWRCPNCGNEDQSKMNVARRTCGYIGSQFWNQGRTQEIKERVLHL

SEQ ID NO: 1030 - protein, 927 aa, Unknown
  Description of Unknown: uncultivated organism sequence
  Category: MG60 effectors
  Description: MG60-245 effector
MTKELSGVRVIELKTDLRKDQFWDRYERCFKTYHALYNEVPCWGLDWVEQKTQNQTSRELGCERVDLTAQRKALYERTDRTISYEQFSNCLKALWLGLLNCQQGNHMYTKLFEGAIQTDQMTAEDWAVLTEYVADPKSHNSQFLFRVSNTLKHIGFFSRPPFTATLFAPERKAITKDVMSDLKGWIEMKRMTEESYAAEEVQIQQMKAEVPVRIRQSLLRFFDTCIGLNLIGHFDERVHHYLRDCIIPALQQRTIPTEHFYLKSNRKDVGQKHIDFSLDIKFYELLAEMPELWNTLETSEDDLIPKPLILKHLHLLEAIMSHRAHRKTAAYAFVGEADYHRFYYLLGGNYTKHLISATGSELPDRVIWDNDKDVLMRNGRKVERLYVKVGDRKENFNFEVYTIAMNTKGLRGHRSTLKPTSYLQDLQIWSNPEGESTYLNFVRKGTERSAICKEPVLVYRNGAFFLRLSMSVEGMRASEEHIALQYYLSAAATGSDLSKDTEKTVERFNLIQGKTYKVMSVDLGIRSPFAWAVTESTITGVANPSQILNSGEMEIADDPDYTELFYAYKNLGHLIGQVKSSSKGKGLKADSHLVDMIHTVQRFFADYKVAGQRRSQIFEQFSKDPDPLYQMDQMMKRYENNLESVKKDFSFLINILFKYVTLQFGALRNRRRSYLSQNQMADQKFDQDFKWLNILEQRKRVTRSLSYLGTDNSRIPICLEQQKLDYNGCKDNFLKQLASKIVRIAHQNDCCLIVLEDLEGYGKTLNQRDENFLTAFWSPKRVKDAIINAAQWYGIGVVTVSEAQTSQVHHESGRIGYRKGRDLFFLTPDGQIESVPSDINAAKNIGHRFFSRHTDLHQVYLKGSDEGAKRMKGCLLYQFGSLEAARTHLTGTGPTWYLDGVEWIDKTERNLRRDLLKQRVEIEKMPF

SEQ ID NO: 1031 - protein, 768 aa, Unknown
  Description of Unknown: uncultivated organism sequence
  Category: MG60 effectors
  Description: MG60-246 effector
MFCSCKKNLRVVIYIYNATKTYDCAKKLIVYKSIIKGAEVMKIIKRNGAEETFDRQKIKDAIAKANNETDGTPELTDRQIDYISLVIEDHCNEMNRALSVEEIQELVETHIILQGAPETAKRYIRYRFTRNLARASNTTDNQILSLIECNNEEVKQENSNKNPTVNSVQRDYMAGEVSKDLTKRILLPEDIVKAHEEGLIHFHDADYFAQHMHNCDLVNLEDMLQNGTVISGTMIEKPHSFSTACNIATQIIAQVASNQYGGQSISLAHLAPFVQISREKITRQVRAEMEEFGIDADDEQVKSLVEKRVRDEIKRGVQTIQYQVVTLLTTNGQAPFVTVFMYLNEAKNEQEKKDLAIIIEEVLKQRIKGTKNEVGVWVTPAFPKLIYVLEEDNITEDSRFWYLTKLAAECTAKRMVPDYISEKIMLKLKIDKNGNGNCYTCMGCRSFLTPYVDENGKPKYYGRFNQGVVTINLVDVACTAARDGSKNEEKFWQALDERLELCHRALQCRHERLEGTLSDAAPILWQYGALARLKKGEPIDKLLHGGYSTLSLGYAGLWECVYEITGKKLTEKEGEEFGLRVMQRLNDACAEWKAAENIDYSIYGTPLESTTYKFAKCLQNRFGIIKGVTDRNYITNSYHIHVTEKIDAFSKLELESKFQKLSPGGAISYVEVPNMQQNIPAVLEVMKFIYNNIMYAELNTKSDYCQVCGYDGEIQIVEEDGKLVWRCPNCGNEDQSKMNVARRTCGYIGSQFWNQGRTQEIKERVLHL

SEQ ID NO: 1032 - protein, 768 aa, Unknown
  Description of Unknown: uncultivated organism sequence
  Category: MG60 effectors
  Description: MG60-247 effector
MFCSCKKNLRVVIYIYNATKTYDCAKKLIVYKSIIKGAEVMKIIKRNGAEETFDRQKIKDAISKANNETDGTPELTDRQIDYISLVIEDHCNEMNRALSVEEIQELVETHIILQGAPETAKRYIRYRFTRNLARASNTTDNQILSLIECNNEEVKQENSNKNPTVNSVQRDYMAGEVSKDLTKRILLPEDIVKAHEEGLIHFHDADYFAQHMHNCDLVNLEDMLQNGTVISGTMIEKPHSFSTACNIATQIIAQVASNQYGGQSISLAHLAPFVQISREKITRQVRAEMEEFGIAADDEQVKSLVEKRVRDEIKRGVQTIQYQVVTLLTTNGQAPFVTVFMYLNEAKNEQEKKDLAIIIEEVLKQRIKGTKNEVGVWVTPAFPKLIYVLEEDNITEDSRFWYLTKLAAECTAKRMVPDYISEKIMLKLKVDKNGNGNCYTCMGCRSFLTPYVDENGKPKYYGRFNQGVVTINLVDVACTAARDGNKSEEKFWQVLDERLELCHRALQCRHERLEGTLSDAAPILWQYGALARLKKGEPIDKLLHGGYSTLSLGYAGLWECVYEITGKKLTEKEGEEFGLRVMQRLNDACAEWKAAENIDYSIYGTPLESTTYKFAKCLQNRFGIIKGVTDRNYITNSYHIHVTEKIDAFSKLELESKFQKLSPGGAISYVEVPNMQQNIPAVLEVMKFIYNNIMYAELNTKSDYCQVCGYDGEIQIVEEDGKLVWRCPNCGNEDQSKMNVARRTCGYIGSQFWNQGRTQEIKERVLHL

SEQ ID NO: 1033 - protein, 768 aa, Unknown
  Description of Unknown: uncultivated organism sequence
  Category: MG60 effectors
  Description: MG60-248 effector
MFCSCKKNLRVVIYIYNATKTYDCAKKLIVYKSIIKGAEVMKIIKRNGAEETFDRQKIKDAIAKANNETDGTPELTDRQIDYISLVIEDHCNEMNRALSVEEIQELVETHIILQGAPETAKRYIRYRFTRNLARASNTTDNQILSLIECNNEEVKQENSNKNPTVNSVQRDYMAGEVSKDLTKRILLPEDIVKAHEEGLIHFHDADYFAQHMHNCDLVNLEDMLQNGTVISGTMIEKPHSFSTACNIATQIIAQVASNQYGGQSISLAHLAPFVQISREKITRQVRAEMEEFGIDADDEQVKSLVEKRVRDEIKRGVQTIQYQVVTLLTTNGQAPFVTVFMHLNEAKNEQEKKDLAIIIEEVLKQRIKGTKNEVGVWVTPAFPKLIYVLEEDNITEDSRFWYLTKLAAECTAKRMVPDYISEKIMLKLKIDKNGNGNCYTCMGCRSFLTPYVDENGKPKYYGRFNQGVVTINLVDVACTAARDGNKSEEKFWQVLDERLELCHRALQCRHERLEGTLSDAAPILWQYGALARLKKGEPIDKLLHGGYSTLSLGYAGLWECVYEITGKKLTEKEGEEFGLRVMQRLNDACAEWKAAENIDYSIYGTPLESTTYKFAKCLQNRFGIIKGVTDRNYITNSYHIHVTEKIDAFSKLELESKFQKLSPGGAISYVEVPNMQQNIPAVLEVMKFIYNNIMYAELNTKSDYCQVCGYDGEIQIVEEDGKLVWRCPNCGNEDQSKMNVARRTCGYIGSQFWNQGRTQEIKERVLHL

SEQ ID NO: 1034 - protein, 755 aa, Unknown
  Description of Unknown: uncultivated organism sequence
  Category: MG60 effectors
  Description: MG60-249 effector
MYELIEKREPKEEKPMKIIKRNGAEVVFDIDKIIMAVTKANDAVDEKVRMTPLQIERISQSVQIACEEMGRSPSVEEIQDLVEKAIMAHGAFEVAKEYITYRYTRSLLRQSNTTDDRILSLIECNNEEVKQENANKNPTINAVQRDYMAGEVSKDITSRILLPKEVVDAHEAGIIHFHDADYYAQHMHNCDLVNLEDMLQNGTVISGTLIEKPHSFSTACNIATQIIAQVAPNQYGGQSISLTHLAPFVQVSREKIRKTVEREMAAFGVAPAEETISKVVEDRLREEVRRGVQTIQYQVVTLMTTNGQAPFITVFMYLNEAKSEQEKKDLAMIIEETLRQRYEGVKNEKGVWITPAFPKLIYVLEEDNVREGTPYWYLTRLAAQCTAKRMVPDYISEKKMREYKLSKGETPGHGDVYTCMGCRSFLTPDRSGNGWDNVARAGNYEPGKPKYYGRFNQGVVTINLVDVALSSGRDMTKFWEVFEDRLELCHRALRCRHERLKGTLSDAAPILWQYGALARLPKGEPIDKLLYGGYSTISLGYAGLYECVKYMTGKSHTDDEAKPFALSVMQKMNDKCLQWKTAENIDYSLYGTPLESTTYKFAKCLQKRFGLVPGITDKSYITNSYHVHVTEPIDAFTKLRFEAEFQQLSPGGAISYVEVPNMQNNIDAVLEVMQFIYDNIMYAELNTKSDYCQVCGYDGEIEIKEDDGKLIWVCPQCGNTDQNKMNVARRTCGYIGTQFWNQGRTQEIKDRVLHL

SEQ ID NO: 1035 - protein, 909 aa, Unknown
  Description of Unknown: uncultivated organism sequence
  Category: MG60 effectors
  Description: MG60-250 effector
MNKVILTDAVPDIEKYWDYEANEGKKPSDFGASSSEKVWTKCPICGTSVRRNVRFTWEKDANGVGHVIHCRTCGKRNNNNSLVVLFPDIKKYWTYEKNEHDPEYYSISSGKKVYTRCPSCGEERYIAICDLIVNRNDRYELTQCIDCSLTLNPRRNVIGSIAKNYPDIDKYWDDKNVSKPDEIALNSQEIIFIHCPTCDKLIKRRALNSFRRDDQTGIYTLLDCHKCAAQKAGKIRGLNQSGALIDECPEIKEWWDAENNTIELKNITRGTHYKAQLKCPACHSSFTRQIHSFVSTKRDGRLLPVACPECGYSSKGDPNDNILRLCPEVDKWWDYEANSPYRPEQFTKGSQFQAHFICPDCGMHLYAGIHSLLKSDENGELHIRHKGNCLKYRSIESDNNLVKQYPQIKEWWDYEENGKALPEKFTIYSGKRMHFICPTCGAKSYRRITDAFAIEANSGEPILFNCPYCRNKKALSGKNSLLDTDPELAKEWSNSNNLKASEVLPTSSSRAKWVCPTCHGEYSAIIRDRKVDDNACPYCRNDKLLPGYNSLQDKKPELAKEWSTRNTLKADTVLFTSSSRVKWVCPTCHKEYSAIIRDRKLGDDSCPYCRQRRLLREHTSLWAVNPALAKEWSTKNPKKADEVLSSSCNSVLWICPTCHGEYSAIIRDRKVGDDACPYCKNDKVLPGFNSLQYKNPELAEEWSANNELKANEVLPTSSSRVKWVCPTCRGEYYAAIRDRKVGDDACPYCKNDKVLPGFNSLQYKNPELAEEWSANNELKANEVLPTSSSRVKWVCPTCRGEYYAAIRDRKVGDDACPYCKNDKVLPGYNSLKVRQPELVEREWCYPENILIGVYPDQILESYPGQAWWKCPTCKRKYLMSVKDRLMKQKRGHVACPQCRGRRRVRSFWV

SEQ ID NO: 1036 - protein, 768 aa, Unknown
  Description of Unknown: uncultivated organism sequence
  Category: MG60 effectors
  Description: MG60-251 effector
MFCSCKKNLRVVIYIYNATKTYDCAKKLIVYKSIIKGAEVMKIIKRNGAEETFDRQKIKDAIAKANNETDGTPELTDRQIDYISLVIEDHCNEMNRALSVEEIQELVETHIILQGAPETAKRYIRYRFTRNLARASNTTDNQILSLIECNNEEVKQENSNKNPTVNSVQRDYMAGEVSKDLTKRILLPEDIVKAHEEGLIHFHDADYFAQHMHNCDLVNLEDMLQNGTVISGTMIEKPHSFSTACNIATQIIAQVASNQYGGQSISLAHLAPFVQISREKITRQVRAEMEEFGIAADDEQVKSLVEKRVRDEIKRGVQTIQYQVVTLLTTNGQAPFVTVFMYLNEAKNEQEKKDLAIIIEEVLKQRIKGTKNEVGVWVTPAFPKLIYVLEEDNITEDSRFWYLTKLAAECTAKRMVPDYISEKIMLKLKIDKNGNGNCYTCMGCRSFLTPYVDENGKPKYYGRFNQGVVTINLVDVACTAARDGSKSEEKFWQVLDERLELCHRALQCRHERLEGTLSDAAPILWQYGALARLKKGEPIDKLLHGGYSTLSLGYAGLWECVYEITGKKLTEKEGEEFGLRVMQRLNDACAEWKAAENIDYSIYGTPLESTTYKFAKCLQNRFGIIKGVTDRNYITNSYHIHVTEKIDAFSKLELESKFQKLSPGGAISYVEVPNMQQNIPAVLEVMKFIYNNIMYAELNTKSDYCQVCGYDGEIQIVEEDGKLVWRCPNCGNEDQSKMNVARRTCGYIGSQFWNQGRTQEIKERVLHL

SEQ ID NO: 1037 - protein, 1240 aa, Unknown
  Description of Unknown: uncultivated organism sequence
  Category: MG60 effectors
  Description: MG60-252 effector
MLKNQILKLTELTNKKELDKESDINSFLNKLPTIQKMFIVQNLLTELISIKNPFLETKNKMIEKIENNCYKYYKYTIQIKQIYDYCALKKPENSINYVLLKGKEAEIVLHEFEESRKNFITNFFFELRNNNILMMKIIKEIDINYYEQLGYFLTQFLYHNTTNTNFSQDELNLMLYLVMEDTVNNKFPDELTFEFLFNLNTEKEKMFLYYFVKNLTKKVEIRNYLTNIFHDLILNLESKNQKLSMNTTTLIREVLNLNNQNNQNNNDIVSDEKDDEYSRKTTMNAHDLLKNFKSLFNNADILNPEKKNTLRQTMISTKKKIEKVETKDDDLNLKKFKSEFDNCTINVETLRIKTFFEETNYTKNELYQSLNDLCNKNENRTSLENNFMEYLLCLKMESLKNETKKYTELYSNQMIYESFMESKKDNIKTEDEGNNIDEKYINNFMTITEFIQNLFEKILQSIDSLPYTIKCLLFFLDKLISKKYEQFKISTYQSSIIKLKFFFDGFILPILQNPFYNGCISDGVISDTTVENLKIISVIVEKFTSSNLFKIVNENIDPYYIIFNKFIVEHMQDFLKIHIAIDESIKNRFEPPKVLMELFESKDLNERNINYDFFKYNENESIQYQSVCFSYFDLMMFINTTEKENIKSYLESNGDIKSDYQLLLKYKIKNFEEGCKNNLSGKKKEFFYITNLKYKESFLKKIKSLTEEKEEFLDNYYKNQKSNSNMSENILLLKQCLIEVMIYLNKINKEDISSFIKRKNKLVLHHNSQINKYLLNKKYIGYKNIFEEKNNLSNINHIIKQKNFFSKLCLSQDAMEDGDFLEDIFPRIITKLKIELGHLIDYAKYERIIFCITFLQINIRNLPQIYRSNNFSKLFVEIINDVQNMIKGLQDNILNQYLFKIRGGDKLNLILSKYSQEIKSMEKYYTINYLFNKLTPHIPSKNKDEINKEKTIKQAKNTPSKKISSLSKSQIFFQPQNLIDLIPKKSILNFINEFHNYPASLKGIDDDVFSIEKKDEIPKLLHNYFNEIINLLQEEKMVKKYNQDDLVSICYDFENYILLKMHDKLLPDFPSKCDEFIYKKCLRLDFITPENMNADKKMINEDLLLTVTEYINKIDIKYTPIDKINMFGKAFQILQDSMSFSSGKSDVGTDDVLPLLHYVMIKAKPKMIYTNYVFCKYYINQNLLKKQTGFLLAQIGMFVKIICNMKFSNLKGVTEEQFGVDEEMPEDLKDIENKFEKLNP

SEQ ID NO: 1038 - protein, 1310 aa, Unknown
  Description of Unknown: uncultivated organism sequence
  Category: MG60 effectors
  Description: MG60-253 effector
  MOD_RES (998)..(1001): Any amino acid
MSNFESYLNQFRVQKGEACNYTGMTINRGSFYIPEENRTTFLSKYYDHVFKQGGSSDLIERHSDLCCVLYDLDMKIDKESEERGYTREIINSFIEISTRIMKKYFDLPVSAYQCFVLEKDKPTVKKECKKDGVHLMFPYIVTEPSIQHLIRDEIVIEAKHLFEECLNTIEDIVDISVLDKNGWMLLGSSKIDGLPYNLTGIWSYENIEDVGNTFPNRVETSEYYTPSLDLVTLLSIRRFTLADITNFKSDMQDFLESWIDDFNTIQEEKNNIHTRRFHGNINKDMKVNMKTVQSLVSILSTDRAKNYEEWIELGFCLHTISDELLQTWIEFSERVDDYRETASADCSARWGKMRETGLGLGTLHMWAKADNYKAYLEIIQNDLEYFIVKTVNSALSNKDDAKDKAKKEVNISDVIFNVVLALKQKYYHYFICSSYEKKHWYEFEDIRWVEGDADVGLKRKIREDLYDDYVAVSTKYRKLSERFQNDHPNKEKYELISAEVFKVAQKLRDATFRKRLLEEASEQLYWSRDRSKQLSSSKFEEILDVNEKLIGMKNGVYDLEKQCFREARCEDYVSLSADIEYQEYFWNDEIIQDINTFISQVLTNKDVRDYVLQTFAMCLDGQIYNEHFHIYTGCHAKGSEILMHDGTIANVENVKVGDMLMGPDSKPREVHELVNGHSQMYEIIPSKGEPFVVNEDHIMVLKATTINNVVKCKNEKRFKLSWHERDIFGFPVSKCKNFPYNGRLKYKKNVIYYKTEDDARNAIEIYRNDLIMNNLNYIKNGDVIEIPLKEYIKRMKKINGAKNYFLFKEGVDFPAKDVKIDPYMLGYWLGDGTSKAFAITTMDDIVIDYFDQKTVVDENMDKKVYHKKNNKAKTIYYSSKERKPGKNRLLNAMKEYNIYNNKHIPSVYKFNNRQTRLELLAGLIDSDGHYNVKSKHYEITLKIEKLIDDTVYLARSLGFAVTKRTVKKTCTNNGKTGMYFNVLICGNNLNEIPVLIEXXXXFKVNKLKNDQYYGFKLNQDHLYLAGDFFVHHNCGSNGKSKILELFELSFGQYCSKLSIAALTQKRVSSSAATPEIARLRGRRFVVLQEPGENEILNVGLMKEMTGGDKIVARSLNKDPIEFKPQFNMILTCNQRPKIPSDDQGSWRRIRVVEFTSKFTANPDPNDPNQFMIDTDLTSKLKKWGKPFFWILTQYYKEFKKNGYKEPAEVTAATNEYQKEQDAYSEFVTDCLKLDKTSYADVKEVYTVFQEYVRYNNDQKPSKKAFEKYMNTRFGKFGRHRDSKCWKGFKIDEAALNENYGISENPEDELL

SEQ ID NO: 1039 - protein, 806 aa, Unknown
  Description of Unknown: uncultivated organism sequence
  Category: MG60 effectors
  Description: MG60-254 effector
MTSSSDLKKHAKFFRSLQEPFDPGPFKENLNVLEPRVDIEDTKSKACSVLTSPRKKVKPQVNLQEETSVMPESPATPKRKIWIPSVSSSELDTLIMNASEILDRALISKERGFCQFWTQRVGEISEKLSSLTETDYAGSDLKLLNESYRRAGGKSWFSITTSCPPNRNSSKIFSQLLQSSVPDCTVCEVTHSKTKLGVWQRREQVNLTGKKYKTLKVRLFPNKDQEDMLIGDSSRLRWYENAYNDIFPLDDYMKLIDKAKEDGEERPPLINWKTFQSKLKDYEYLEEQIGNMVDETHKTSMPVVYKQLKLKKGCKNILEDIALKEEINRKENERKKLEKEDKKKRENDGQEKIELTMSKEDKKVYRKKLKEDRKIATKNKRLRAKEEVENKKKAKLEEIQAKKQEREDQKKIAQTMPKDERKLYEAKLAEDRKIAAEEEAKNKKPRNTNEYPYPSWMENTFGKIISSKTNERIIRGAVANFTQNLNSAVSNYFNGNIKSFELRYRTAKDKHEFINFTDEHLPVWYKDVHGSYSYRFPIGHANKRRTSITWNDLMKTHKGSVIIIQDKQTKCWYGCLPVERDWYPPFDHRSENQGPMKKGEAIGLDPGMRKFLAGFTTTGETIYFGDRAFKIIGDLYSKISWIDSELAQYRAKMLDLSLEQKENLCKEKQAYWNRVKNLVTEMHWKCIRFLVLNYEYIFLEDFSTKGCIKKKPKGQDLSPLVKRILGQYSFYKFKQRLAYSCDKYGRKLILVHPARTTKDCPYCGNEQNVERSETYDCPKCNRILDRDQHSALNVLVKGMSILESRN

SEQ ID NO: 1040 - protein, 773 aa, Unknown
  Description of Unknown: uncultivated organism sequence
  Category: MG60 effectors
  Description: MG60-255 effector
MKIIKRNGSEAVFDIMKIISAVTRANNVVEEADRLTPMQIRRIAESVENSCLSMNRALSVEEIQDLVENQIMAHGAFEVAKNYITYRYTRTLVRKSNTTDEKILSLIESNNEEVKQENSNKNPTVNAVQRDYMAGEVSKDLTARVLLPQDIVDAHNEGIIHFHDADYFAQHMHNCDLVNLEDMLQNGTVISGTLIEKPHSFSTACNIATQIIAQIASNQYGGQSISLTHLAPFVDISRQKIRRSVLEEIKSFGVQPSEEAITNVVETRLRRKIRESVVREIRELGAEAAEERISKIVEERLREEIKRGVQTIQYQVVTLMTTNGQAPFITVFMYLGEARNEQERKDLAIIIEETLRQRIEGVKNEKGVWITPAFPKLIYVLEEDNITEDSPYWELTKLAARCTAKRMVPDYISEKKMRELKLSKGETPGHGDVYTCMGCRSFLTPDRSGTGWNNVANAGNYEPGKPKYYGRFNQGVVTINLVDIALSSGGGLDKFWKIFDDRLDLCYRALMCRHNRLKGTLSDAAPILWQYGALARLKKGEPIDKLLYGGYSTISLGYAGLYECVKYMTGKSHTDPAATPFALDIMHHLNDACAKWKAETDIDFSLYGTPLESTTYKFAKCLQKRFGIVPGITDKNYITNSYHIHVTEHINAFDKLAFESQFQALSPGGAISYVEVPNMQQNLDAVLEVMKFIYDHIMYAELNTKSDYCQVCGYDGEIEIKEDEDGKLIWTCPQCGNTDQSKMNVARRTCGYIGTQYWNQGRTQEIRDRVLHL

SEQ ID NO: 1041 - protein, 768 aa, Unknown
  Description of Unknown: uncultivated organism sequence
  Category: MG60 effectors
  Description: MG60-256 effector
MFCSCKKNLCVVIYIYDATKTYDCAKKLIVYKSIIKGAEVMKIIKRNGAEETFDRQKIKDAIAKANNETDGTPELTDRQIDYISLVIEDHCNEMNRALSVEEIQELVETHIILQGAPETAKRYIRYRFTRNLARASNTTDNQILSLIECNNEEVKQENSNKNPTVNSVQRDYMAGEVSKDLTKRILLPEDIVKAHEEGLIHFHDADYFAQHMHNCDLVNLEDMLQNGTVISGTMIEKPHSFSTACNIATQIIAQVASNQYGGQSISLAHLAPFVQISREKITRQVRAEMEEFGIAADDEQVKSLVEKRVRDEIKRGVQTIQYQVVTLLTTNGQAPFVTVFMYLNEAKNEQEKKDLAIIIEEVLKQRIKGTKNEVGVWVTPAFPKLIYVLEEDNITEDSRFWYLTKLAAECTAKRMVPDYISEKIMLKLKIDKNGNGNCYTCMGCRSFLTPYVDENGKPKYYGRFNQGVVTINLVDVACTAARDGNKSEEKFWQVLDERLELCHRALQCRHERLEGTLSDAAPILWQYGALARLKKGEPIDKLLHGGYSTLSLGYAGLWECVYEIKGKKLTEKEGEEFGLRVMQRLNDACAEWKAAENIDYSIYGTPLESTTYKFAKCLQNRFGIIKGVTDRNYITNSYHIHVTEKIDAFSKLELESKFQKLSPGGAISYVEVPNMQQNIPAVLEVMKFIYNNIMYAELNTKSDYCQVCGYDGEIQIVEEDGKLVWRCPNCGNEDQSKMNVARRTCGYIGSQFWNQGRTQEIKERVLHL

SEQ ID NO: 1042 - protein, 755 aa, Unknown
  Description of Unknown: uncultivated organism sequence
  Category: MG60 effectors
  Description: MG60-257 effector
MHELIEKREPKEEKPMKIIKRNGAEVVFDIDKIIMAVTKANDAVDEKVRMTPLQIERISQSVQIACEEMGRSPSVEEIQDLVEKAIMAHGAFEVAKEYITYRYTRSLLRQSNTTDDRILSLIECNNEEVKQENANKNPTINAVQRDYMAGEVSKDITSRILLPKEVVDAHEAGIIHFHDADYYAQHMHNCDLVNLEDMLQNGTVISGTLIEKPHSFSTACNIATQIIAQVASNQYGGQSISLTHLAPFVQVSREKIRKTVEREMAAFGVAPAEETISKVVEDRLREEVRRGVQTIQYQVVTLMTTNGQAPFITVFMYLNEAKNEQEKKDLAMIIEETLRQRYEGVKNEKGVWITPAFPKLIYVLEEDNVREGTPYWYLTRLAAQCTAKRMVPDYISEKKMREYKLSKGETPGHGDVYTCMGCRSFLTPDRSGNGWDNVARAGNYEPGKPKYYGRFNQGVVTINLVDVALSSGRDMTKFWEVFEDRLELCHRALRCRHERLKGTLSDAAPILWQYGALARLPKGEPIDKLLYGGYSTISLGYAGLYECVKYMTGKSHTDDEAKPFALSVMQKMNDKCLQWKTAENIDYSLYGTPLESTTYKFAKCLQKRFGLVPGITDKSYITNSYHVHVTEPIDAFTKLRFEAEFQQLSPGGAISYVEVPNMQNNIDAVLEVMQFIYDNIMYAELNTKSDYCQVCGYDGEIEIKEDDGKLIWVCPQCGNTDQNKMNVARRTCGYIGTQFWNQGRTQEIKDRVLHL

SEQ ID NO: 1043 - protein, 800 aa, Unknown
  Description of Unknown: uncultivated organism sequence
  Category: MG60 effectors
  Description: MG60-258 effector
MSLHFVLLRCIITQDVVLGIDNERYIKGLEHSGGSLMTRVFFAPYRLLLNCGEGTRKRLIRRSRKDMKIIKRSGTEVEFDISKIVAAVAKANKEVVEKDRLTREQINEIAKKVTLTCSGMNRTASVEEIQDMVENEIMEAQAFAVARKYITYRYTRALVRKANSTDEQILSLIECNNEEVKQENSNKNPVVNSVQRDYMAGEVSKDIAKRILLPEDVVKAHEEGIIHFHDSDYFAQHMHNCCLVNLEDMLQNGTVISETMIDKPKSFSTACNIATQSIAQIASSQYGGQSITLSHLAPFVDVSRKKYLKMVQEEFEEAGLALDHNQIAKIAELRVREEIKRGVQMIQYQVITLMTTNGQAPFVTVFMYLNEVPEGQTRDDLALVIEEMLRQRILGVKNEKGVYITPAFPKLIYVLEEDNITEDSKYWYLTKMAATCTAKRMVPDYISEKIMKKLKGGDVYACMGCRSFLTPDRFTEAGVGNIANAGNYDPNKHKYWGRFNQGVVTINLVDVACSSEGDMDKFWNIMDERLELCHKALMCRHERLLGTPSDVAPILWQYGALARLKRGEKIDRLLFDGYSTISLGYAGLCECTRYMTGLSHTNPEATPFAMEVMQHLNDACAKWKAESNIDFSIYGTPLESTTYKFAKCLQKRFGVIEGVTDKNYITNSYHVHVTEKIDAFSKLSFEAKFQELSPGGAVSYVEVPNMQNNIDAVLAVMKHIYDNIMYAELNTKSDYCQKCGYDGEIQIAENTDGKLVWKCPNCGNTDEETMNVARRTCGYIGTQFWNQGRTQEIQERVLHL

SEQ ID NO: 1044 - protein, 760 aa, Unknown
  Description of Unknown: uncultivated organism sequence
  Category: MG60 effectors
  Description: MG60-259 effector
MKIIKRSGTEVVFDIDKIVNAIRAANLEVEESSRLTDRQVVYAAQNVAEACENAGHTVSVEEIQDLVEDEIMRLDCYEVARHYIIYRYVQSLKRQKNTTDDKILSLIECNNEEVKQENSNKNPTVNSVQRDYMAGEISKDLTQRVLLPQEIVDAHNEGLIHFHDSDYFAQHMHNCDLVNLEDMLQNGTVISGTLIEKPHSFSTACNIATQIIAQVASSQYGGQSISLTHLAPFVEVSRQKIRGEVARELEELGVSASPEKVREVVEDRLRDEIRRGVQTIQYQVVTLMTTNGQAPFVTVFMYLNEARTPQEKHDLAMIVEETLRQRYEGVKNEAGVWITPAFPKLIYVLEDDNVHENSPYFYLTQLAAKCTAKRMVPDYISEKKMRELKLSKGETAGNGDCYTCMGCRSFLTPDRSGNGDCYTCMGCRSFLTPDRSGNGFNNVANALNYDPNKPKYYGRFNQGVVTINLPDVALSSHQDMDKFWKIFDERLELCHRALLCRHERLMGTLSDAAPILWQYGALARLKKGETIDKLLVGGYSTISLGYAGLYECVKYMTGHSHTEKEGTPFAMAVMQRMNDKCAEWKAESDIDFSLYGTPLESTTYKFAKCLQRRFGIIPGVTDKGYITNSYHVHVSEEIDAFDKLKFEGMFQQLSPGGAISYVEVPNMQDNLKAVIRVMQYIYDNIMYAELNTKSDYCQVCGYDGEIKIVEDDGKLVWECPNCGNRDQEKMNVARRTCGYIGTQFWNQGRTEEIRDRVLHL

SEQ ID NO: 1045 - protein, 768 aa, Unknown
  Description of Unknown: uncultivated organism sequence
  Category: MG60 effectors
  Description: MG60-260 effector
MFCSCKKNLCVVIYIYNATKTYDCVKKLIVYKSIIKGAEVMKIIKRNGAEETFDRQKIKDAISKANNETDGTPELTDRQIDYISLVIEDHCNEMNRALSVEEIQELVETHIILQGAPETAKRYIRYRFTRNLARASNTTDNQILSLIECNNEEVKQENSNKNPTVNSVQRDYMAGEVSKDLTKRILLPEDIVKAHEEGLIHFHDADYFAQHMHNCDLVNLEDMLQNGTVISGTMIEKPHSFSTACNIATQIIAQVASNQYGGQSISLAHLAPFVQISREKITRQVRAEMEEFGIAADDEQVKSLVEKRVRDEIKRGVQTIQYQVVTLLTTNGQAPFVTVFMYLNEAKNEQEKKDLAIIIEEVLKQRIKGTKNEVGVWVTPAFPKLIYVLEEDNITEDSRFWYLTKLAAECTAKRMVPDYISEKIMLKLKIDKNGNGNCYTCMGCRSFLTPYVDENGKPKYYGRFNQGVVTINLVDVACTAARDGSKSEEKFWQVLDERLELCHRALQCRHERLEGTLSDAAPILWQYGALARLKKGEPIDKLLHGGYSTLSLGYAGLWECVYEITGKKLTEKEGEEFGLRVMQRLNDACAEWKAAENIDYSIYGTPLESTTYKFAKCLQNRFGIIKGVTDRNYITNSYHIHVTEKIDAFSKLELESKFQKLSPGGAISYVEVPNMQQNIPAVLEVMKFIYNNIMYAELNTKSDYCQVCGYDGEIQIVEEDGKLVWRCPNCGNEDQSKMNVARRTCGYIGSQFWNQGRTQEIKERVLHL

SEQ ID NO: 1046 - protein, 768 aa, Unknown
  Description of Unknown: uncultivated organism sequence
  Category: MG60 effectors
  Description: MG60-261 effector
MFCSCKKNLCVVIYIYDATKTYDCAKKLIVYKSIIKGAEVMKIIKRNGAEETFDRQKIKDAIAKANNETDGTPELTDRQIDYISLVIEDHCNEMNRALSVEEIQELVETHIILQGAPETAKRYIRYRFTRNLARASNTTDNQILSLIECNNEEVKQENSNKNPTVNSVQRDYMAGEVSKDLTKRILLPEDIVKAHEEGLIHFHDADYFAQHMHNCDLVNLEDMLQNGTVISGTMIEKPHSFSTACNIATQIIAQVASNQYGGQSISLAHLAPFVQISREKITRQVRAEMEEFGIAADDEQVKSLVEKRVRDEIKRGVQTIQYQVVTLLTTNGQAPFVTVFMYLNEAKNEQEKKDLAIIIEEVLKQRIKGTKNEVGVWVTPAFPKLIYVLEEDNITEDSRFWYLTKLAAECTAKRMVPDYISEKIMLELKIDKNGNGNCYTCMGCRSFLTPYVDENGKPKYYGRFNQGVVTINLVDVACTAARDGNKSEEKFWQVLDERLELCHRALQCRHERLEGTLSDAAPILWQYGALARLKKGEPIYKLLHGGYSTLSLGYAGLWECVYEITGKKLTEKEGEEFGLRVMQRLNDACAEWKAAENIDYSIYGTPLESTTYKFAKCLQNRFGIIKGVTDRNYITNSYHIHVTEKIDAFSKLELESKFQKLSPGGAISYVEVPNMQQNIPAVLEVMKFIYNNIMYAELNTKSDYCQVCGYDGEIQIVEEDGKLVWRCPNCGNEDQSKMNVARRTCGYIGSQFWNQGRTQEIKERVLHL

SEQ ID NO: 1047 - protein, 756 aa, Unknown
  Description of Unknown: uncultivated organism sequence
  Category: MG60 effectors
  Description: MG60-262 effector
MHELIEKREPKEEKPMKIIKRNGAEVVFDIDKIIMAVTKANDAVDEKVRMTPLQIERISQSVQIACEEMGRSPSVEEIQDLVEKAIMAHGAFEVAKEYITYRYTRSLLRQSNTTDDRILSLIECNNEEVKQENANKNPTINAVQRDYMAGEVSKDITSRILLPKEVVDAHEAGIIHFHDADYYAQHMHNCDLVNLEDMLQNGTVISGTLIEKPHSFSTACNIATQIIAQVASNQYGGQSISLTHLAPFVQVSREKIRKTVEREMAAFGVAPAEETISKVVEDRLREEVRRGVQTIQYQVVTLMTTNGQAPFITVFMYLNEAKSEQEKKDLAMIIEETLRQRYEGVKNEKGVWITPAFPKLIYVLEEDNVREGTPYWYLTRLAAQCTAKRMVPDYISEKKMREYKLSKGETPGHGDVYTCMGCRSFLTPDRSGNGWDNVARAGNYEPGKPKYYGRFNQGVVTINLVDVALSSGRDMTKFWEVFEDRLELCHRALRCRHERLKGTLSDAAPILWQYGALARLPKGEPIDKLLYGGYSTISLGYAGLYECVKYMTGKSHTDDEAKPFALSVMQKMNDKCLQWKTAENIDYSLYGTPLESTTYKFAKCLQKRFGLIPGITDKSYITNSYHVHVTEPIDAFTKLRFEAEFQQLSPGGAISYVEVPNMQNNIDAVLEVMQFIYDNIMYAELNTKSDYCQVCGYDGEISIREDEDGKLVWVCPQCGNTDQSKMNVARRTCGYIGTQFWNQGRTQEIKDRVLHL

SEQ ID NO: 1048 - protein, 1076 aa, Unknown
  Description of Unknown: uncultivated organism sequence
  Category: MG60 effectors
  Description: MG60-263 effector
MEKMQKLYEVRKSLRFELKPSKITFEKIKKEWIFNNNIFESQIFSQKFNEINFQAEEKENNYLFSINENKLNELVKRCDVKIENIKNIKEFIEDNPNELWRVWIDNEKIKIIDKDLKYILEEKSSWKKVFWNPEKKDKKTWNKWAQSNFTVKWKKWLFLTFDDIDAYFEEIRSTKNKKPKAWDFTNMFIDKISFLLKQYEVRKYQLWLNTKWNIEENEKKLFQTKRERISRIRSFLWMFLKLESVISVLNFNYKDNFSEFPVELKEIIISFNEDEDVNDIISEIELIFSESNLYLHKNIERKFSLNIRAINPNPENTKDNKIKTENEIFKDIEVLEEKISKLKNLKAQIKWERKDKKNSWDTNWKEHKKNKWDDVLKKLNPKWEESLFSKLTELRRDLEEVHLTHFAVLLEKEGLFYLALENKRVNNSKNWEIKKINNLELWKFFTKSNSWESKFLNYNVITFQWLRRLCLEESSSMKTENFLNKNNGKWTKWSNQQKKSININWRDEEYFDDLKDYLKFILKNNTDKIGVNFTENDFKEWKDIKWDENLENLEKIINKQWYKANWENFNFENLKKLEEEWNIELFQIYNKDFLIDKDFVTSNSDKEKFERIEYTKEQLKKEWKKFIPKYKDEYKKHKRNLFTIYWQDLFNDEENNQIRIKQEWKFYIRLAWEEEGERKISDNFSIKNKKRYSENKIFADFNLLLNPNTSNISKRCKQNKEFQKKYIKDFNLDIKGLNPKYYIGLDQWVNSLVSYCVMDENENIVTDKNWKPEIWDLSLVISNWENQGQFVEVEDTIIVWWDKWVWSEDKWILEQEEPNKRILKIDGNIKVFDYAEAIYSESYKRRKEIEKYCNNEIDFDEVSNLKKGYSSFVLHKIEQLAKKYSPAIISLEYLQDQKNKSRFVNKNWEWKKIDKQSENPKIYRFWTSTIECIEDALLKKFQFWYGKTENWKKQLVPFFSNKEELYKKGLQLWNIIFIDEKDTSVLCPSCKELLTRCKNPYHEEEWKRWGLYTDEDTKNIYWQFRKVFDILKHNPYNVCNWNSSEKNEKFSFIKSWDDLATYNIAKKWLEYIKNLK

SEQ ID NO: 1049 - protein, 1043 aa, Unknown
  Description of Unknown: uncultivated organism sequence
  Category: MG60 effectors
  Description: MG60-264 effector
MIINNKRKEYKNKQMQINTSYDKDENISDNKKKTENIKVINGMGLNLDIKNKYQNGILSDEKSINLLGKNNNNSNSNCPIKIIKLNNINNFEVDGVSNNFDNQNGNKSNITHDSKYDSRRNFYIRNNSMKNINSKMVNSNFHNNVENVIFSNNNNIMLIDKNLSFNSERLDSRNAIKINKLKDDYIDYLQKEFEDKSKNNVQLDTSNKELLKKCNELILNNRLLNESLTDKNNKLTKISEENQYMKNEYNKSMANFRKMQEKTKVYEDQINLLKSNNTNNEKIIKELRQQIEQANSNLKKVKSEYEEKLKKTEEKYKNEIEENKKNMETLYNNKILGDDKNINNEKKIKSLMDEISYLKEKNQELIKDLETKEKTIELMYNDNAKLMNEANLKQGKLDQSYRQINDLKIILKHKESIINTFKMNIGENDRISLNKSNSCSFMKLDTSDVISENLTKLLNDNEENRMKLEVLNNRLKSIDEIRKKYHNLVKDNKAIPLTNNYSFNSRNSVNFTKEKLNTSFYSNCKNTNNKNNSQGEIDLKDNIENYNINKELNQSVRRSFLSSLSLNILNNSGIKNEENNNKNEKVIKKYIIDTSKDKDKDKDKDIKANILEGDKDKKPVISERFKSVEKKSIPFRGRNFYKRDENKNKRLLRQTTFENEENQKILHKRELEEESKDSRGSDEDSDKIKITTYVPKNFTFSGDEVIYEQNTEQIVNTTEGENNGSCYLYGIDRNDLFHIFDINNKIWLESKKIFDLNLDEKSSSFKTDYQYEGTLLYNTLRGVYILTGENTDTLYFFNSKSSSISKICKFNSSHNNGSMMFDNNENCLYVFGGKNITSCEYYSFYDRKVCKLPNLNIDRANSSFIISNNKIFAFFGFSYENDDYVRTIEYIDYNKKDKWIELNNITLLKNDISFDVESVSTMYYKQNASKILIYSGIQGEDEDFITEYYLIYDVRSNTMDKINKWNIKQYKNIGKKWKDYEITGNDPKGFHFAKNSRFILLPDNCIPEGYNENDIIEVLIDYKNNVHFIVQEKNKIDVYRGEM

SEQ ID NO: 1050 - protein, 768 aa, Unknown
  Description of Unknown: uncultivated organism sequence
  Category: MG60 effectors
  Description: MG60-265 effector
MFCSCKKNLRVVIYIYNATKTYDCAKKLIVYKSIIKGAEVMKIIKRNGAEETFDRQKIKDAISKANNETDGTPELTDRQIDYISLVIEDHCNEMNRALSVEEIQELVETHIILQGAPETAKRYIRYRFTRNLARASNTTDNQILSLIECNNEEVKQENSNKNPTVNSVQRDYMAGEVSKDLTKRILLPEDIVKAHEEGLIHFHDADYFAQHMHNCDLVNLEDMLQNGTVISGTMIEKPHSFSTACNIATQIIAQVASNQYGGQSISLAHLAPFVQISREKITRQVRAEMEEFGIAADDEQVKSLVEKRVRDEIKRGVQTIQYQVVTLLTTNGQAPFVTVFMYLNEAKNEQEKKDLAIIIEEVLKQRIKGTKNEVGVWVTPAFPKLIYVLEEDNITEDSRFWYLTKLAAECTAKRMVPDYISEKIMLKLKIDKNGNGNCYTCMGCRSFLTPYVDENGKPKYYGRFNQGVVTINLVDVACTAARDGSKSEEKFWQVLDERLELCHRALQCRHERLEGTLSDAAPILWQYGALARLKKGEPIDKLLHGGYSTLSLGYAGLWECVYEITGKKLTEKEGEEFGLRVMQRLNDACAEWKAAENIDYSIYGTPLESTTYKFAKCLQNRFGIIKGVTDRNYITNSYHIHVTEKIDAFSKLELESKFQKLSPGGAISYVEVPNMQQNIPAVLEVMKFIYNNIMYAELNTKSDYCQVCGYDGEIQIVEEDGKLVWRCPNCGNEDQSKMNVARRTCGYIGSQFWNQGRTQEIKERVLHL

SEQ ID NO: 1051 - protein, 755 aa, Unknown
  Description of Unknown: uncultivated organism sequence
  Category: MG60 effectors
  Description: MG60-266 effector
MHELIEKREPKEEKPMKIIKRNGAEVVFDIDKIIMAVTKANDAVDEKVRMTPLQIERISQSVQIACEEMGRSPSVEEIQDLVEKAIMAHGAFEVAKEYITYRYTRSLLRQSNTTDDRILSLIECNNEEVKQENANKNPTINAVQRDYMAGEVSKDITSRILLPKEVVDAHEAGIIHFHDADYYAQHMHNCDLVNLEDMLQNGTVISGTLIEKPHSFSTACNIATQIIAQVASNQYGGQSISLTHLAPFVQVSREKIRKTVEREMAAFGVAPAEETISKVVEDRLREEVRRGVQTIQYQVVTLMTTNGQAPFITVFMYLNEAKSEQEKKDLAMIIEETLRQRYEGVKNEKGVWITPAFPKLIYVLEEDNVREGTPYWYLTRLAAQCTAKRMVPDYISEKKMREYKLSKGETPGHGDVYTCMGCRSFLTPDRSGNGWDNVARAGNYEPGKPKYYGRFNQGVVTINLVDVALSSGRDMTKFWEVFEDRLELCHRALRCRHERLKGTLSDAAPILWQYGALARLPKGEPINKLLYGGYSTISLGYAGLYECVKYMTGKSHTDDEAKPFALSVMQKMNDKCLQWKTAENIDYSLYGTPLESTTYKFAKCLQKRFGLIPGITDKSYITNSYHVHVTEPIDAFTKLRFEAEFQQLSPGGAISYVEVPNMQNNIDAVLEVMQFIYDNIMYAELNTKSDYCQVCGYDGEIEIKEDDGKLVWVCPQCGNTDQNKMNVARRTCGYIGTQFWNQGRTQEIKDRVLHL

SEQ ID NO: 1052 - protein, 760 aa, Unknown
  Description of Unknown: uncultivated organism sequence
  Category: MG60 effectors
  Description: MG60-267 effector
MEEMEMNVKMNVIKRNGKEVPFDITKIVNAIGKANNEVDHVHQMNDYQIRAVADNIAHKIAGYSHAANVEDIQDMVETGIMEMRGYEVAQKYVRYRYKREISRKSNTTDDGILSLIDLSNEEVKQENSNKNPVINSTQRDYMAGEVSKDLTKRLLLPEEIVKAHEAGIIHFHDADYYAQREHNCDLINLEDMLQNGTVISQTMIEKPHSFFTACNVTTQIVAQVASNQYGGQSFTLAHLAPFVDISRQKIKKEVIAERKETGESMDESIIEKIVERRLKEEIKSGIQTIQYQLITLMTCNGQAPFVTMFMYLDEVPDGRTRKDLAMIIEEVLRQRMQGVKNEKGIWITPAFPKLIYVLDEDNIHDDSPYYYLTRLAAECTAKRMVPDYISAKIMKNLKHGDVYPCMGCRSFLTPDTEGLGENGKHKYYGRFNQGVVTINLVDVACSSGGDMDKFWEILEDRLELCHRALRCRHERLLGTVSDVAPILWQYGAIARLKKGETIDKLLFNNYSTISLGYAGLYEMCVRMLGVSHTTDEGRKFALAVMQKLNDKCSEWRAAENISYSVYGTPMESTTYKFAKCLQKRFGIIPGVTDKNYITNSYHVHVSEHIDAFHKLKFESDFQRLSPGGAISYIEVPNMQTNIPAVLTVMKYIYENIMYAELNTKSDYCMACGYDGEIRIIEDETGKLIWECPNCGNRDQHKMSVARRTCGYIGTQFWNQGRTQEIKGSPPFVSMQKLRIPRKLRNPYAQVEVVISSPRYG

SEQ ID NO: 1053 - protein, 768 aa, Unknown
  Description of Unknown: uncultivated organism sequence
  Category: MG60 effectors
  Description: MG60-268 effector
MFCSCKKNLSVVIYIYDATKTYDCAKKLIVYKSIIKGAEVMKIIKRNGAEETFDRQKIKDAIAKANNETDGTPELTDRQIDYISLVIEDHCNEMNRALSVEEIQELVETHIILQGAPETAKRYIRYRFTRNLARASNTTDNQILSLIECNNEEVKQENSNKNPTVNSVQRDYMAGEVSKDLTKRILLPEDIVKAHEEGLIHFHDADYFAQHMHNCDLVNLEDMLQNGTVISGTMIEKPHSFSTACNIATQIIAQVASNQYGGQSISLAHLAPFVQISREKITRQVRAEMEEFGIDADDEQVKSLVEKRVRDEIKRGVQTIQYQVVTLLTTNGQAPFVTVFMYLNEAKNEQEKKDLAIIIEEVLKQRIKGTKNEVGVWVTPAFPKLIYVLEEDNITEDSRFWYLTKLAAECTAKRMVPDYISEKIMLKLKIDKNGNGNCYTCMGCRSFLTPYVDENGKPKYYGRFNQGVVTINLVDVACTAARDGNKSEEKFWQVLDERLELCHRALQCRHERLEGTLSDAAPILWQYGALARLKKGEPIDKLLHGGYSTLSLGYAGLWECVYEITGKKLTEKEGEEFGLRVMQRLNDACAEWKAAENIDYSIYGTPLESTTYKFAKCLQNRFGIIKGVTDRNYITNSYHIHVTEKIDAFSKLELESKFQKLSPGGDISYVEVPNMQQNIPAVLEVMKFIYNNIMYAELNTKSDYCQVCGYDGEIQIVEEDGKLVWRCPNCGNEDQSKMNVARRTCGYIGSQFWNQGRTQEIKERVLHL

SEQ ID NO: 1054 - protein, 941 aa, Unknown
  Description of Unknown: uncultivated organism sequence
  Category: MG60 effectors
  Description: MG60-269 effector
MDFLSLSSEYQSYVDYIDNSLIIMKYFITFYQSLQNSFKIFSKNTRESLNTLFSNLIQFDNRSTFSKKFFEFYRLFEKYLTKLDLLSEKILTQIVEPTLDIQKHFKLKTDIEIKNLFEIIKSTINQKKKLEIIKQNYFDYSKAAEAQEKSLVEVMDDENQQNINYQNNILTKLRMESAEECEKYRNMVNETNKLYNDNNKKYFPIISSLKDCEEQRLYFIYSNFQKFISILTEQKNSLNFVVSNYENEDVFKVKIDDDMIMYQEKFSYTFKQNERFKKEDFILYDIYRRNIESIINSSNKLIKQNNIPVPNIDINFVSNENNIPIKLEQNDDISFQSLFNSNSYNINRKIFVAFENKLKTDGNFARNVIDKMLDDIFTKVLYKKYENKNQFDKLTDVLIDISMNSSIQNELFDVNYGILFIAEKTFYYDRITNSKYYLCKALSEKYQNFRNKVYWKRMLNYKKNSLIESLVEKEAMKKIKKDKIPTQQSSTFSFLWRSNSVDNNCINLISNNEKKRLTEKVKKLELFDILRDFLIHFGNFNLDLTISNDIIIEIASEDNIYSEQISFFVTFMNSNMYCVKNKKLKKYKKKENKKDIIVNKKILTSNNTKLRHILISLNSSIKYLQLKDYINLNLLNKTFYPISQKIIYKKFFLKQEQILEQEKHFKMWFNILHYDPNEIPYEKLLQDALDYNSPIIDLIQADVIRTFFDEDQENYRKKLQNILIAISYTYPKISYVQGMNYIVSFFLKITNNEKKSYDLMSCLLGKTDYGKSLLNEFEMIKKCFYVFERLIFIYLPELSYVLKKNNVSSSYYISPWFITLFTNSLSGNNTKIILRIIDMLILEGYNCIIRIGLVLLKHYQENLIKMKFEELLHFLINELKEKYEFFHNNNYEKFIELYNDMKIPKGLINNIENEYEIEKKVLKIREKDERIEKEKENEITI

SEQ ID NO: 1055 - protein, 1180 aa, Unknown
  Description of Unknown: uncultivated organism sequence
  Category: MG60 effectors
  Description: MG60-270 effector
MAKIIQTLFIYISTREKEVEIMVIIKRNGKESLFEKSKIRNAIRKANAEAEAENQLSEGQIYLIADEIEEIAEKRSRALNVEEIQDLVEDKIMNCGKYEVARKYIKYRYNRELNRRSNTTDEKILSLIECENEEAKQENANKNPTIASVQRDYMAGEVSKDLTKRILLPQEIVDAHEKGIIHFHDADYYSQHIHNCDLINLEDMLQNGTVISGTLIEKPHSFSTACNIATQIIAQVASSQYGGQSITLSHLAPFVDVSRQKIMQKTKKAFDEAEMTYTEDQLKAVVENKVKEEIEKGVQIIQYQVVTLMTTNGQAPFITVFMYLNEVKDEQTKHDLAMIIEEVLKQRIQGVKNEKGVWITPAFPKLIYALEEDNIKEGSKYWYLTELAAKCTAKRMVPDYISEKKMLELKGDAYPCMGCVDGKETVKVKGVFSENPNEETLEIKLPIEKLWKEMSKKYQVKLQPNGKDYFIETPDLLIYDQKKGFVKNYGIIKNHNSDWLIITFSNGAKIKCTEDHPFETEDGRIIKAKDLTDADVIAHETDKLCYPKNIERIPAGVSDGFSYDVTTESEHFTVSGIYSHNCRSFLTPDRFTDNGAGNIANAKNYKPNEHKYYGRFNQGVVTINLPDAALSAKGDMNEFWKILDERLELCHKALKCRHERLLGTPTSIAPILWQYGALARLGKDEKIDKLLFGGYSTISLGYAGLWECVYGLIKKKITEPEGKELGLKIMQTLNDYCSKWKVDENIDYSLYGTPLESTTYKFAKCLQDRFGVVEGVSDKNYITNSYHIKVTEKVNAFEKLKFESEFQALSPGGAISYIEVPDMKDNIAAVLEVIKFIYDNIMYAELNTKSDYCQECGYDGEIQIVQEGNKLVWRCPNCGNEDQSKLNIARRTCGKQSSEIATIKNDRTSGKPRLYNNFEDYKAGNPEPSSQSNKNSKNSNYKVCDICGRHEKHIIGYYGKKLCNKHYNQIKKYGHVLENSPRTIYDKNEIKVEGEIAYIELYDKLYNVVALAMIDAEDINKVKYSKWRLNCNGYVISTNKFDGKTTFLHRRILNNTNQFVDHINGNVLDNRKQNLRLVTKSQNQMNVNYKGVSKTKNDKHYAHIKIKGKAINLGVYVDEEDALYARYFAEKLLFKEYRFPKEEPFVLTNRKNEIENYVRNRLEKYKDVITNDAENTKNAA

SEQ ID NO: 1056 - protein, 1239 aa, Unknown
  Description of Unknown: uncultivated organism sequence
  Category: MG60 effectors
  Description: MG60-271 effector
MLKNQILKLTELTNKKELDKESDINSFLNKLPTIQKMFIVQNLLTELISIKNPFLETKNKMIEKIENNCYKYYKYTIQIKQIYDYCALKKPENSINYVLLKGKEAEIVLHEFEESRKNFITNFFFELRNNNILMMKIIKEIDINYYEQLGYFLTQFLYHNTTNTNFSQDELNLMLYLVMEDTVNNKFPDELTFEFLFNLNTEKEKMFLYYFVKNLTKKVEIRNYLTNIFHDLILNLESKNQKLSMNTTTLIREVLNLNNQNNQNNNDIVSDEKDDEYSRKTTMNAHDLLKNFKSLFNNADILNPEKKNTLRQTMISTKKKIEKVETKDDDLNLKKFKSEFDNCTINVETLRIKTFFEETNYTKNELYQRLNDLCNKNENRTSLENNFMEYLLCLKMESLKNETKKYTELYSNQMIYESFMESKKDNIKTEDEGNNIDEKYINNFMTITEFIQNLFEKILQSIDSLPYTIKCLLFFLDKLISKKYDIKLSSYQSSIIKLKFFFDGFILPILQNPFYNGCISDGVISDTTVENLKIISVIVEKFTSNNLFKIVNENIDPYYIIFNKFIVEHMQDFLKIHIAIDESIKNRFEPPKVLMELFESKDLNERNINYDFFKYNENESIQYQSVCFSYFDLMMFINTTEKENIKSYLESNGDIKSDYQLLLKYKIKNFEEGCKNNLSGGKKEFFYITNLKYKESFLKKIKSLTEEKEEFLDNYYKNQKSNSDMNENILLLKQCLIEVMIYLNKINKEDISSFIKRKNKLVLHHNSQINKYLLNKKYIGYKNIFEEKNNLSNINHIIKQKNFFSKLCLSQDAMEDGDFLEDIFPRIITKLKIELGHLIDYAKYERIIFCITFLQINIRNLPQIYRSNNFSKLFVEIINDVQNMIKGLQDNILNQYLFKIRGGDKLNLILSKYSQEIKSMEKYYTINYLFNKLTPHIPSKNKDEINKEKTIKQVKNTPSKKISSLSKSQIYFQPQNLIDLIPKKSILNFINEFHNYPASLKGIDDDVFSIEKKDEIPKLLHNYFNEIINLLQEEKMVKKYNQDDLVSICYDFENYILLKMHDKLLPDFPSKCDEFLYKKCLRLDFITPENMNADKKMINEDLLLTVTEYINKIDIKYTPIDKINMFGKAFQILQDSMSFSSGKSDVGTDDVLPLLHYVMIKAKPKMIYTNYVFCKYYINQNLLKKQTGFLLAQIGMFVKIICNMKFSNLKGVTEEQFGVDEEMPEDLKDIENKFEKLNP

SEQ ID NO: 1057 - protein, 755 aa, Unknown
  Description of Unknown: uncultivated organism sequence
  Category: MG60 effectors
  Description: MG60-272 effector
MHELIEKREPKEEKPMKIIKRNGAEVVFDIDKIIMAVTKANDAVDEKVRMTPLQIERISQSVQIACEEMGRSPSVEEIQDLVEKAIMAHGAFEVAKEYITYRYTRSLLRQSNTTDDRILSLIECNNEEVKQENANKNPTINAVQRDYMAGEVSKDITSRILLPKEVVDAHEAGIIHFHDADYYAQHMHNCDLVNLEDMLQNGTVISGTLIEKPHSFSTACNIATQIIAQVASNQYGGQSISLTHLAPFVQVSREKIRKTVEREMAAFGVAPADETISKVVEDRLREEVRRGVQTIQYQVVTLMTTNGQAPFITVFMYLNEAKSEQEKKDLAMIIEETLRQRYEGVKNEKGVWITPAFPKLIYVLEEDNVREGTPYWYLTRLAAQCTAKRMVPDYISEKKMREYKLSKGETPGHGDVYTCMGCRSFLTPDRSGNGWDNVARAGNYEPGKPKYYGRFNQGVVTINLVDVALSSGRDMTKFWEVFEDRLELCHRALRCRHERLKGTLSDAAPILWQYGALARLPKGEPIDKLLYGGYSTISLGYAGLYECVKYMTGKSHTDDEAKPFALSVMQKMNDKCLQWKTAENIDYSLYGTPLESTTYKFAKCLQKRFGLIPGITDKSYITNSYHVHVTEPIDAFTKLRFEAEFQQLSPGGAISYVEVPNMQNNIDAVLEVMQFIYDNIMYAELNTKSDYCQVCGYDGEIEIKEDDGKLIWVCPQCGNTDQNKMNVARRTCGYIGTQFWNQGRTQEIKDRVLHL

SEQ ID NO: 1058 - protein, 924 aa, Unknown
  Description of Unknown: uncultivated organism sequence
  Category: MG60 effectors
  Description: MG60-273 effector
MNLILYVNIVFIFYLTYSEELNKINFNKISFEYKYKANKRYLLNNKNQKLNNIVNIYNPYEKIAYISNTKNENGDLFITTNSENKNDNTRLVYGLKKDFTNYFRDNEGSYRIVMTNLESDNIYPSITSLTINKEEYLISFSHDGVFESLDYNKGHAYGRYSYTAIGYTSNVNKNTFIKLKYYNNSNYVLNSHIAKDGKSNFFFLIKINFRNGNLTKNRPDPVNETRVEKGFIGALATCFEIKEYIECLYTNSERYYKASIFDVLNFGNLYSKIIDENIVSEPQLFSKCIYFKDSIGAFIYYLSQNIQPILTFLKLTTPSPLSDDFNLDNYLGPITLNSNSKFDLGYGYASNDLIKLNDNNIIFTSVSNNYENIIIILIKLLKEDKNILINYYNIELNNEYNIKIYKDITTFTINNLFGIGMTNYNYSLSSSKTYSNYFIIGINSSNNISISEEIDIFDEDNIYGFKIKEININIDNNIFGYYFSGIQIINILNENLTDDNLGFYLYSNNSDKKIELNESVLYDDIINFKVIEDLGVKKDLYSIAFLPIISEANSTDYISIPDSIELFPENYANLEYFYQPDIFYGKKAFISFGVKNCYKTCQTCSYYGNHINHHCESCSTKYPYNTFNNCYNLTFKETNILTNEIISTQVNIIDTQNISSEIQEISRETSKNHDKDCDIKALFKKQCLYDEKYSKTNKDLIKDIKQSFKEHSLDDILEDLIKINEDFIIEKENVLYQITTSYNQNNKIYYNLSSIKLGKCEQILKANNNLTENESLIIFKVEYYIEGYIIPLIDYEVYNPRTKNKINLNLCQSEKIDIIHHITIDENELFKYDPESDYYNDICYAYTTTDETDIILKDRREEFLKNNLTLCENNCQFKGYDPKFHIVNCKCDIKTDLQCIFDSNFDIKRLTYNFLDIKNIINIL

SEQ ID NO: 1059 - protein, 920 aa, Unknown
  Description of Unknown: uncultivated organism sequence
  Category: MG60 effectors
  Description: MG60-274 effector
MASKFHWNASYSIYDKYFQCGKFIDLDKFDCPCETFGYNAFEKPPLTTEEKQLMHRFTFDAEQKHFTDMQIFAWQTKQRFWELYEELKFPFPENATITDNLIYPEKFDYQMERELQKRFCALKCYYNPRECYHNENHIGKLDKLMKKDFHQQFNPRFEKQFERNSVPKLKWKSKTSYPKEGLNELVDNDLGIWSKLFYDENGIAINFSLFTKENCEYGENVKYLGRPYCHFETKKFLDVIIALIEVTKDSFDNAQLEANKVYSESIECKGPIRRPILNQMPWGPVSFNEENPPCKGYMCNFVKRGNNFWNLEQYKIHKLHCCRYFSKHHYWMFTHSDKFVCNSGKIGQLYGPAMTRDACIVYPCNQTYCNQTCTCKFCTRRGECSSDLHKKHLARPTFKGNNLVMEDLSLECLVQKSSQCQEHWVTHPDKFKRKEDIEVEKNLYFHNGKLVKTPRDIAVQIIKFSGIKKSCDNCKEDVEDHFKEHMFPHLQCKLCLFMLRDATFWKMICYICNKNMVNFSAEQIKRHKRYHEKGFFGCQFCKYKTQKKFNMTRHLEEVHNHYKSSDEDISDCDESEGVSAGDNELSIHDSESGTEWDSNSDNEYGDDSDTDEYDDSLFKQDLFDPFVVKVKRKTRLFPEKEYVCTEAQCDKKFFYERNLHRHINSEHGENNEYSCGQCKKIFNRKDTLARHQFEVHGNLGDGTYRFPGTTSINNNFSCEQCGVKFKRKPYLKRHINEVHQLQDRQYDCEKCGKKFTRQEKMKRHIHDVHELQDGQYVCEECGKKFKRQQDMKRHIHEVHELQDGQYVCEECGKKFKRQQDMKRHMHEVHELHDRQYVCEECGQKFERQENMKTHIHEVHEKEDPQYPCEKCDKKFKRKYHLNRHIHDKHDSSGWEYICDLCGKSFKSKSNLKEHLHTHKM

SEQ ID NO: 1060 - protein, 768 aa, Unknown
  Description of Unknown: uncultivated organism sequence
  Category: MG60 effectors
  Description: MG60-275 effector
MFCSCKKNLCVVIYIYDATKTYDCAKKLIVYKSIIKGAEVMKIIKRNGAEETFDRQKIKDAIAKANNETDGTPELTDRQIDYISLVIEDHCNEMNRALSVEEIQELVETHIILQGAPETAKRYIRYRFTRNLARASNTTDNQILSLIECNNEEVKQENSNKNPTVNSVQRDYMAGEVSKDLTKRILLPEDIVKAHEEGLIHFHDADYFAQHMHNCDLVNLEDMLQNGTVISGTMIEKPHSFSTACNIATQIIAQVASNQYGGQSISLAHLAPFVQISREKITRQVRAEMEEFGIDADDEQVKSLVEKRVRDEIKRGVQTIQYQVVTLLTTNGQAPFVTVFMYLNEAKNEQEKKDLAIIIEEVLKQRIKGTKNEVGVWVTPAFPKLIYVLEEDNITEDSRFWYLTKLAAECTAKRMVPDYISEKIMLKLKIDKNGNGNCYTCMGCRSFLTPYVDENGKPKYYGRFNQGVVTINLVDVACTAARDGNKSEEKFWQVLDERLELCHRALQCRHERLEGTLSDAAPILWQYGALARLKKGEPIDKLLHGGYSTLSLGYAGLWECVYEIKGKKLTEKEGEEFGLRVMQRLNDACAEWKAAENIDYSIYGTPLESTTYKFAKCLQNRFGIIKGVTDRNYITNSYHIHVTEKIDAFSKLELESKFQKLSPGGAISYVEVPNMQQNIPAVLEVMKFIYNNIIYAELNTKSDYCQVCGYDGEIQIVEEDGKLVWRCPNCGNEDQSKMNVARRTCGYIGSQFWNQGRTQEIKERVLHL

SEQ ID NO: 1061 - protein, 755 aa, Unknown
  Description of Unknown: uncultivated organism sequence
  Category: MG60 effectors
  Description: MG60-276 effector
MHELIEKREPKEEKPMKIIKRNGAEVVFDIDKIIMAVTKANDAVDEKVRMTPLQIERISQSVQIACEEMGRSPSVEEIQDLVEKAIMAHGAFEVAKEYITYRYTRSLLRQSNTTDDRILSLIECNNEEVKQENANKNPTINAVQRDYMAGEVSKDITSRILLPKEVVDAHEAGIIHFHDADYYAQHMHNCDLVNLEDMLQNGTVISGTLIEKPHSFSTACNIATQIIAQVASNQYGGQSISLTHLAPFVQVSREKIRKTVEREMAAFGVAPAEETISKVVEDRLREEVRRGVQTIQYQVVTLMTTNGQAPFITVFMYLNEAKSEQEKKDLAMIIEETLRQRYEGVKNEKGVWITPAFPKLIYVLEEDNVREGTPYWYLTRLAAQCTAKRMVPDYISEKKMREYKLSKGETPGNGDVYTCMGCRSFLTPDRSGNGWDNVARAGNYEPGKPKYYGRFNQGVVTINLVDVALSSGRDMTKFWEVFEDRLELCHRALRCRHERLKGTLSDAAPILWQYGALARLPKGEPIDKLLYGGYSTISLGYAGLYECVKYMTGKSHTDDEAKPFALSVMQKMNDKCLQWKTAENIDYSLYGTPLESTTYKFAKCLQKRFGLIPGITDKSYITNSYHVHVTEPIDAFTKLRFEAEFQQLSPGGAISYVEVPNMQNNIDAVLEVMQFIYDNIMYAELNTKSDYCQVCGYDGEIEIKEDDGKLIWVCPQCGNTDQNKMNVARRTCGYIGTQFWNQGRTQEIKDRVLHL

SEQ ID NO: 1062 - protein, 755 aa, Unknown
  Description of Unknown: uncultivated organism sequence
  Category: MG60 effectors
  Description: MG60-277 effector
MHELIEKREPKEEKPMKIIKRNGAEVVFDIDKIIMAVTKANDAVDEKVRMTPLQIERISQSVQIACEEMGRSPSVEEIQDLVEKAIMAHGAFEVAKEYITYRYTRSLLRQSNTTDDRILSLIECNNEEVKQENANKNPTINAVQRDYMAGEVSKDITSRILLPKEVVDAHEAGIIHFHDADYYAQHMHNCDLVNLEDMLQNGTVISGTLIEKPHSFSTACNIATQIIAQVASNQYGGQSISLTHLAPFVQVSREKIRKTVEREMAAFGVAPAEETISKVVEDRLREEVRRGVQTIQYQVVTLMTTNGQAPFITVFMYLNEAKSEQEKKDLAMIIEETLRQRYEGVKNEKGVWITPAFPKLIYVLEEDNVREGTPYWYLTRLAAQCTAKRMVPDYISEKKMREYKLSKGETPGHGDVYTCMGCRSFLTPDRSGNGWDNVARAGNYEPGKPKYYGRFNQGVVTINLVDVALSSGRDMTKFWEVFEDRLELCHRALRCRHERLKGTLSDAAPILWQYGALARLKKGEPIDKLLYGGYSTISLGYAGLYECVKYMTGKSHTDDEAKPFALSVMQKMNDKCLQWKTAENIDYSLYGTPLESTTYKFAKCLQKRFGLVPGITDKSYITNSYHVHVTEPIDAFTKLRFEAEFQQLSPGGAISYVEVPNMQNNIDAVLEVMQFIYDNIMYAELNTKSDYCQVCGYDGEIEIKEDDGKLIWVCPQCGNTDQNKMNVARRTCGYIGTQFWNQGRTQEIKDRVLHL

SEQ ID NO: 1063 - protein, 812 aa, Unknown
  Description of Unknown: uncultivated organism sequence
  Category: MG60 effectors
  Description: MG60-278 effector
MDDIGEKLMAENAESDKEELGLICPKCGKKIIDDGTAYRCEAGDFKCGKEILGTEISRDELQKAIAGQSDELGFRSSKTGKTFLARLVLSEAKDSLDFRFSDRNGEDSGLKCPKCGGKIVDDGKAYKCESGDFKCWKIIRGHEITREELQKIFAGQGDKLEFTSKKTGKPFTSRLVLNEDKDGIDFEFAVRKKDDTGLKCPKCHGKIIDAGPIYRCEVGDFKCDKEILGTEITRDELQKVIDEGSSDELDFTDQDTGKPYTARLKLSSDKKSVEVPKPEDTGEKCPNCRNKIMETDKAYWCESCNFTCDKEILGTRISHDDLHKIVEEGNSDELDFTDHDSGKSYKAHLNLSSDKQTVDVPKPEDTGEKCPNCRNKIMETDKAYWCESCNFTCDKEILGTRISHDQLHKIVEEGRSDELDFADHDSGKSYKARLNLSEDNKTVVVPKPKDTGIKCPKCTMKIMETDRAYWCESEACDFTCDKEILDTKITRDELKKVVLNGKSGKLDFTDKDTKKPYKGRLVLNKKKNGLHVDKLDYMKVIFAVISFVVATISFIGIFLPDLFNMNKGSITRFETTLSDKKSAQKLEEFLDANVGKIVELTIHYKQNLVYGLVPWAKYSEDSYYGVKYDPAKDGSWWWDSASAAHDVTFSHFGDNNRFYVKSFLYDKNLFEVEYRDFGGIGYCDAITRYAYQLMIPYVKNDKLAFEWQRDREKSKDYVALPSPYWVLKGTFVVNVKKGEELTDNITTLYDEFQQRKLRSDYGKDYVVPEIAKILAVDPACGERTGNGDYSFSGKSFELEPLTQQQLLQMAYN

SEQ ID NO: 1064 - protein, 728 aa, Unknown
  Description of Unknown: uncultivated organism sequence
  Category: MG60 effectors
  Description: MG60-279 effector
MDAVHTNVIKRNGEEVNFDLDKIVNAINAANKEVDRLHQLNDYQVQAIADNIAKQIEIMTHAIHVEDIQDMVETGIMEMRGYEVAQKYVRYRYKRELARKSNTTDNGILALIDHMNEEVNQENSNKNPVINSTQRDYMAGEVSKDLTKRMLLPKEIVEAHEQGIIHFHDSDYFAQREHNCDLVNLEDMLQNGTVISETMIEKPHSFFTACNVTTQIVAQVASNQYGGQSFTLSHIAPFVDVSRKKIREQVIEERKMCGEALDEEVISKITESRLRAEVKSGIQTIQYQLITLMTCNGQAPFVTMFMYLDEVPEGQTRDDLAMIIEEVLQQRIQGVKNEKGIWITPAFPKLIYVLDKDNITEDSKYWYLTELAAKCTAKRMVPDYISAKVMRELKNGDVYPCMGCRSFPTSEDSQRNPDGTRKYYGRFNQGVVTINLVDVACSAEGHIDRFWEILESRLELCHRALRCRHERLLGTVSDVAPILWQHGALARLKKGETIDKLLFNGYSTISLGYAGLCEMCVRMTGKTHTSPEGKKLALEVMQKLNDKCKEWKEAENISYSVYGTPMESTTYKFAKCLQKRFGIIKGVTDKNYITNSYHIHVTEPVNAFDKLKFESEFQKLSPGGAISYVEVPNLQDNVEAVISVMKFIYDNILYAELNTKSDYCEICGYDGEIKIVTDENGKLIWECPNCGNRDQNNLFVARRTCGYIGTQFWNQGRTQEIKDRVLHL

SEQ ID NO: 1065 - protein, 728 aa, Unknown
  Description of Unknown: uncultivated organism sequence
  Category: MG60 effectors
  Description: MG60-280 effector
MDAVHTNVIKRNGEEVCFNLDKIVNAITAANKEVDRLHQLNDYQVQAIADNIAKQIEIMTHAIHVEDIQDMVETGIMEMRGYEVAQKYVRYRYKRELARKSNTTDNGILALIDHLNEEVNQENSNKNPVINSTQRDYMAGEVSKDLTKRMLLPEEIVEAHEQGIIHFHDSDYFAQREHNCDLVNLEDMLQNGTVISETMIEKPHSFFTACNVTTQIVAQVASNQYGGQSFTLSHIAPFVDVSRKKIREQVIEERKMCGEALDEEVISKITESRLRAEVKSGIQTIQYQLITLMTCNGQAPFVTMFMYLDEVPEGQTRDDLAMIIEEVLQQRIQGVKNEKGIWITPAFPKLIYVLDKDNITEDSKYWYLTELAAKCTAKRMVPDYISAKVMRELKNGDVYPCMGCRSFPTSEDSQRNPDGTRKYYGRFNQGVVTINLVDVACSAEGHMDRFWEILESRLELCHRALRCRHERLLGTVSDVAPILWQHGALARLKKGETIDKLLFNGYSTISLGYAGLCEMCVRMTGKTHTSPEGKKLALEVMQKLNDKCKEWKEAENISYSVYGTPMESTTYKFAKCLQKRFGIIKGVTDKNYITNSYHIHVTEPVNAFDKLKFESEFQKLSPGGAISYVEVPNLQDNVEAVISVMKFIYDNILYAELNTKSDYCEICGYDGEIKIVTDENGKLVWECPNCGNRDQNNLFVARRTCGYIGTQFWNQGRTQEIKDRVLHL

SEQ ID NO: 1066 - protein, 728 aa, Unknown
  Description of Unknown: uncultivated organism sequence
  Category: MG60 effectors
  Description: MG60-281 effector
MDAVHTNVIKRNGEEVNFDLDKIVNAINAANKEVDRLHQLNDYQVQAIADNIAKQIEIMTHAIHVEDIQDMVETGIMEMRGYEVAQKYVRYRYKRELARKSNTTDNGILALIDHMNEEVNQENSNKNPVINSTQRDYMAGEVSKDLTKRMLLPKEIVEAHEQGIIHFHDSDYFAQREHNCDLVNLEDMLQNGTVISETMIEKPHSFFTACNVTTQIVAQVASNQYGGQSFTLSHIAPFVDVSRKKIREQVIEERKMCGEALDEEVISKITESRLRAEVKSGIQTIQYQLITLMTCNGQAPFVTMFMYLDEVPEGQTRDDLAMIIEEVLQQRIQGVKNEKGIWITPAFPKLIYVLDKDNITEDSKYWYLTELAAKCTAKRMVPDYISAKVMRELKNGDVYPCMGCRSFPTSEDSQRNPDGTRKYYGRFNQGVVTINLVDVACSAEGHMDRFWEILESRLELCHRALRCRHERLLGTVSDVAPILWQHGALARLKKGETIDKLLFNGYSTISLGYAGLCEMCVRMTGKTHTSPEGKKLALEVMQKLNDKCKEWKEAENISYSVYGTPMESTTYKFAKCLQKRFGIIKGVTDKNYITNSYHIHVTEPVNAFDKLKFESEFQKLSPGGAISYVEVPNLQDNVEAVISVMKFIYDNILYAELNTKSDYCEICGYDGEIKIVTDENGKLIWECPNCGNRDQNNLFVARRTCGYIGTQFWNQGRTQEIKDRVLHL

SEQ ID NO: 1067 - protein, 728 aa, Unknown
  Description of Unknown: uncultivated organism sequence
  Category: MG60 effectors
  Description: MG60-282 effector
MDAVHTNVIKRNGEEVCFNLDKIVNAITAANKEVDRLHQLNDYQVQAIADNIAKQIEIMTHAIHVEDIQDMVETGIMEMRGYEVAQKYVRYRYKRELARKSNTTDNGILALIDHLNEEVNQENSNKNPVINSTQRDYMAGEVSKDLTKRMLLPEEIVEAHEQGIIHFHDSDYFAQREHNCDLVNLEDMLQNGTVISETMIEKPHSFFTACNVTTQIVAQVASNQYGGQSFTLSHIAPFVDVSRKKIREQVIEERKMCGEALDEEVISKITESRLRAEVKSGIQTIQYQLITLMTCNGQAPFVTMFMYLDEVPEGQTRDDLAMIIEEVLQQRIQGVKNEKGIWITPAFPKLIYVLDKDNITEDSKYWYLTELAAKCTAKRMVPDYISAKVMRELKNGDVYPCMGCRSFPTSEDSQRNPDGTRKYYGRFNQGVVTINLVDVACSAEGHIDRFWEILESRLELCHRALRCRHERLLGTVSDVAPILWQHGALARLKKGETIDKLLFNGYSTISLGYAGLCEMCVRMTGKTHTSPEGKKLALEVMQKLNDKCKEWKEAENISYSVYGTPMESTTYKFAKCLQKRFGIIKGVTDKNYITNSYHIHVTEPVNAFDKLKFESEFQKLSPGGAISYVEVPNLQDNVEAVISVMKFIYDNILYAELNTKSDYCEICGYDGEIKIVTDENGKLVWECPNCGNRDQNNLFVARRTCGYIGTQFWNQGRTQEIKDRVLHL

SEQ ID NO: 1068 - protein, 725 aa, Unknown
  Description of Unknown: uncultivated organism sequence
  Category: MG60 effectors
  Description: MG60-283 effector
MKVIKRSGVETKFDVNKIILAISKANQSTEPEHRISDEEIRRISENIAAQCKKLRKSMNVEEIQDLVENELMSEGTHELAKNYITYRYSRALVRKANTTDAQIMSLIECNNEEVKQENSNKNPTVNSVQRDYMAGEVSKDITKRFLLPEDVVEAHEEGIIHFHDADYFAQHMHNCDLVNLEDMLQNGTVISGTLIEKPKSFSTACNIATQIIAQVASSQYGGQSISLSHLAPFVQVSRDRITKEVQEESRLTGLELSEEQIGIIVERRLRDEIKKGVQTIQYQVVTLMTTNGQAPFVTVFMYLNEVKDPKVREDLALIIEECLNQRYEGVKNEQGVWITPAFPKLIYVLEEDNIREDSKYWYLTKLAAKVTAKRMVPDYISEKKMLEYKIDKNGNGNCYPCMGCRSFLTPYVDENGKPKYYGRFNQGVVTINLVDIACSSNRDHDKFWKIFDDRMNLCHRALQARHNRLKGTLSDVAPILWQYGAIARLKKGEKIDKLLYGGYSTISLGYAGLWETVYYMTGKKMTEPEGTEFGLKIMEKLNEYTGKWKKAENIDYSLYGTPLESTTYKFARCLKKRFGIIEGVTDKNYITNSYHIHVTEPINAFEKLIFESRFQKLSPGGAISYVEVPNMQNNIEAVLEVIKCIYENIMYAELNTKSDYCQCCGYDGEILIVKDEDGKLVWECPRCGNRDQSKLNVARRTCGYIGTQFWNQGRTEEIKERVLHL

SEQ ID NO: 1069 - protein, 768 aa, Unknown
  Description of Unknown: uncultivated organism sequence
  Category: MG60 effectors
  Description: MG60-284 effector
MKIRSTNCIQRAKPGKVNKMNNIIKRSGKEVEFDKKKIENAIKKANAATETAAQMSEAEIVVVMDRILANLDLVPHAISVEEVQDEVEAQIAKIGAFKVAKNYITYRYTHELRREANTTDDKILSLLDLTNEEVKQENSNKNPVVNSVQRDYMAGETSKDLTRRILLPEDISKAHDDGLIHFHDTDYFAQKMFNCQLVDLEGMFNYGHRHGQEITTALSGHGISAPKSFSTAANIATQVIAQVASNQYGGQTITLTDFVGGRHADAINFVDVSRQKWIKKIAEENAAVGTEMTDEQIKKVAEIRLIDEIKSGIQLIQYQLITLQTTNGQAPFITVFMYLNEVYCDDAQKKEDLALLIKLMLEQRIKGVQDQKGNWITPAFPKLIYVLEDDNIEEGSKYYDLTVLAAKCTAKRMVPDYLSEKVMRQLKGDVYPPMGCRSFLTPDKEGMGDNGEHKYYGRFNQGVITINLVDIACSSKKNEDKFWEIFEDRMENLVHKGLRIRHERLLGTPSDVSPIHWQDGAVSRLQSGETIDKLLYNNYSTISVGYAGLAETVYYMKGLSHTSKEGREFGLKVMQFLNDKCAKWRAEENISYSVYGTPLESTTYKFAKCLQKRFGMIDNVTDKNYITNSYHVRVTEEINAFDKLTKEAAFQELSPGGAISYVEIPNLQNNIDAVLAIMKHIYNTIMYAELNSKSDLCECCGYDGEIQIVEDDNKKLIWKCPNCGNTDQTKMHVARRTCGYIGTQYWNQGRTQEIKERVMHVSNPEINL

SEQ ID NO: 1070 - protein, 720 aa, Unknown
  Description of Unknown: uncultivated organism sequence
  Category: MG60 effectors
  Description: MG60-285 effector
MKIIKRNGEEAVFDSRKIELAISKANLEAPMAEQMSAETIHNIAINIEKQCMSENHEMNVEDIQDIVEKEIMKAGAFDIAKKYITYRYQHELMRKANSTDKQIMSLLECQNEEVKQENSNKNSTVVSVQRDYMAGEVSKDITKRFLLDEDIVQAHNEGIIHFHDSDYFAQHMHNCDLVNLEDMLQNGTVISGTRIDTPHSFSTACNIATQIIAQVASSQYGGQSISLAHLAPFVDVSRKKISREMHRMEEETGVYYNEEQFNHIVKARLREEITRGVQTIQYQVVTLMTTNGQSPFVTVFMYLNEAKDEQTKADLALIIEEVLKQRYQGVKNEAGYWVTPAFPKLIYVLEEDNITEESKYFYLTELAAKCTARRMVPDYISEKKMKALKEGNCYPCMGCRSFLSVYHDENGKPKFYGRFNQGVVTLNLVDVACSSGGDYNKFWQILDERLKLCYRALMARHKRLLGTPSDVAPILWQNGALARLKKGEVIDKLLFGGYSTISLGYAGLCECVRYMTGKSHTDPEATPFALKVMKTLNDACEKWKERTNIGFSLYGTPMESTTYKFAKCLKRRFGEIEGVTDKNYITNSYHVHVTEPVDAFTKLTFESQFQELSPGGAVSYVEVPNMEGNIPAVIALLKHIYEKIMYAELNTKSDCCQKCGYTGEIRIVTDSDNKLVWQCPQCGNTDQSTMNVARRTCGYIGTQFWNQGRTQEIKERVLHL

SEQ ID NO: 1071 - protein, 723 aa, Unknown
  Description of Unknown: uncultivated organism sequence
  Category: MG60 effectors
  Description: MG60-286 effector
MRIIKRNGSEEDFNIEKIINAVKKANGSGEHKFLTDEQIEDVADYVEYKCNKIRRAVSVEEIQDMVEDQLMAKGAFELARRYVRYRYNRSLVRKANTTDNRILSLIECNNEEVKQENSNKNPTVNSVQRDYMAGEVSRDLTRRMLLPADIVEADKEGIIHFHDSDYFAQHMHNCDLVNLEDMLQNGTVISDTLIERPHSFSTACNIATQIIAQVASNQYGGQSISLAHLAPFVQVSREKIRRETLAEIEELGVHPTEEKINDIVEQRLRKEVNRGVQTIQYQVVTLLTTNGQAPFVTVFMYLNEAKNEQEKHDLAMIIEETLKQRHKGVKNEKGVWITPAFPKLIYVLEEDNITEDSKYWYLTELAAKCTAKRMVPDYISEKVMLQSKIDKNGEGHCFTCMGCRSFLTPYVDENGKPKYYGRFNQGVVTVNLIDIGLSAGKDLDKFWKIFDERMELCHRALQCRHERLTGTLSDAAPILWQYGALARLKKGEKIDKLLHGGYSTLSLGYAGLWECVYSLIGKKLTEKEGKELGLKIMQKLNDYCAKWKKEENIDYSIYGTPLESTTYKFAKCLQKRFGIIKGVTDKNYITNSYHVHVTENIDAFSKLKLESEFQALSPGGAISYVEVPNMQDNIPAVLQVIKFIYDNIMYAELNTKSDYCQVCGYDGEIKIVHDDGKLVWECPNCGNRDQDKMNVARRTCGYIGTQFWNQGRTQEIEERVLHL

SEQ ID NO: 1072 - protein, 755 aa, Unknown
  Description of Unknown: uncultivated organism sequence
  Category: MG60 effectors
  Description: MG60-287 effector
MSKYPETLIGDWLKDSGNWFLDEEMECVGRMSRALYPYKSMFSPIRVNGITLKNRLVMAPMGNISQAEETGRPNQSMIAYFEERAKGGVGLITSGLIPVSFGIDHTLTEPGGLTYFPKILGSRTFFSGWRDIAHNTHSAGAHFFIQLTAGLGRVGNPQCLVNQHKFPVSASLNPNYYLPAVPCLRISGRKLKKIVKNFGQAAADAKTATIDGVYLHGHEGYLLEQMSNTAFNRRKWGRYADWQAFGLDIVREIRKRTGPDYPIMYRINLSLALNATYGKRMQTVKTLKKFSNERTIEQTLDYMKNLVQAGVDMFDVDLGCYDNWWLPHPPTTMKPGVFLEVAKLVKDHFAENSIVSNKGLPVPIVAVGKLGYPDLAEKAIADEMCDMVMLGRPLLADPMWPRKAYAGQVQEIRPCIGCQEACINEFVEGGHPSCAVNPRTSHESTLPEKPLPAPIKKKVAVVGAGPAGFECAMAALDRGHEVHLIDKQEGVGGMVRLAAIPAFKRDVTNYLEWMERTVDQRVKDNPDFQLMLNTEATLYMLEDGKYDAIVCATGSREKTPGVEGLEKAVFARALLLDTSLLDGKEKIVVVGGGTVGCEVALMLAAEYGRKVTVLEMLPTLMSHVSTANRTHLIHELEKHSVTLINCAKLEKIEDNSVAVYVNESPTVPDPYNTWNPVLPENVPNPLAKPIKSEYKMRSIDADLVVLAVGHEQDNTLHRLIKDAYITPELHLLGDAAHTGMIMHAVRAGYRTGLSI

SEQ ID NO: 1073 - protein, 642 aa, Unknown
  Description of Unknown: uncultivated organism sequence
  Category: MG60 effectors
  Description: MG60-288 effector
MKVIKRDGRVVDFNREKIAIAIEKANQEVTEKERADKQDIKDIIKYIESLDKKRILVEDVQDIIEEQLMDKKKFKLAKKYMIYRYNRALVRKKNTTDESILGLIKNQNMEMLEDGTRKNAVLASSQRDYIAGEVSKDLTKRLLLPEKIVKAHEEGVLYFHDMDYFLQPIFNSSVISIGDMLDNGTVINGKLIESPKSFRVACTVLAQILATVASTQYGGQSVDISHLGKYVRKSYEKFKEEFEQDLGGKLSEEILDKKIKEEVTSGVQTLQYQINTLMTTNGRSPLVSLFMYLREDDEYIKENALIIEEILKQRIEGMKDSEGKYINPEFPKLIYVIDENNCLNGEKYDYLTQLALECANKTQEPSFISAKKMRENYSGNVFSPMGFRSFLTPWKDENGTYKFEGRFNQGIVSINLPQIAIVADGDEDKFFSLLDERLELCHEALLCRHYALLGTVSDTSPIHWIYGAIAHLKSGEKIDKYLKDGYSTISLGYVGVYEATMMMKEVSNTEPNGKEFAIKIVKHLKETVEKWKKASGLGFCLYGETSQKVCKTFERIDKERFGVIKNVTDKEKYTSSYHASEDEKIDYKEKLAFESVFQKLSLGGVVSQIPSEYIGELSDKEEFIKFVYDNVQYLEFTKELKK

SEQ ID NO: 1074 - protein, 728 aa, Unknown
  Description of Unknown: uncultivated organism sequence
  Category: MG60 effectors
  Description: MG60-289 effector
MDAVHTNVIKRNGEEVNFDLDKIVNAINAANKEVDRLHQLNDYQVQAIADNIAKQIEIMTHAIHVEDIQDMVETGIMEMRGYEVAQKYVRYRYKRELARKSNTTDNGILALIDHMNEEVNQENSNKNPVINSTQRDYMAGEVSKDLTKRMLLPKEIVEAHEQGIIHFHDSDYFAQREHNCDLVNLEDMLQNGTVISETMIEKPHSFFTACNVTTQIVAQVASNQYGGQSFTLSHIAPFVDVSRKKIREQVIEERKMCGEALDEEVISKITESRLHAEVKSGIQTIQYQLITLMTCNGQAPFVTMFMYLDEVPEGQTRDDLAMIIEEVLQQRIQGVKNEKGIWITPAFPKLIYVLDKDNITEDSKYWYLTELAAKCTAKRMVPDYISAKVMRELKNGDVYPCMGCRSFPTSEDSQRNPDGTRKYYGRFNQGVVTINLVDVACSAEGHMDRFWEILESRLELCHRALRCRHERLLGTVSDVAPILWQHGALARLKKGETIDKLLFNGYSTISLGYAGLCEMCVRMTGKTHTSPEGKKLALEVMQKLNDKCKEWKEAENISYSVYGTPMESTTYKFAKCLQKRFGIIKGVTDKNYITNSYHIHVTEPVNAFDKLKFESEFQKLSPGGAISYVEVPNLQDNVEAVISVMKFIYDNILYAELNTKSDYCEICGYDGEIKIVTDENGKLIWECPNCGNRDQNNLFVARRTCGYIGTQFWNQGRTQEIKDRVLHL

SEQ ID NO: 1075 - protein, 765 aa, Unknown
  Description of Unknown: uncultivated organism sequence
  Category: MG60 effectors
  Description: MG60-290 effector
MSEKHHSHCLDAMEINDLQCIVRVRSILYRNIKEGVIMDAVHTNVIKRNGEEVNFDLDKIVNAINAANKEVDRLHQLNDYQVQAIADNIAKQIEIMTHAIHVEDIQDMVETGIMEMRGYEVAQKYVRYRYKRELARKSNTTDNGILALIDHMNEEVNQENSNKNPVINSTQRDYMAGEVSKDLTKRMLLPKEIVEAHEQGIIHFHDSDYFAQREHNCDLVNLEDMLQNGTVISETMIEKPHSFFTACNVTTQIVAQVASNQYGGQSFTLSHIAPFVDVSRKKIREQVIEERKMCGEALDEEVISKITESRLRAEVKSGIQTIQYQLITLMTCNGQAPFVTMFMYLDEVPEGQTRDDLAMIIEEVLQQRIQGVKNEKGIWITPAFPKLIYVLDKDNITEDSKYWYLTELAAKCTAKRMVPDYISAKVMRELKNGDVYPCMGCRSFPTSEDSQRNPDGTRKYYGRFNQGVVTINLVDVACSAEGHMDRFWEILESRLELCHRALRCRHERLLGTVSDVAPILWQHGALARLKKGETIDKLLFNGYSTISLGYAGLCEMCVRMTGKTHTSPEGKKLALEVMQKLNDKCKEWKEAENISYSVYGTPMESTTYKFAKCLQKRFGIIKGVTDKNYITNSYHIHVTEPVNAFDKLKFESEFQKLSPGGAISYVEVPNLQDNVEAVISVMKFIYDNILYAELNTKSDYCEICGYDGEIKIVTDENGKLVWECPNCGNRDQNNLFVARRTCGYIGTQFWNQGRTQEIKDRVLHL

SEQ ID NO: 1076 - protein, 733 aa, Unknown
  Description of Unknown: uncultivated organism sequence
  Category: MG60 effectors
  Description: MG60-291 effector
MKIIKRNGKEVDFDVTKIQNAIRKESKATIDECLSEEEIKEISDYLTFKIGKLHYSPNVEEIQHMVQKQIMAAGKFNIATNYIEYRYKHDLMRKANSTDDVILSIIDRDNEEIKQENSNKNPTVNSVQRDYMAGEISKDLTSRIILPEDVLQAHKEGIIHVHDMDYFVQHMHNCDLVNLEDMLQNGTVISETMIEKPHSFSTACNITTQIIAQVASNQYGGQSISLAHLAPFVDISRKKIRKQLIEEEAATGIKLDEKQLDSVIELRLKEEIKRGIQMIQYQVVTLETTNGQTPFITESMYLNEAKNEQEKHDLAMLIEETLKQRIQGVKNENGVWITPAFPKLIYILEEDNINEDAPYYYLTELAAKCTAKRMVPDYVSEKIMLELKGDVYPPMGCRSFLTPDRFTDEGVGNISNANNYESDKHKYYGRFNQGVVTINLVDVALSSKGNINDFWKIFDERLNLCKKALICRHKRLLGTTSDAAPILWQHGALARLKKGEKIDKLLFNGYSTISLGYAGLYECTYYMTGKSHTDDNGGKPFAIAVMEYLNDKCNEWKKETNIDFSLYGTPLESTTYKFAKCLQKRFGKIENVTDHNYITNSYHVCVRENIDAFTKLKFESEFQKLSPGGCISYVEVPNMLNNIPAVLQVIKYIYDNIMYAELNTKSDYCQCCGYDGEIQIVENEDGKLIWHCPKCGNEDQEKMNVARRTCGYIGTQFWNQGRTQEIKDRVLHL

SEQ ID NO: 1077 - protein, 765 aa, Unknown
  Description of Unknown: uncultivated organism sequence
  Category: MG60 effectors
  Description: MG60-292 effector
MSEKHHSHCLDAMEINDLQCIMRVRSILYRNIKEGVIMDAVHTNVIKRNGEEVNFDLDKIVNAINAANKEVDRLHQLNDYQVQAIADNIAKQIEIMTHAIHVEDIQDMVETGIMEMRGYEVAQKYVRYRYKRELARKSNTTDNGILALIDHMNEEVNQENSNKNPVINSTQRDYMAGEVSKDLTKRMLLPKEIVEAHEQGIIHFHDSDYFAQREHNCDLVNLEDMLQNGTVISETMIEKPHSFFTACNVTTQIVAQVASNQYGGQSFTLSHIAPFVDVSRKKIREQVIEERKMCGEALDEEVISKITESRLRAEVKSGIQTIQYQLITLMTCNGQAPFVTMFMYLDEVPEGQTRDDLAMIIEEVLQQRIQGVKNEKGIWITPAFPKLIYVLDKDNITEDSKYWYLTELAAKCTAKRMVPDYISAKVMRELKNGDVYPCMGCRSFPTSEDSQRNPDGTRKYYGRFNQGVVTINLVDVACSAEGHMDRFWEILESRLELCHRALRCRHERLLGTVSDVAPILWQHGALARLKKGETIDKLLFNGYSTISLGYAGLCEMCVRMTGKTHTSPEGKKLALEVMQKLNDKCKEWKEAENISYSVYGTPMESTTYKFAKCLQKRFGIIKGVTDKNYITNSYHIHVTEPVNAFDKLKFESEFQKLSPGGAISYVEVPNLQDNVEAVISVMKFIYDNILYAELNTKSDYCEICGYDGEIKIVTDENGKLIWECPNCGNRDQNNLFVARRTCGYIGTQFWNQGRTQEIKDRVLHL

SEQ ID NO: 1078 - protein, 733 aa, Unknown
  Description of Unknown: uncultivated organism sequence
  Category: MG60 effectors
  Description: MG60-293 effector
MKILKRNKVEVEFDSSKIVNAITKANNSVLEAERLGSECINKIASEVVSDCEALDRVVSVEEVQDMVEKKIMEAGAYQVAKNYITYRYTRQLQRQKNTTDDAILSLVAHKNEEAKEENANKNPIIASTQRDYVAGEVSKDLTMRVLLNDPEIAEAHENGIIHFHDADYFLQTIHNCDIWNLDDMLQNGTVISGVMIDKPKSFATACNIATQIVAQVASSQYGGQTFSLAHLAPFVDVSRQKWAKKIRKDMEEAGVSYTDAQFDQLVENRVREEIQNGVQTIQYQLVTLMTTNGQTPFVSVFMYLDEVPEGRTRDDLAMIIEEVLVQRKKGLKNKVGHWVVTAFPKLLYVLDEDNIYPDSKYYYLTKLAAECTAKTMVPDYISAKKMREFKGDVYACMGCRSFLTPDRFTDAGVGNIAKAKNYVPGQHKYYGRFNQGVVTINLVDVACSSYKDMDKFWQILNDRLELCHRALQKRHKRLKGTLSDVAPILWQYGALARLEPGEVIDPLLYDGYSTISLGYAGVYEMTRYMTGESHTEPNGQAFALKVMNALNDACAKWKKEENIDYSLYGTPMESTTYKFAKCLQKRFGIIPEVTDHSYITNSYHICVREPIDAFEKLSKEAEFQRLSPGGAISYVEVPNMQNNIPAVLAVMTHIYNTIMYAELNTKADYCQVCGYEGEIDLVNQEGKWIWKCPQCGCTDHSKMNIARRVCGYISTNDMNNGRKHEIAERVLHL

SEQ ID NO: 1079 - protein, 722 aa, Unknown
  Description of Unknown: uncultivated organism sequence
  Category: MG60 effectors
  Description: MG60-294 effector
MQVIKRNGTEVPFDETKIVNAITAANNGAGGRLTASQISEITDFVSFKCQKLHRSVSVETIQDMVEQQLMASGEYNVAKHYITYRYKRAEIRRGNTTDAKILSLVDCNNEEAKQENSNKNPTVNSVQRDYIAGEVSRDITERTLLPEDVVQAHKSGIIHFHDTDYYAQRMHNCDLVNLEDMLQNGTVISGTLIEKPHSFSTACNIATQIIAQVASNQYGGQSISLAHLAPFVQVSREKIRRELREEMEISDTQISPEAFNTIVETRVRREVNKGIQTIQYQVVTLLTTNGQAPFLTVFMYLNEAKDEQEKKDLAIIIEETLKQRIEGVKNEKGHWITPAFPKLIYVLEEDNITKDSKYWYLTELAAKCTAKRMVPDYISEKIMKQLKEGNCFPVMGCRSNLSPWKDENGNYKFYGRFNQGVVTINLVDVALSSHGNMEEFWRIFDERLALCYKALMCRHNRLKGTLSDAAPILWQYGAIARLKKGEKIDKLLYGGYSTISLGYAGLAECVRYMTGKSHTDPTATPFALAVMKHMNAACDEWKRETNIGFGIYGTPLESTTYKFAKCLQERFGIIEGVTDKNYITNSYHIPVTEQINAFDKLKFEAQFQALSTGGAISYVEVPNLEHNIDAVMKIITFIYDNIMYAELNTKSDYCQVCGYDKEIQIVTDENTGKLVWECPNCGNRDQNKMNVARRTCGYIGSQFWNQGRTQEIKDRVMHLSLE

SEQ ID NO: 1080 - protein, 728 aa, Unknown
  Description of Unknown: uncultivated organism sequence
  Category: MG60 effectors
  Description: MG60-295 effector
MDAVHTNVIKRNGEEVNFDLDKIVNAINAANKEVDRLHQLNDYQVQAIADNIAKQIEIMTHAIHVEDIQDMVETGIMEMRGYEVAQKYVRYRYKRELARKSNTTDNGILALIDHMNEEVNQENSNKNPVINSTQRDYMAGEVSKDLTKRMLLPEEIVEAHEQGIIHFHDSDYFAQREHNCDLVNLEDMLQNGTVISETMIEKPHSFFTACNVTTQIVAQVASNQYGGQSFTLSHIAPFVDVSRKKIREQVIEERKMCGEALDEEVISKITESRLRAEVKSGIQTIQYQLITLMTCNGQAPFVTMFMYLDEVPEGQTRDDLAMIIEEVLQQRIQGVKNEKGIWITPAFPKLIYVLDKDNITEDSKYWYLTELAAKCTAKRMVPDYISAKVMRELKNGDVYPCMGCRSFPTSEDSQRNPDGTRKYYGRFNQGVVTINLVDVACSAEGHIDRFWEILESRLELCHRALRCRHERLLGTVSDVAPILWQHGALARLKKGETIDKLLFNGYSTISLGYAGLCEMCVRMTGKTHTSPEGKKLALEVMQKLNDKCKEWKEAENISYSVYGTPMESTTYKFAKCLQKRFGIIKGVTDKNYITNSYHIHVTEPVNAFDKLKFESEFQKLSPGGAISYVEVPNLQDNVEAVISVMKFIYDNILYAELNTKSDYCEICGYDGEIKIVTDENGKLIWECPNCGNRDQNNLFVARRTCGYIGTQFWNQGRTQEIKDRVLHL

SEQ ID NO: 1081 - protein, 719 aa, Unknown
  Description of Unknown: uncultivated organism sequence
  Category: MG60 effectors
  Description: MG60-296 effector
MKIIKRNGSEETFDIQKIVVAVTKADKDNGERTLTDSQIEDIAEYVEFKCNKLNRAVSVEEIQDMVENQIMATGAFELARKYVRYRYKRSLVRKANTTDNRILSLIEYNNEDVKQENSNKNPAVNSVQRDYMAGEVSRDLTTRMLLPHDIVEADREGIIHFHDSDYYAQHMHNCDLVNLEDMLQNGTVISGTMIEKPHSFSTACNIATQIIAQVASNQYGGQSISLAHLAPFVDVSREKIRKEVISEQELVGMEYPEDVLNEIVERRLKKEITKGVQTIEYQVITLMTTNGQAPFLTVFMYLNEAKNEREKKDLAMIIEETLRQRYQGVKNEAGVWVTPAFPKLIYVLEEDNIEEGSEYYYLTELAAKCTAKRLVPDYISEKKMKELKEGNCFPVMGCRSCLSPWKDENGNYKFYGRFNQGVVTINLVDVALSSGGDMDKFWKIFDDRLELCYRALMCRHNRLKGTLSDAAPILWQFGALARLKKGEPIDKLLYGGYSTISLGYAGLYECVKYMTGKSHTDPDATPFALDVMKHMNDACNQWKEETNVAFSIYGSPIESTTYKFAKCLQKRFGIVPGITDKSYITNSYHVFVREEIDAFSKLKFESQFQALSSGGAISYVEVPDMKDNIAAVLQVIRFIYDNIMYAELNTKSDYCQECGYDGEIQIITDEEGKLVWECPHCGNRNQDTLNVARRTCGYIGTQFWNQGRTQEIKERVLHL

SEQ ID NO: 1082 - protein, 708 aa, Unknown
  Description of Unknown: uncultivated organism sequence
  Category: MG60 effectors
  Description: MG60-297 effector
MKVVKRDGRVVDFDRSKIVTAIQKANAEVRPKERANKEEVKSVIEYIESLDKKRILVEDIQDIIEEQLMAIGKYELAKKYIVYRYTRALVRKSNTTDESILKLIKNENKELAEENSNKNTMLASTQRDYIAGEVSRDLTRRILLPEKISKANDEGILHFHDADYFIQPIFNCCLINIGDMLDNGTVMNGKMIESPKSFQVACTVLTQIIAAVASNQYGGQSVDLIHLGKYLRRSYNKYRKAIEEKYKNKIPEHIIEDIVQERLRAELKSGVQTIQYQINTLMTTNGQSPFVTLFLHLEKDDPYIKENAMIIEEVIRQRYEGIKNEAGVYVTPAFPKLVYVIDDFNNLTGGEYDYLTELAVKCSAKRMYPDYISAKKMRENYEGNVFSPMGCRSFLSPWKDENGNYKFEGRFNQGVVSINLPQIAIIADGDEEKFWKLLDERLELCKEALMCRHNALVGTSSDISPIHWQYGAIARLKKGEKIDKLLYGGYSTMSLGYIGIYEMTKLMTGVSHTDPKGHEFAIKVMNHLRETTDRWKKETNIGFALYGTPAESLCYKFARIDKEKFGTIKDVTDKGYYTNSYHVDVREKIDAFDKLKFESEFQKISSGGAISYIEIPNMQNNLEALRSVVKFIYDNIQYAEFNTKSDYCHVCGYDGEIKINDDNEWECPNCGNKDHNKMTVVRRTCGYLGENFWNAGKTKEIKQRVLHL

SEQ ID NO: 1083 - protein, 724 aa, Unknown
  Description of Unknown: uncultivated organism sequence
  Category: MG60 effectors
  Description: MG60-298 effector
MNVIKRSGEEVVFDASKIENAIKKANKATTHNQMSDELIRSVTQSVIDKCENLKRSPNVEEIQDMVEGELMEHRCFAVAHNYITYRYERALVRKANSTDKQIMSLLERNNEEVKQENSNKNPLVNSVQRDYMAGEVSKDITKRFLLPQDVMEAHEQGIIHFHDSDYFAQHMHNCCLVNLEDMLQNGTVISETMIEKPHSFSTACNVATQIIAQVASSQYGGQSITLSHLAPFVQVSREKARREVKEELESLNLDSSEDTVNKMAEMRVRKEIEKGVQMIQYQVITLMTTNGQAPFVTVFMYLNEVPEGQTRDDLAIIIEEMLKQRIKGVKNEKGIWITPAFPKLIYVLEENNIEEGSKYWYLTELAAKCTAKRMVPDYISEKKMLELKVDVNGEGHCYPCMGCRSFLTTYLDENGKPKYYGRFNQGVVTLNLVDVACSSKQDEEAFWRIMDERLALCKKALMCRHERLLGTPSDVAPILWQNGALARLKKGEPIDKLLFGGYSTISLGYAGLCECVYYMTGHPHTEEPGTSFGLKVMQYLNDACAKWKAEENIDFSLYGTPMESTTFKFSKHLQERFGIIPHVTDKNYITNSYHVHVTEEIDAFTKLSFESQFQKLSPGGAISYVEVPNMENNIDAVLAIMKHIYNHIMYAELNTKSDYCQVCGYTGEIKIVEDENHKLVWECPNCGNRDQEKMNVARRTCGYIGTQFWNQGRTQEIKERVLHL

SEQ ID NO: 1084 - protein, 727 aa, Unknown
  Description of Unknown: uncultivated organism sequence
  Category: MG60 effectors
  Description: MG60-299 effector
MRKKPSMIIKRDGSKVLFDPKKIELAITKALISEGVASIFTGTAQAIAKSFESENETPTIKEIEEYVFKSLCEAGLPLVAKAYEGYRSIREFQRSDQFTDESILSIVAGGTDEDLRDENSNKNVATASTQRDMIAGEASKDIAMRHMLPPHVVQAHKDGLIHFHDLDYAVQRIFNCCLVDLRGPFKDGTVINKKMIETPRSFRTACTVATQIVQQVACGQYGGQTISLAHLAPYVRVSYEKIKNQVREELFGDDVPLASPTKLCGNREVEHIAKKRLRKEIEDGLQTIQYQVNTFSTSNGQAPFLSIFMYLNEDPEYIEETAMLIEEMIKQRYIGMKNEAGVYVTPAFPKLLYVLDENNVPKDSKYRYLTDLAVKCVARRMMPDFISAKKMKENYEDVFPCMGCRSFLSQYRDKDGKLKWYNRFNQGVVTLNLADAGLSADGNIDAFWKILDERLELVHDGLMCKHKSLLGTKAEKSPIHWQHGVIARLKKDDVIDPYLKDGYSTLSLGYIGLHECVLALIGESHTTERGEELAVRIMRRLRKACDDWRAESGLGFSLYGSPSESTTYRLAQTTQKRFGVVKGITDRDYLTNSYHVDVTEKINAFDKLRFESQFQKISSGGCISYVEVPNLEQNLEVIDQLVSYMYETIQYAEINTKSDYCAKCGFRGEIKLNNNLDWECPQCHTVNRDDLTVCRRTCGYLGDNFWNKGRTEEIGARVLHVDNEDLS

SEQ ID NO: 1085 - protein, 719 aa, Unknown
  Description of Unknown: uncultivated organism sequence
  Category: MG60 effectors
  Description: MG60-300 effector
MKIIKRNGSEAAFDITKIIAAVTKANNADGQSRELTGEQIRAIAAEVEEKCGAMGRAPSVEEIQDMVENQIMGRNAFEVAKRYIRYRYTRSLARRANTTDNQILSLIECNNEEAKQENANKNPTVNSVQRDYMAGEVSKDITRRILLPQEIVEAHEQGIIHFHDSDYFAQHMHNCDLVNLEDMLQNGTVITGTLIEKPHSFSTACNIATQIVAQVASNQYGGQSISLAHLAPFVQVSREKIRGEVLAELEELGTTASEDKIAQIVERRLRAEVERGVQTIQYQVVTLMTTNGQAPFITVFMYLNEAKNEREKRDLAMIIEEVLLQRYEGVKNEKGVWVTPAFPKLIYVLQEDNVAPGAEYYYLTELAAKCTAKRMVPDYISEKKMKELKEGNCFPVMGCRSALSPWKDENGNYKFYGRFNQGVVTLNLVDVALSSGGDMDRFWKIFDERLDLCYRALMCRHNRLKGTLSDAAPILWQYGAIARLKKGEPIDKLLYGGYSTISLGYAGLCECVRYMTGKSHTDPSATPFALAVMKYMNTACERWKAETTIGFGIYGTPLESTTYKFAKCLQKRFGIVPGVTDKPYITNSYHVHVTEEIDAFAKLAFEAQFQALSTGGAISYVEVPNMQQNLEAVLQIIRYIYDNIMYAELNTKSDYCQACGFDGEIRIVEDDGKLVWECPNCGNRDQDTMNVARRTCGYIGTQYWNQGRTAEIKERVLHL

SEQ ID NO: 1086 - protein, 729 aa, Unknown
  Description of Unknown: uncultivated organism sequence
  Category: MG60 effectors
  Description: MG60-301 effector
METAVNTNVIKRNGEEVKFDLSKIENAIFAANKEVDKLHQLSDYQVYAIADNLAKHIEEMTHAVHVEDIQDMVETGIMEMRGYEVAQKYVRYRYKRELARKSNTTDNGILSLIEHMNEEVNQENSNKNPVINSTQRDYMAGEVSKDLTKRMLLPEDIVEAHEAGIIHFHDSDYFAQKEHNCDLVNLEDMLQNGTVISETMIEKPHSFFTACNVTTQIVAQVASNQYGGQSFTLSHIAPFVDVSRKKIRKQVIEERTELGEPLDDDIIDKITEKRLLLEVKSGIQTIQYQLITLMTCNGQAPFVTMFMYLDEVPEGQTRDDLALIIEEVLNQRIIGVKNEKGFYITPAFPKLIYVLDEDNITPGSKYWYLTELAAKCTAKRMVPDYISAKVMREMKNGDVYPCMGCRSFPTSEPNILNPDGTRKYYGRFNQGVVTINLVDVACSSDGDMDEFWKILEERLELCHRALRCRHERLLGTLSDVAPILWQHGALARLKKGEKIDKLLYNGYSTISLGYAGLCEMCVRMTGKTHTSPEGKDFALKVMQKLNDKCAEWKKAENISYSVYGTPMESTTYKFAKCLQKRFGIIKGVTDKNYITNSYHVHVTEHIDAFSKLKFESEFQKLSPGGAISYVEVPNLTNNIEAVISVMQFIYDNILYAELNTKSDFCEKCLYDGEMRIVTDDSGKLVWECPNCGNRDQNNLFVARRTCGYIGTQFWNQGRTQEIKDRVLHL

SEQ ID NO: 1087 - protein, 850 aa, Unknown
  Description of Unknown: uncultivated organism sequence
  Category: MG60 effectors
  Description: MG60-302 effector
MANNVTEIEEKSKSFLYHLVKYYKIFIDTCSLLSIRANKFWEHITPILKAQNASVIVPYRVYEEVEKYADNLELCKKKVPNDPNFNLTAKKAKKKILSLYEQGLVKIFGDKTDNFADNVFQTVFTKFRMKYNLLLITQDKDLASDIMKISESKSVMANNKILVRKINNYGYLSAVEKIKVDVNKNEPKKSVVNTVHNGSQKKKVQVSVAVPEDEIFAHTDTITVVTGSVNVSEYPKENCIVTAKRGGNSKTIHLLSKVSSGGEGIIYTTDIPNVVAKIYKPQKVDRAKFEKLKLMMTKNINCPGVCFPIALLYNTKGEFVGYLMNKAKGIELQKGIFIPRLLQKHFPNWKKKDTVQLCITILKKFKYLHDRNIILGDINPNNILVVSPTEVYFVDTDSYQIEGYPCPVGTINFTAPEIQGKRYDEFLRTLGNEQFAVATLLFMIMLPGKPPYALQGGESQSDNIINGDFAYASGERTNGKAPEGAWRYIWSHMPRYLKDDFYETFHKDGAQHSENSRFSDDDWIKKFEYYEKLLTEENSKFLANDSMSGELIPNRLKKVANVTYVRCKLCGREVDEERTEQGYCSDCLRKGETYNCSRCGNEMVYTNYQRLIRHSHKFDTCKACNDKLNSIYRRYPCRNPRCNNMVEITFRYKEKLEQNNKPLPTVCKDCRNEVYATRRCSICNRVFDITFSEKEYYDSKGYDFPKKCPNCRGVKIPVHRGSSYYNTPRTYNNSIPQPTQKKKSSFCFITTAVCKYFNKPDDCYELTLLRKFRDTWLVKQPGGNELVKEYYSVAPNIVTALDNYSEKDKVYIHIWNNYIKPCIKLIELGANDTCKDLYMNMVNELKEKFN

SEQ ID NO: 1088 - protein, 747 aa, Unknown
  Description of Unknown: uncultivated organism sequence
  Category: MG60 effectors
  Description: MG60-303 effector
MRIIKRSGKEVEYDGSKIIKAIQKANAEVATNERLSDTKIQAIEEDTRAILEELTHTANIEEIQDIVIHQIMKMQAYRLAQVYTEYRYKQALKRKNNSTDDGILALIERQNEELNQENSNKNPVIASTQRDYIAGEVSKDITDRLLLPTDVLEAHRKGIIHFHDRDYFLMHIYNCCLINLEDMLQNGTVITETMIEKPHSFATAANVATQIIAQVASNQYGGQTFNLAHLAPFVDISRQKHIKHYREDITDAITSVPILGKLLTPIMDKIVDPLAKFLGERALKREIRSGIQTIQYQLVTLMTTNGQTPFVSMFMYLKDAKNETERDDLAMLMEEVLRQRIAGIKNEQGVPITPAFPKILFVLDTLTMDPNSKYHYLKELAAECTAKRMVPDYISEKKMLEYKGDVYGCMGCRSFLTPDRFTDKGIGNIARAKNYQEGVHKYWGRFNQGVVTINLPYIACLSEKNMTKFWEILDQYLELCHKALRIRHERLMNTPADVAPILFRYGAIARLDKGEVINDLLFHGYSTISLGYAGLYEMCKYMTGKSHTDPDAKPFALSVMQRMNDACAKWKAEEDIDYSIYGTPIESTTYRFAQKLQEQFGIIPDVTDHNYITNSYHINVREEIDAFSKLKFESEFQALSPGGAISYVEVPDLQNNLKAVEAIQDCIYNEILYAEINTKSDYCQVCGYDGQIEIIEDDHKKLIWKCPNCGNTDQNKMNVARRTCGYIGTQFWNQGRTQEIKDRVLHI

SEQ ID NO: 1089 - protein, 634 aa, Unknown
  Description of Unknown: uncultivated organism sequence
  Category: MG60 effectors
  Description: MG60-304 effector
MKVIKRDGRVVDFNREKIAIAIEKANQEVTEKERADKQDIKDIIKYIESLDKKRILVEDVQDIIEEQLMDKKKFKLAKKYMIYRYNRALVRKKNTTDESILGLIKNQNVEMLEDGTRKNAVLASSQRDYIAGEVSKDLTKRLLLPEKIVKAHEEGVLYFHDMDYFLQPIFNSSVISIGDMLDNGTVINGKLIESPKSFRVACTVLAQILATVASTQYGGQSVDISHLGKYVRKSYEKFKEEFGGVPSKEILDKKIKEEVTSGVQTLQYQINTLMTTNGRSPLVSFFMYLREGDEYIKENALIIEEILKQRIEGMKDAEGEYINPEFPKLIYAIDENNCLNGEKHDYLTQLALECANKTQEPSFISAKKMRENYSGNVFSPMGFRSFLTPWKDENGTYKFEGRFNQGIVSINLPQIAIVADGDEDKFFSLLDERLELCHEALLCRHYALLGTVSDTSPIHWIYGAIAHLKSGEKIDKYLKDGYSTISLGYVGVYEATMMIKEVSNTEPDGKEFAIKIVKYLKETVEKWKKASGLGFCLYGETSQKVCKTFERIDKERFGVIKNVTDKEKYTSSYHASEDEKIDYKEKLAFESVFQKLSLGGVVSQIQSKYIGKLSDKEEFIKFVYDNVQYLEFTK

SEQ ID NO: 1090 - protein, 708 aa, Unknown
  Description of Unknown: uncultivated organism sequence
  Category: MG60 effectors
  Description: MG60-305 effector
MKVVKRDGRVVDFDRSKIVTAIQKANAEVRPKERANKEEVKSVIEYIESLDKKRILVEDIQDIIEEQLMAIGKYELAKKYIVYRYTRALVRKSNTTDESILKLIKNENKELAEENSNKNTMLASTQRDYIAGEVSRDLTRRILLPEKISKANDEGILHFHDADYFIQPIFNCCLINIGDMLDNGTVMNGKMIESPKSFQVACTVLTQIIAAVASNQYGGQSVDLIHLGKYLRRSYNKFKKAIEEKYKNKIPEHIIEDIVQERLRTELKSGVQTIQYQINTLMTTNGQSPFVTLFLHLEKDDPYIKENAMIIEEVIRQRYEGIKNEAGVYVTPAFPKLVYVIDDFNNLTGGEYDYLTELAVKCSAKRMYPDYISAKKMRENYEGNVFSPMGCRSFLSPWKDENGNYKFEGRFNQGVVSINLPQIAIIADGDEEKFWKLLDERLELCKEALMCRHNALVGTPSDISPIHWQYGAIARLKKGEKIDKLLYGGYSTMSLGYIGIYEMTKLMTGVSHTDPKGHEFAIKVMNHLRETTDRWKKETNIGFALYGTPAESLCYKFARIDKEKFGTIKDVTDKGYYTNSYHVDVREKIDAFDKLKFESEFQKISSGGAISYIEIPNMQNNLEALRSVVKFIYDNIQYAEFNTKSDYCHVCGYDGEIKINDDNEWECPNCGNKDHNKMTVVRRTCGYLGENFWNAGKTKEIKQRVLHL

SEQ ID NO: 1091 - protein, 716 aa, Unknown
  Description of Unknown: uncultivated organism sequence
  Category: MG60 effectors
  Description: MG60-306 effector
MLEVIKRNGERVPFNRDKITNAIEKAMNSSSGIYEEGQAAKIASEIEAYAASIQKDLTIYAIEDQVYYRLLKYNNPATARAYENYKTIQAFKRQTNTTDDDVFGLLNNTNLEVLDENSNKNGHVVSTQRDLIAGEVSKDIARRKLIPADIVQAHDSGAIHFHDMDYIIQPMFNCCLINLEDMLANGTVINGKKIDTPKSFQVACTVTTQIIAQVASGQYGGQSINGIDRILAPYVRKSFKKYMKAVVEEQREVYGIEPDMEKAEEIAWKRTKKEIKDGIQTIQYQINTLMTTNGQAPFVTLFMYFKPDYEYAKEAALIDEELLRQRIQGIKNEANVYVTPAFPKLIYVLDEHNVREGSPYFYLTKLAAECTAKRMYPDYISAKKMRESYEGNVFSPMGCRSFLSPWKDEQGNYKFDGRFNMGVVSLNLPQIGILADGDEEKFFQILDKRLELCKKALLLRVDLLKRITSDVSPIHWQYGAIARLKPGETIEKFIYGGYATLSLGYIGIYEATMLTKHCSHTTAEGRKFAMRIMDDLNAHIKKWRKETNIGFALYGTPAENLTNLFCKIDKARFGSIPDVTDKGYYTNSYHVDVREPINVFDKFSFEADFEDKSTGGCISYAEIPNMTHNIPAVLTMVQYIYDHIAYGEFNTKLDYCHECGFDGEIILNDDNEWECPRCHNKDRNKLTVIRRTCGYLGENFWNEGRTQEIKNRVLHI

SEQ ID NO: 1092 - protein, 740 aa, Unknown
  Description of Unknown: uncultivated organism sequence
  Category: MG60 effectors
  Description: MG60-307 effector
MKIIKRSGSEATFDISKIVNAIKGANGEVAPEERLTDDQIALAAHSVEWLCNRSGHTVSVEEIQDMVENQIMAQGRYTVARKYIIYRYLQTLKRQSNTTDDKILSLIECNNEEAKQENSNKNPTVNSVQRDYMAGEVSKDITMRLLLPADVVEAHNEGIIHFHDSDYFAQHMHNCDLVNLEDMLQNGTVISGTLIERPHSFSTACNIATQIIAQVASCQYGGQSISLTHLAPFVEVSRQKIRRQVLQEINALGLEANTDRIADVVETRLRDEIRRGVQTIQYQVVTLMTTNGQAPFVTVFMYLNEARNEQEKRDLAMIIEETLAQRYEGVKNEEGVWITPAFPKLIYVLEEDNITEDSPYFYLTKMAAKCTAKRMVPDYISEKKMRELKLSKGETEGNGDCYTCMGCRSFLTPDRTGNGYDNVANAGNYQPGKPKYYGRFNQGVVTISLPDVALSSHGDMAKFWEIFDERLELCYKALMCRHERLKGTLSDAAPILWQYGALARLKKGEPIDKLLYGGYSTISLGYAGLYECVKYMTGHSHTDAEGTPFAMEVMQHMNDKCNEWKAATNIDFSLYGTPLESTTYKFAKALQRRFGIIPGITDKGYITNSYHVHVTEQIDAFEKLKFESNFQRLSPGGAISYVEVPNMQDNLKAVIRVMQYIYDNIMYAELNTKSDYCQVCGYDGEIQIVEDDGKLVWECPKCGNRDQEKLNVARRTCGYIGTQFWNQGRTQEIRDRVLHL

SEQ ID NO: 1093 - protein, 719 aa, Unknown
  Description of Unknown: uncultivated organism sequence
  Category: MG60 effectors
  Description: MG60-308 effector
MKIIKRNGSEETFDIQKIVVAVTKADKDNGERTLTDSQIEDIAEYVEFKCNKLNRAVSVEEIQDMVENQIMATGAFELARKYVRYRYKRSLVRKANTTDNRILSLIEYNNEDVKQENSNKNPAVNSVQRDYMAGEVSRDLTTRMLLPHDIVEADREGIIHFHDSDYYAQHMHNCDLVNLDDMLQNGTVISGTMIEKPHSFSTACNIATQIIAQVASNQYGGQSISLAHLAPFVDVSREKIRKEVISEQELVGMEYPEDVLNEIVERRLKKEITKGVQTIEYQVITLMTTNGQAPFLTVFMYLNEAKNEREKKDLAMIIEETLRQRYQGVKNEAGVWVTPAFPKLIYVLEEDNIEEGSEYYYLTELAAKCTAKRLVPDYISEKKMKELKEGNCFPVMGCRSCLSPWKDENGNYKFYGRFNQGVVTINLVDVALSSGGDMDKFWKIFDDRLELCYRALMCRHNRLKGTLSDAAPILWQFGALARLKKGEPIDKLLYGGYSTISLGYAGLYECVKYMTGKSHTDPDATPFALDVMKHMNDACNQWKEETNVAFSIYGSPIESTTYKFAKCLQKRFGIVPGITDKSYITNSYHVFVGEEIDAFSKLKFESQFQALSSGGAISYVEVPDMKDNIAAVLQVIRFIYDNIMYAELNTKSDYCQECGYDGEIQIITDEEGKLVWECPHCGNRNQDTLNVARRTCGYIGTQFWNQGRTQEIKERVLHL

SEQ ID NO: 1094 - protein, 738 aa, Unknown
  Description of Unknown: uncultivated organism sequence
  Category: MG60 effectors
  Description: MG60-309 effector
MSPEVKTKVIKRNGKEVSFDISKITHAIEKANEEVDNLHQINIFQISAIADKIAKEVEESTHAVNVEDIQDLVETGIMEMRGYEVAQKYVRYRYKREMKRKSNTTDNGILALLDHINEEVKQENSNKNPVINSTQRDYMAGEVSKDLSRRVLLPEEIVQAHEQGIIHFHDTDYFAQREHNCDLINLEDMLQNGTVISETMIEKPHSFFTACNVTTQIVAQVASNQYGGQSFTLAHLAPFVDISRKKIRANVIAERKECGEVLDETIIDKVTERRLRDEVRSGIQTIQYQLITLMTCNGQAPFVTMFMYLDEVPEGKTRDDLATIIEEVLIQRMQGVKNEKGVWITPAFPKLIYVLDEDNITEDSKYWHLTELAAQCTAKRMVPDYISAKIMKELKKGEVYPCMGCRSFLTVEDSQLNADGSHKFYGRFNQGVVTINLVDVACSSNGDMDEFWRILDERLELCHRALRCRHERLKGTISDVAPILWQNGALARLKKGETIDKLLYDGYSTISLGYAGLYEMCMRMYGKSHTDPEAKPFALKVMQHLNDKCNEWKAAEHISYSIYGTPMESTTYKFSKCLQKRFGIIPGVTDKNYITNSYHVHVSEEIDAFSKLKFESEFQKLSPGGAISYVEVPNMQNNIPAVLAVMKFIYENIMYAELNTKSDYCECCGYDGEIKIIEEDSGKLVWECPNCGNRDQSKMSVARRTCGYIGTQFWNQGRTQEIKDRVLHLSNHTNPEYK

SEQ ID NO: 1095 - protein, 638 aa, Unknown
  Description of Unknown: uncultivated organism sequence
  Category: MG60 effectors
  Description: MG60-310 effector
MKVIKRDGRVVDFNREKIAIAIEKANQEVTEKERADKQDIKDIIKYIESLDKKRILVEDVQDIIEEQLMDKKKFKLAKKYMIYRYNRALVRKKNTTDESILGLIKNQNMEMLEDGTRKNAVLASSQRDYIAGEVSKDLTKRLLLPEKIVKAHEEGVLYFHDMDYFLQPIFNSSVISIGDMLDNGTVINGKLIESPKSFRVACTVLAQILATVASTQYGGQSVNISHLGKYVRKSYEKFKEEFGGVPSKEILDKKIKEEVTSGVQTLQYQINTLMTTNGRSPLVSLFMYLREDDEYIKENALIIEEILKQRIEGMKDAEGKYINPEFPKLIYVIDENNCLNGEKYDYLTHLALECANKTQEPSFISAKKMRENYSGNVFSPMGFRSFLTPWKDENGTYKFEGRFNQGIVSINLPQIAIVADGDEDKFFSLLDERLELCHEALLCRHYALLGTVSDTSPIHWIYGAIAHLKSGEKIDKYLKDGYSTISLGYVGVYEATMMMKEVSNTEPNGKEFAIKIVKYLKETVEKWKKASGLGFCLYGETSQKVCKTFERIDKERFGVIKNVTDKEKYTSSYHASEDEKIDYKEKLAFESVFQKLSLGGVVSQIPSEYIGELSDKEEFIKFVYDNVQYLEFTKELKK

SEQ ID NO: 1096 - protein, 746 aa, Unknown
  Description of Unknown: uncultivated organism sequence
  Category: MG60 effectors
  Description: MG60-311 effector
MIIIKKNPEAEKKAGAKYVIKRNGSEDLFDEDKIVNALFKANDSTIKNKITKKQIGEIADHIKRKVDETPHALNIEDIQDMVENELMQIRAFDVARSYITYRYKRALARQHNTTDDKILSLIEHNNEEVKQENSNKNPIVNSVQRDYMAGEVSKDLCKRVFLPGDIWEAHEDGLIHFHDADYFAQHMHNCCLVNLEDMLQNGTVISGTMIDKPKSFATACNIATQAIAQIASQQYGGQTMSIAHLAPFVEISRQKYMKKQRESMEKAGVKATETQLACIVEDMVDDEIKRGVQMIQYQLITLMTTNGQAPFVTIYMYLNECRDEKTKADMVKIIREMFRQRIQGVKNEQGVWVTPAFPKLIYVLEEDNIREGSRYWELTQLAAKCTAKRMVPDYISEKIMKKLKNGDVYSCMGCRSFLTVDRTKGNVANATNYKEGEHKYYGRFNQGVVTLNLVDVACTSAGDEDYFWEILDKRLELCHKALRIRHERLLGTPSDVAPILWQHGALARLKKGETIDKLLYGGYSTISLGYAGLCECTRYMKGVSHTDPKGTDFAMKIMQKLNDACAKWKEAENIDYSVYGTPLESTTYKFAKCLQKRFGIIPGVADKNYITNSYHVHVTEKINAFDKLKFEAPFQKLSPGGAISYVEVPNLQNNIEAVLSIMQYIYDNIMYAELNTKSDYCEACGYDGEIKIVEDEHGKLVWECPNCGNRDQSRMSVARRTCGYIGTQFWNQGRTQEIKERFVHLY

SEQ ID NO: 1097 - protein, 638 aa, Unknown
  Description of Unknown: uncultivated organism sequence
  Category: MG60 effectors
  Description: MG60-312 effector
MKVIKRDGRVVDFNREKIAIAIEKANQEVTEKERADKQDIKDIIKYIESLDKKRILVEDVQDIIEEQLMDKKKFKLAKKYMIYRYNRALVRKKNTTDESILGLIKNQNMEMLEDGTRKNAVLASSQRDYIAGEVSKDLTKRLLLPEKIVKAHGEGVLYFHDMDYFLQPIFNSSVINIGDMLDNGTVINGKLIESPKSFRVACTVLAQILATVASTQYGGQSVDISHLGKYVRKSYEKFKEEFGGVSSNEILDKKIKEEVTSGVQTLQYQINTLMTTNGRSPLVSLFMYLREGDEYIKENALIIEEILKQRIDGMKDAEGEYINPEFPKLIYVIDKDNCLNGGKYDYLTHLALDCANKTQEPSFISAKKMRENYSGNVFSPMGFRSFLTPWKDENGTYKFEGRFNQGIVSINLPQIAIVADGDEDKFFSLLDERLELCHEALLCRHYALLGTVSDTSPIHWIYGAIAHLKSGEKIDKYLKDGYSTISLGYVGVYEATMMIKEVSNTEPNGKEFAIKIVKHLKETVEKWKKASGLGFCLYGETSQKVCKTFERIDKERFGVIKNVTDKEKYTSSYHASEDEKIDYKEKLAFESVFQKLSLGGVVSQIPSEYIGELSDKEEFIKFVYDNVQYLEFTKELKK

SEQ ID NO: 1098 - protein, 745 aa, Unknown
  Description of Unknown: uncultivated organism sequence
  Category: MG60 effectors
  Description: MG60-313 effector
MIIIKKNPEAEKKAGAKYVIKRNGSEDLFDEDKIVNALFKANDSTIKNKITKKQIGEIADHIKRKVDETPHALNIEDIQDMVENELMQIRAFDVARSYITYRYKRALARQHNTTDDKILSLIEHNNEEVKQENSNKNPIVNSVQRDYMAGEVSKDLCKRVFLPGDIWEAHEDGLIHFHDADYFAQHMHNCCLVNLEDMLQNGTVISGTMIDKPKSFATACNIATQAIAQIASQQYGGQTMSIAHLAPFVEISRQKYMKKQRESMEKAGVKATEAQIASIVEDMVDEEIKRGVQMIQYQLITLMTTNGQAPFVTIYMYLNECRDEKTKADMVKIIREMFRQRIQGVKNEQGVWVTPAFPKLIYVLEEDNIREGSRYWDLTQLAAKCTAKRMVPDYISEKIMKQLKNGDVYSCMGCRSFLTVDRTNGNIANATNYKEGEHKYYGRFNQGVVTLNLVDVACTSAGDEDYFWEILDKRLELCHKALRIRHERLLGTPSDVAPILWQHGALARLKKGETIDKLLYGGYSTISLGYAGLCECTGYMKGVSHTDPDGTEFAMKVMQRLNDACAKWKEAENIDYSVYGTPLESTTYKFAKCLQKRFGIIPGVTDKNYITNSYHVHVTEKINAFDKLKFEAPFQKLSPGGAISYVEVPNLQNNIEAVLSIMQYIYDNIMYAELNTKSDYCEACGYDGEIKIVEDEHGKLVWECPNCGNRDQSRMSVARRTCGYIGTQFWNQGRTQEIKERFVHL

SEQ ID NO: 1099 - protein, 638 aa, Unknown
  Description of Unknown: uncultivated organism sequence
  Category: MG60 effectors
  Description: MG60-314 effector
MKVIKRDGRVVDFNREKIAIAIEKANQEVTEKERADKQDIKDIIKYIESLDKKRILVEDVQDIIEEQLMDKKKFKLAKKYMIYRYNRALVRKKNTTDESILGLIKNQNMEMLEDGIRKNAVLASSQRDYIAGEVSKDLTKRLLLPEKIVKAHGEGVLYFHDMDYFLQPIFNSSVINIGDMLDNGTVINGKLIESPKSFRVACTVLAQILATVASTQYGGQSVDISHLGKYVRKSYEKFKEEFGGVSSNEILDKKIKEEVTSGVQTLQYQINTLMTTNGRSPLVSLFMYLREGDEYIKENALIIEEILKQRIDGMKDAEGEYINPEFPKLIYVIDKDNCLNGGKYDYLTHLALDCANKTQEPSFISAKKMRENYSGNVFSPMGFRSFLTPWKDENGTYKFEGRFNQGIVSINLPQIAIVADGDEDKFFSLLDERLELCHEALLCRHYALLGTVSDTSPIHWIYGAIAHLKSGEKIDKYLKDGYSTISLGYVGVYEATMMIKEVSNTEPNGKEFAIKIVKHLKETVEKWKKASGLGFCLYGETSQKVCKTFERIDKERFGVIKNVTDKEKYTSSYHASEDEKIDYKEKLAFESVFQKLSLGGVVSQIPSEYIGELSDKEEFIKFVYDNVQYLEFTKELKK

SEQ ID NO: 1100 - protein, 745 aa, Unknown
  Description of Unknown: uncultivated organism sequence
  Category: MG60 effectors
  Description: MG60-315 effector
MIIIKKNPEAEKKAGAKYVIKRNGSEDLFDEDKIVNALFKANDSTIKNKITKKQIGEIADHIKRKVDETPHALNIEDIQDMVENELMQIRAFDVARSYITYRYKRALARQHNTTDDKILSLIEHNNEEVKQENSNKNPIVNSVQRDYMAGEVSKDLCKRVFLPGDIWEAHEDGLIHFHDADYFAQHMHNCCLVNLEDMLQNGTVISGTMIDKPKSFATACNIATQAIAQIASQQYGGQTMSIAHLAPFVEISRQKYMKKQRESMEKAGVKATETQLASIVEDMVDEEIKRGVQMIQYQLITLMTTNGQAPFVTIYMYLNECRDEKTKADMVKIIREMFLQRIQGVKNEQGVWVTPAFPKLIYVLEEDNIREGSRYWELTQLAAKCTAKRMVPDYISEKIMKQLKNGDVYSCMGCRSFLTVDRTNGNIANATNYKEGEHKYYGRFNQGVVTLNLVDVACTSAGDEDYFWEILDKRLELCHKALRIRHERLLGTPSDVAPILWQHGALARLKKGETIDKLLYGGYSTISLGYAGLCECTRYMKGVSHTDPDGTEFAMKVMQRLNDACAKWKEAENIDYSVYGTPLESTTYKFAKCLQKRFGIIPGVTDKNYITNSYHVHVTEKINAFDKLKFEAPFQKLSPGGAISYVEVPNLQNNIEAVLSIMQYIYDNIMYAELNTKSDYCEACGYDGEIKIVEDEHGKLVWECPNCGNRDQSRMSVARRTCGYIGTQFWNQGRTQEIKERFVHL

SEQ ID NO: 1101 - protein, 765 aa, Unknown
  Description of Unknown: uncultivated organism sequence
  Category: MG60 effectors
  Description: MG60-316 effector
MSEKHHSHCLDAMEINDLQCIMRVRSILYRNIKEGVIMDAVHTNVIKRNGEEVNFDLDKIVNAINAANKEVDRLHQLNDYQVQAIADNIAKQIEIMTHAIHVEDIQDMVETGIMEMRGYEVAQKYVRYRYKRELARKSNTTDNGILALIDHMNEEVNQENSNKNPVINSTQRDYMAGEVSKDLTKRMLLPKEIVEAHEQGIIHFHDSDYFAQREHNCDLVNLEDMLQNGTVISETMIEKPHSFFTACNVTTQIVAQVASNQYGGQSFTLSHIAPFVDVSRKKIREQVIEERKMCGEALDEEVISKITESRLRAEVKSGIQTIQYQLITLMTCNGQAPFVTMFMYLDEVPEGQTRDDLAMIIEEVLQQRIQGVKNEKGIWITPAFPKLIYVLDKDNITEDSKYWYLTELAAKCTAKRMVPDYISAKVMRELKNGDVYPCMGCRSFPTSEDSQRNPDGTRKYYGRFNQGVVTINLVDVACSAEGHMDRFWEILESRLELCHRALRCRHERLLGTVSDVAPILWQHGALARLKKGETIDKLLFNGYSTISLGYAGLCEMCVRMTGKTHTSLEGKKLALEVMQKLNDKCKEWKEAENISYSVYGTPMESTTYKFAKCLQKRFGIIKGVTDKNYITNSYHIHVTEPVNAFDKLKFESEFQKLSPGGAISYVEVPNLQDNVEAVISVMKFIYDNILYAELNTKSDYCEICGYDGEIKIVTDENGKLIWECPNCGNRDQNNLFVARRTCGYIGTQFWNQGRTQEIKDRVLHL

SEQ ID NO: 1102 - protein, 638 aa, Unknown
  Description of Unknown: uncultivated organism sequence
  Category: MG60 effectors
  Description: MG60-317 effector
MKVIKRDGRVVDFNREKIAIAIEKANQEVTEKERADKQDIKDIIKYIESLDKKRILVEDVQDIIEEQLMDKKKFKLAKKYMIYRYNRALVRKKNTTDESILGLIKNQNMEMLEDGTRKNAVLASSQRDYIAGEVSKDLTKRLLLPEKIVKAHGEGVLYFHDMDYFLQPIFNSSVINIGDMLDNGTVINGKLIESPKSFRVACTVLAQILATVASTQYGGQSVDISHLGKYVRKSYEKFKEEFGGVSSNEILDKKIKEEVTSGVQTLQYQINTLMTTNGRSPLVSLFMYLRKGDEYIKENALIIEEILKQRIEGMKDAEGKYINPEFPKLIYVIDENNCLNGEKYDYLTHLALECANKTQEPSFISAKKMRENYSGNVFSPMGFRSFLTPWKDENGTYKFEGRFNQGIVSINLPQIAIVADGDEDKFFSLLDERLELCHEALLCRHYALLGTVSDTSPIHWIYGAIAHLKSGEKIDKYLKDGYSTISLGYVGVYEATMMMKEVSNTELNGKEFAIKIVKYLKETVEKWKKASGLGFCLYGETSQKVCKTFERIDKERFGVIKNVTDKEKYTSSYHASEDEKIDYKEKLAFESVFQKLSLGGVVSQIPSEYIGELSDKEEFIKFVYDNVQYLEFTKELKK

SEQ ID NO: 1103 - protein, 720 aa, Unknown
  Description of Unknown: uncultivated organism sequence
  Category: MG60 effectors
  Description: MG60-318 effector
MKVIKRDGHMVDYSPEKIENAIIKANTEVDDDEQASSTQIKNIIKYIEKLGKKRILVEDIQDIIEMKLMSIGKYTLAKKYITYRYTRELVRRSNTTDLAIKELIDGESEYWNTENSNKNAKVVTTQRDYLAGITSTDITRRFLLPEDIVKAHDEGIIHFHDADYFAQNALHNCDLINLEDMLQNGTNINGVMIEKPHRFLTAMTIATQIITGVASSQYGGCTISLAHLAPFVRDSKKLYEAKYKRRKLSKEQIDQFVKEDLAKEVTDGVQTFQYQINSMTTTNGQAPFLSVCLYLGETEEYKEELAMLIEEVLKQRIQGMKNEKGVYITPAFPKLLYVLEEDNIKVGSKYYYLTELAAKCTAKRMVPDYISEKVMKETKIDKNGDGQCYPCMGCRSFLTPYLDSDGKPKYYGRFNQGVVTINLVDVALSSDKDMNKFWNIFEERLELAHRALQIRHKRLSKVTSDVAPILWQHGALARLKKGESIHDLLHNGYSTISLGFAGLYECVKYMTGKSHTDNAEGREFGLQVMQKMDDKCDEWKKEENIDYSVYGTPIESTTYKFAKCLKERFGVIKGITDRDYITNSYHVPVFEEIDAFTKLKLESEFQKLSPGGAISYIETPNLTNNIDVVLEIIKFIYDNIMYAELNTKSDYCQECGYDQEILLDENLEWYCPNCGNRNHDTLNVARRTCGYIGTNFWNKGRTQEIKDRVIHIDNKDLDEE

SEQ ID NO: 1104 - protein, 724 aa, Unknown
  Description of Unknown: uncultivated organism sequence
  Category: MG60 effectors
  Description: MG60-319 effector
MNVIKRSGEEVVFDASKIENAIKKANKATTHNQMSDELIRSVTQSVIDKCENLKRSPNVEEIQDMVEGELMEHRCFAVAHNYITYRYERALVRKANSTDKQIMSLLERNNEEVKQENSNKNPLVNSVQRDYMAGEVSKDITKRFLLPQDVMEAHEQGIIHFHDSDYFAQHMHNCCLVNLEDMLQNGTVISETMIEKPHSFSTACNVATQIIAQVASSQYGGQSITLSHLAPFVQVSREKARREVKEELESLNLDSSEDTVNKMAEMRVRKEIEKGVQMIQYQVITLMTTNGQAPFVTVFMYLNEVPEGQTRDDLAIIIEEMLKQRIKGVKNEKGIWITPAFPKLIYVLEENNIEEGSKYWYLTELAARCTAKRMVPDYISEKKMLELKVDANGEGHCYPCMGCRSFLTTYLDENGKPKYYGRFNQGVVTLNLVDVACSSKQNEEAFWRIMDERLALCKKALMCRHERLLGTPSDVAPILWQNGALARLKKGEPIDKLLFGGYSTISLGYAGLCECVYYMTGHPHTEEPGTSFGLKVMQYLNDACAKWKAEENIDFSLYGTPMESTTFKFSKHLQERFGIIPHVTDKNYITNSYHVHVTEEIDAFTKLSFESQFQKLSPGGAISYVEVPNMENNIDAVLAIMKHIYNHIMYAELNTKSDYCQVCGYTGEIKIVEDENHKLVWECPNCGNRDQEKMNVARRTCGYIGTQFWNQGRTQEIKERVLHL

SEQ ID NO: 1105 - protein, 634 aa, Unknown
  Description of Unknown: uncultivated organism sequence
  Category: MG60 effectors
  Description: MG60-320 effector
MKVIKRDGRVVDFNREKIAIAIEKANQEVTEKERADKQDIKDIIKYIESLDKKRILVEDVQDIIEEQLMDKKKFKLAKKYMIYRYNRALVRKKNTTDESILGLIKNQNMEMLEDGTRKNAVLASSQRDYIAGEVSKDLTKRLLLPEKIVKAHEEGVLYFHDMDYFLQPIFNSSVINIGDMLDNGTVVNGKLIESPKSFRVACTVLAQILATVASTQYGGQSVDISHLGKYVRKSYEKFKEEFGGMPSKEILDKKIKEEVTSGVQTLQYQINTLMTTNGRSPLVSLFMYLREGDEYIKENALIIEEILKQRIEGMKDAEGKYINPEFPKLIYVIDENNCLNGEKYDYLTQLALECANKTQEPSFISAKKMRENYSGNVFSPMGFRSFLTPWKDENGTYKFEGRFNQGIVSINLPQIAIVADGDEDKFFSLLDERLELCHEALLCRHYALLGTVSDTSPIHWIYGAIAHLKSGEKIDKYLKDGYSTISLGYVGVYEATMMMKEVSNTEPEGKEFAIKIVKHLKETVEKWKKASGLGFCLYGETSQKVCKTFERIDKERFGVIKNVTDKEKYTSSYHASEDEKIDYKEKLAFESVFQKLSLGGVVSQIPSEYIGKLSDKEEFIKFVYDNVQYLEFTK

SEQ ID NO: 1106 - protein, 740 aa, Unknown
  Description of Unknown: uncultivated organism sequence
  Category: MG60 effectors
  Description: MG60-321 effector
MKIIKRNGSEAVFDITKIIAAVTKANNVVPESQRLTNHQIIELADKVQASCLSRGHAMNVEEIQDIVEDAIMATGAYEVARKYITYRYVQNLKRTHNTTDDRILSLIECNNEEVKQENSNKNPTVNSVQRDYMAGEVSKDLTMRMLLPPEIVKAHEEGIIHFHDADYYAQHMHNCDLVNLDDMLQNGTVISGTLIEKPHSFSTACNIATQIIAQVASSQYGGQSISLTHLAPFVDVSRKKIRRDVEAEMKELGINPGEEKISEIVEARLREEIKRGVQTIQYQVVTLMTTNGQAPFITVFMYLGEAGDNQRLKSDLAIIIEEMLRQRYQGVKNEAGVWITPAFPKLIYVLEEDNIREGTPYFYLTKLAAKCTAKRLVPDYISEKKMKEYKLSKGETEGNGDVYTCMGCRSFLTPDRSGNGWDNIANAKNYDGKPKYYGRFNQGVVTINLVDVALSSGGDFDKFWKIFDERLELCHKALMCRHNRLKGTLSDAAPILWQYGALARLEKGEPIDKLLYGGYSTISLGYAGLYECCKYMTGKSHTDPAAKPFALHVMQHMNDACQTWKKQHNIDFSLYGTPLESTTYKFAKCLQKRFGIIPGITDRNYITNSYHVHVTEQIDAFTKLKFESEFQKLSPGGAISYVEVPNMQDNLEAVIKVMQFIYDNIMYAELNTKSDYCQVCGYDGEISIVEEDGKLIWECPKCHNRDQNKLNVARRTCGYIGTQFWNQGRTAEIKDRVLHL

SEQ ID NO: 1107 - protein, 728 aa, Unknown
  Description of Unknown: uncultivated organism sequence
  Category: MG60 effectors
  Description: MG60-322 effector
MDAVHTNVIKRNGEEVNFDLDKIVNAINAANKEVDRLHQLNDYQVQAIADNIAKQIEIMTHAIHVEDIQDMVETGIMEMRGYEVAQKYVRYRYKRELARKSNTTDNGILALIDHMNEEVNQENSNKNPVINSTQRDYMAGEVSKDLTKRMLLPEEIVEAHEQGIIHFHDSDYFAQREHNCDLVNLEDMLQNGTVISETMIEKPHSFFTACNVTTQIVAQVASNQYGGQSFTLSHIAPFVDVSRKKIREQVIEERKMCGEALDEEVISKITESRLRAEVKSGIQTIQYQLITLMTCNGQAPFVTMFMYLDEVPEGQTRDDLAMIIEEVLQQRIQGVKNEKGIWITPAFPKLIYVLDKDNITEDSKYWYLTELAAKCTAKRMVPDYISAKVMRELKNGDVYPCMGCRSFPTSEDSQRNPDGTRKYYGRFNQGVVTINLVDVACSAEGHMDRFWEILESRLELCHRALRCRHERLLGTVSDVAPILWQHGALARLKKGETIDKLLFNGYSTISLGYAGLCEMCVRMTGKTHTSPEGKKFALEVMQKLNDKCKEWKEAENISYSVYGTPMESTTYKFAKCLQKRFGIIKGVTDKNYITNSYHIHVTEPVNAFDKLKFESEFQKLSPGGAISYVEVPNLQDNVEAVISVMKFIYDNILYAELNTKSDYCEICGYDGEIKIVTDENGKLIWECPNCGNRDQNNLFVARRTCGYIGTQFWNQGRTQEIKDRVLHL

SEQ ID NO: 1108 - protein, 724 aa, Unknown
  Description of Unknown: uncultivated organism sequence
  Category: MG60 effectors
  Description: MG60-323 effector
MNVIKRSGEEVVFDASKIENAIKKANKATTHNQMSEELIRSVTQSVIDKCENLKRSPNVEEIQDMVEGELMEHRCFAVAHNYITYRYERALVRKANSTDKQIMSLLERNNEEVKQENSNKNPLVNSVQRDYMAGEVSKDITKRFLLPQDVMEAHEQGIIHFHDSDYFAQHMHNCCLVNLEDMLQNGTVISETMIEKPHSFSTACNVATQIIAQVASSQYGGQSITLSHLAPFVQVSREKARREVKEELESLNLDSSEDTVNKMAEMRVRKEIEKGVQMIQYQVITLMTTNGQAPFVTVFMYLNEVPEGQTRDDLAIIIEEMLKQRIKGVKNEKGIWITPAFPKLIYVLEENNIEEGSKYWYLTELAARCTAKRMVPDYISEKKMLELKVDVNGEGHCYPCMGCRSFLTTYLDENGKPKYYGRFNQGVVTLNLVDVACSSKQDEEAFWRIMDERLALCKKALMCRHERLLGTPSDVAPILWQNGALARLKKGEPIDKLLFGGYSTISLGYAGLCECVYYMTGHPHTEEPGTSFGLKVMQYLNDACAKWKAEENIDFSLYGTPMESTTFKFSKHLQERFGIIPHVTDKNYITNSYHVHVTEEIDAFTKLSFESQFQKLSPGGAISYVEVPNMENNIDAVLAIMKHIYNHIMYAELNTKSDYCQVCGYTGEIKIVEDENHKLVWECPNCGNRDQEKMNVARRTCGYIGTQFWNQGRTQEIKERVLHL

SEQ ID NO: 1109 - protein, 724 aa, Unknown
  Description of Unknown: uncultivated organism sequence
  Category: MG60 effectors
  Description: MG60-324 effector
MNVIKRSGEEVVFDASKIENAIKKANKATTHNQMSDELIRSVTQSVIDKCENLKRSPNVEEIQDMVEGELMEHRCFAVAHNYITYRYERALVRKANSTDKQIMSLLERNNEEVKQENSNKNPLVNSVQRDYMAGEVSKDITKRFLLPQDVMEAHEQGIIHFHDSDYFAQHMHNCCLVNLEDMLQNGTVISETMIEKPHSFSTACNVATQIIAQVASSQYGGQSITLSHLAPFVQVSREKARREVKEELESLNLDSSEDTVNKMAEMRVRKEIEKGVQMIQYQVITLMTTNGQAPFVTVFMYLNEVPEGQTRDDLAIIIEEMLKQRIKGVKNEKGIWITPAFPKLIYVLEENNIEEGSKYWYLTELAARCTAKRMVPDYISEKKMLELKVDANGEGHCYPCMGCRSFLTTYLDENGKPKYYGRFNQGVVTLNLVDVACSSKQDEEAFWKIMDERLALCKKALMCRHERLLGTPSDVAPILWQNGALARLKKGEPIDKLLFGGYSTISLGYAGLCECVYYMTGHPHTEEPGTSFGLKVMQYLNDACAKWKAEENIDFSLYGTPMESTTFKFSKHLQERFGIIPHVTDKNYITNSYHVHVTEEIDAFTKLSFESQFQKLSPGGAISYVEVPNMENNIDAVLAIMKHIYNHIMYAELNTKSDYCQVCGYTGEIKIVEDENHKLVWECPNCGNRDQEKMNVARRTCGYIGTQFWNQGRTQEIKERVLHL

SEQ ID NO: 1110 - protein, 716 aa, Unknown
  Description of Unknown: uncultivated organism sequence
  Category: MG60 effectors
  Description: MG60-325 effector
MLEVIKRNGQKVPFDRDKITIAIEKAMNSSSGVYEEGQAAKIAGEIEAYAASIHKDMTIYAIEDQVYYRLLKYNNPATARAYENYKAIQSFKRQTNTTDNDVFGLLNNTNLEVLNENSNKNGHVVSTQRDLIAGEVSKDIARRKLIPADIVQAHDSGAIHFHDMDYIIQPMFNCCLINLEDMLANGTVINGKKIDTPKSFQVACTVTTQIIAQVASGQYGGQSINGIDRILAPYVRKSFKKYMSAVVEEQREVYGIEPDMEKAEEIAWKRTKKEIKDGIQTIQYQINTLMTTNGQAPFVTLFMYFQPDYEYAKEAALIDEELLRQRIQGIKNDANVYVTPAFPKLIYVLDEHNVREGSPYFYLTKLAAECTAKRMYPDYISAKKMRESYEGNVFSPMGCRSFLSPWKDAQGNYKFDGRFNMGVVSLNLPQIGILADGDEEKFFQILDKRLELCKKALLLRVELLKKVTSDVSPIHWQYGAIARLQPGETIEKFIYGGYATLSLGYIGMYEATVLTKHCSHTTPEGRKFAMRIMDDLNAHIQQWKKETNIGFALYGTPAENLTNRFCKIDKARFGSIANVTDKDYYTNSYHVDVREPINVFDKFSFEADFEDKSTGGCISYAEIPNMSHNIPAVLTMIQYIYDHIAYGEFNTKLDYCHECGFDGEIILNDDNQWECPRCHNQDRNKLTVIRRTCGYLGENFWNEGRTQEITNRVLHI

SEQ ID NO: 1111 - protein, 1117 aa, Unknown
  Description of Unknown: uncultivated organism sequence
  Category: MG60 effectors
  Description: MG60-326 effector
MKIIKRNGSEQEFNPSKIHVAMTKAFRSVEEGKTVSEETIANLTAKAMAKVQEIPHTPNVEEVQDIVENVLMDSGFHDVSRSYIKYRFTHAVRRNTTDAAILSLIEAENEEVKQENANKNPTVASVQRDYMAGEVSKDLTMRLLLPEEIAKAHNEGILHFHDADYYAQHMHNCCLINLDDMLQNGTVISGTMIEKPHRFSTACNIATQIIAQVASCQYGGQSISLTHLAKFVDVSRKAIRKEVETENKEAAINMTECQMNEVVERRLRKEIRAGIQTIQYQIITLMTTNGQAPFVTVFMYLDEAGNDETLKHDLAICIEEMLKQRYEGVKNEVGVWITPAFPKLIYVLDEDNIRPESPFFYLTKLAAKCTAKRMVPDYISAKKMREYKLSKGETEGHGDVYTCMGCVTGDEVVVYKYLGTMYTESFERMWRRLSAHFPVETQPGRTNDLYIDLHGVSIYDNKLSDFTECHRIIRNENSKILRLKFSNGRVLDCTPDHPFETENRGVVRADELASDDVIMADKKSAFVFSEDGVVPYNTDLAWALGLLLCDASYDGTIVLSLANEGEDDIAQKFSNVMKTTYGLNTNCVVQSRERKGVYKDILCVSDGKRTIQKVCDFLVGEFGGKKKMLRHIPSEVFTWDEDARFAFLAGMIDADGYINNSQRVPAVQIGSINKELAIQQALLAQSLGMPASIYMNHYKGEGRGDTIRYHVTFVPCSRLMEFIVCDKKKAHFNDEVRKNHSISETSYCKMAERMELSGEYATYDVTTASEHFMVSGLYSHNCRSFLTPDRSGNGWNNIANAKNYEPGEPKYYGRFNQGVVTINLPDVALSSGGDFEKFWQIFDERLELCHKALQYRHKRLEGTLSDTSPIHWQYGALARLQKGEPIDKLLHGGYSTISLGYAGLYECCKYMTGKSHTDPDAKPFALKVMQHMNDMCAKWKAEEDIDYSLYGTPLESTTYKFAKCLDRRFGKEWYKISGGKNYITNSYHVHVTEQIDAFTKLKFESEFQKLSPGGAISYVEVPNMQDNLAAVIKVMQFIYDNIMYAELNTKSDYCQVCGYDGEIQIVDDDGKLVWECPNCHNRDFSKMNVARRTCGYIGCQGFNAGRTAEIRDRVLHL

SEQ ID NO: 1112 - protein, 638 aa, Unknown
  Description of Unknown: uncultivated organism sequence
  Category: MG60 effectors
  Description: MG60-327 effector
MKVIKRDGRVVDFNREKIAIAIEKANQEVTEKERADKQDIKDIIKYIEALDKKRILVEDVQDIIEEQLMDKKKFKLAKKYMIYRYNRALVRKKNTTDESILGLIKNQNMEMLEDGTRKNAVLASSQRDYIAGEVSKDLTKRLLLPEKIVKAHEEGILYFHDMDYFLQPIFNSSVINIGDMLDNGTVINGKLIESPKSFRVACTVLAQILATVASTQYGGQSVDISHLGKYVRKSYEKFKEEFGDVPSKEILDKKIKEEVTSGVQTLQYQINTLMTTNGRSPLVSLFMYLREDDEYIKENALIIEEILNQRIEGMKDAEGKYINPEFPKLIYVIDENNCLNNGKYDYLTHLALDCANKTQEPSFISAKKMRENYSGNVFSPMGFRSFLTPWKDENGTYKFEGRFNQGIVSINLPQIAIVADGDEDKFFSLLDERLELCHEALLCRHYALLGTVSDTSPIHWIYGAIAHLKSGEKIDKYLKDGYSTISLGYVGVYEATIMMKEVSNTEPDGKEFAIKIVKHLKETVEKWKKTSGLGFCLYGETSQNVCKTFERIDKERFGVIKNVTDKEKYTSSYHSSENEKIDYKEKLAFESEFQKLSLGGVVSQIPRGYIGELSDKEEFIKFVYDNVQYLEFTEEFVK

SEQ ID NO: 1113 - protein, 724 aa, Unknown
  Description of Unknown: uncultivated organism sequence
  Category: MG60 effectors
  Description: MG60-328 effector
MNVIKRSGEEVVFDSIKIENAIKKANKATTHNQMSDELIHTVTQSVVDKCENLKRSPNVEEIQDMVEGELMEKRCFAVAHNYITYRYERALVRKANSTDKQIMSLLERNNEEVKQENSNKNPLVNSVQRDYMAGEVSKDITKRFLLPQDVMEAHEQGIIHFHDSDYFAQHMHNCCLVNLEDMLQNGTVISETMIEKPHSFSTACNVATQIIAQVASSQYGGQSITLSHLAPFVQVSREKARREVKEELESLNLDSSEDTVNKMAEMRVRKEIEKGVQMIQYQVITLMTTNGQAPFVTVFMYLNEVPEGQTRDDLAIIIEEMLKQRIKGVKNEKGIWITPAFPKLIYVLEENNIEEGSKYWYLTELAAKCTAKRMVPDYISEKKMLELKVDANGEGHCYPCMGCRSFLTTYLDENGKPKYYGRFNQGVVTLNLVDVACSSKQDEEAFWRIMDERLALCKKALMCRHERLLGTPSDVAPILWQNGALARLKKGEPIDKLLFGGYSTISLGYAGLCECVYYMTGHPHTEEPGTSFGLKVMQYLNDACAKWKAEENIDFSLYGTPMESTTFKFSKHLQERFGIIPHVTDKNYITNSYHVHVTEEIDAFTKLSFESQFQKLSPGGAISYVEVPNMENNIDAVLAIMKHIYNHIMYAELNTKSDYCQVCGYTGEIKIVEDENHKLVWECPNCGNRDQEKMNVARRTCGYIGTQFWNQGRTQEIKERVLHL

SEQ ID NO: 1114 - protein, 760 aa, Unknown
  Description of Unknown: uncultivated organism sequence
  Category: MG60 effectors
  Description: MG60-329 effector
MKVIKRDCSEVDFDKSKISTAILKAMKNGSGIVKQKIAEDIANEIEEDCKDKDEVSISDIESMVYDKLITKKQRLTAKAYEGYRSIREFQRENENTIDTEITELLSGESDYWNNENSNKNPRLNTTQRDYLAGIVSKDASRRYILPPEIVQAHDDGLIHVHDLDYLIQYMNNCCLINLEDMLQNGTVISETLIEKPHSFSTACTVATQIIAQVASSQYGGQSISLAHLAPFVDISRQKIRKEVIEEQEYLYRNIDEKEWVKPRKVLGKKLRKDQEKFYKNKDRLLKFIDATDIEDIVEKRLKKEIEKGIQTIQYQITTLMTTNGQAPFITLFMYLNEAHNQREKDDLAMLIEEELRQSYLGVKNEEGVYITPAFPKVIYVLQEDNIHEEDKYWYLTEMAAKCSMKRLTPDYISEKIMKEMKDGNCYPVMGCRSALTVWYDENGKPKFYGRFNSGVVTVSLPDIALSSGGDFNEFWRIFDERTELCHKALKIRHQRLRGTKSDVAPILWQHGAFARLKKGESIDKLLFGGYSTLSLGYAGLAECVKYMTGHYHCDEGIGEKFGLEVMQALNDKCSQWKIDENIDYSLYGTPLEATTEKFAKKLKERFGIIEGVTDRTYITNSYHIPVFIHIDAFGKLRIEAKFQRLSPGGSISYIECPNMENNIPAVLEVMKFIYNNNMYAELNTKSDYCQKCGWSKEIKLIDEGGKLIWECPNCGNRDVRTMDITRRTCGYKGTARNGWNQGRLGDIHDRVPHLDDIEEE

SEQ ID NO: 1115 - protein, 638 aa, Unknown
  Description of Unknown: uncultivated organism sequence
  Category: MG60 effectors
  Description: MG60-330 effector
MKVIKRDGRVVDFNREKIAIAIEKANQEVTEKERADKQDIKDIIKYIESLDKKRILVEDVQDIIEEQLMDKKKFKLAKKYMIYRYNRALVRKKNTTDESILGLIKNQNMEMLEDGTRKNAVLASSQRDYIAGEVSKDLTKRLLLPEKIVKAHGEGVLYFHDMDYFLQPIFNSSVINIGDMLDNGTVINGKLIESPKSFRVACTVLAQILATVASTQYGGQSVDISHLGKYVRKSYEKFKEEFGGVSSNEILDKKIKEEVTSGVQTLQYQINTLMTTNGRSPLVSLFMYLRKGDEYIKENALIIEEILKQRIEGMKDAEGKYINPEFPKLIYVIDENNCLNGEKYDYLTHLALECANKTQEPSFISAKKMRENYSGNVFSPMGFRSFLTPWKDENGTYKFEGRFNQGIVSINLPQIAIVADGDEDKFFSLLDERLELCHEALLCRHYALLGTVSDTSPIHWIYGAIAHLKSGEKIDKYLKDGYSTISLGYVGVYEATMMMKEVSNTELNGKEFAIKIVKSLKETVEKWKKASGLGFCLYGETSQKVCKTFERIDKERFGVIKNVTDKEKYTSSYHASEDEKIDYKEKLAFESVFQKLSLGGVVSQIPSEYIGELSDKEEFIKFVYDNVQYLEFTKELKK

SEQ ID NO: 1116 - protein, 634 aa, Unknown
  Description of Unknown: uncultivated organism sequence
  Category: MG60 effectors
  Description: MG60-331 effector
MKVIKRDGRVVDFNREKIAIAIEKANQEVTEKERADKQDIKDIIKYIESLDKKRILVEDVQDIIEEQLMDKKKFKLAKKYMIYRYNRALVRKKNTTDESILGLIKNQNMEMLEDGTRKNAVLASSQRDYIAGEVSKDLTKRLLLPEKIVKAHEEGVLYFHDMDYFLQPIFNSSVINIGDMLDNGTVINGKLIESPKSFRVACTVLAQILATVASTQYGGQSVDISHLGKYVRKSYEKFKEEFGGVPSKEILDKKIKEEVTSGVQTLQYQINTLMTTNGRSPLVSLFMYLREGDEYIKENALIIEEILKQRIEGMKDAKGKYINPEFPKLIYVIDENNCLNGEKYDYLTHLALECANKTQEPSFISAKKMRENYSGNVFSPMGFRSFLTPWKDENGTYKFEGRFNQGIVSINLPQIAIVADGDEDKFFSLLDERLELCHEALLCRHYALLGTVSDTSPIHWIYGAIAHLKSGEKIDKYLKDGYSTISLGYVGVYEATMMVKEVSNNEPEGKEFAIKIVKHLKETVEKWKKASGLGFCLYGETSQKVCKTFERIDKERFGVIKNVTDKEKYTSSYHASEDEKIDYKEKLAFESVFQKLSLGGVVSQIQSKYIGELNDKEEFIKFVYDNVQYLEFIK

SEQ ID NO: 1117 - protein, 724 aa, Unknown
  Description of Unknown: uncultivated organism sequence
  Category: MG60 effectors
  Description: MG60-332 effector
MNVIKRSGEEVVFDASKIENAIKKANKATTHNQMSDELIRSVTQSVINKCENLKRSPNVEEIQDMVEGELMEHRCFAVAHNYITYRYERALVRKANSTDKQIMSLLERNNEEVKQENSNKNPLVNSVQRDYMAGEVSKDITKRFLLPQDVMEAHEQGIIHFHDSDYFAQHMHNCCLVNLEDMLQNGTVISETMIEKPHSFSTACNVATQIIAQVASSQYGGQSITLSHLAPFVQVSREKARREVKEELESLNLDSSEDTVNKMAEMRVRKEIEKGVQMIQYQVITLMTTNGQAPFVTVFMYLNEVPEGQTRDDLAIIIEEMLKQRIKGVKNEKGIWITPAFPKLIYVLEENNIEEGSKYWYLTELAAKCTAKRMVPDYISEKKMLELKVDVNGEGHCYPCMGCRSFLTTYLDENGKPKYYGRFNQGVVTLNLVDVACSSKQDEEAFWRIMDERLALCKKALMCRHERLLGTPSDVAPILWQNGALARLKKGEPIDKLLFGGYSTISLGYAGLCECVYYMTGHPHTEEPGTSFGLKVMQYLNDACAKWKAEENIDFSLYGTPMESTTFKFSKHLQERFGIIPHVTDKNYITNSYHVHVTEEIDAFTKLSFESQFQKLSPGGAISYVEVPNMENNIDAVLAIMKHIYNHIMYAELNTKSDYCQVCGYTGEIKIVEDENHKLVWECPNCGNRDQEKMNVARRTCGYIGTQFWNQGRTQEIKERVLHL

SEQ ID NO: 1118 - protein, 780 aa, Unknown
  Description of Unknown: uncultivated organism sequence
  Category: MG60 effectors
  Description: MG60-333 effector
MENEVNNKVETEEEVLSSNVDVIKRNGKEVRFDQRKIQAAIRKANKDVDERYRISDIQIRTISYMIKLWVKELGHTPTVDEIQDKVVISLGHESPELQHAYDIYRYDRDLERNGNSTDREILSLVDRQNEIAMQENSNKNPIVESTQRDYIAGLVSRDISERILFDKDLVEAHREGKIHIHDTDYFLQTIHNCDLVNLEDMLQNGTVISGTLIRKPHSFRTACNIATQVIAQVASAQYGGQTITLSHLAPFVDVSRQAIRKAVIEEGKISGVDYTDEIIDKITHSRLKKEITDGIQTLNYQLVTLLTTNGQTPFVTIFMYIDEVPEGQTREDLVLIIEEVLRQRMDGTENEDGVKTTPAFPKLIYCLDEDNVKEGTKYWDTTVLAAQCTAKRMNPDYISAKIMREQKGDVYPCMGCRSFLTPDRTQKEFEVVKEDGTTEIVKPLGNIANAKNYDEANHKYYGRFNQGVCTISLPDVALSSGGDKEKFWKIFDERLEMCHRVLQTRHNRLMGTPSDVAPILWQYGALARLEKHETIDKLLFHGYSTISLGYAGLYECTKYMTGESHTDEKAGKPFALEVMKHMNDACAKWKKAEDIDYSLYGTPIESTTYKFAKALQTRFGIVEGITDHGYITNSYHVNVREKIDAFKKLEFEAEFQNLSPGGAVSYVEVPDMQSNIPAVLSIMQYIYEHIMYAELNTKSDYCMNCGYDGEIQIVKNENGKLIWKCPKCGNTDQSKMSVARRTCGYIGTQYWNQGRTEEIQDRVMHVSLENFKPCSCGCDS

SEQ ID NO: 1119 - protein, 873 aa, Unknown
  Description of Unknown: uncultivated organism sequence
  Category: MG60 effectors
  Description: MG60-334 effector
MPKFFATCPKGLEGLLNAELVQLGAESVKETVAGVSFSGDLNLAVRVCLWTRFATRVLLTIGSFHTDSDIELYNGAYSLHYEDYFSSDQTISVDFNGQNSFINNTLYGALRVKDALCDRFVKLTGSRPNVDRENPDVCINAHLDKKNNVTISLDLSGKALHRREYRTEAGIAPLKENLAAAIVARSGYVSGSVVDPMCGSGTLLIEAAMKAADIAPGLFRSSYGFEKLKDFDAVEFTHYKREAHARAEAGKQRLIDARVSFYGFDRDPAVLEKAVQNVERAGLSQLIKFTAGDLHELKNPVTSGSKGFVITNPPYGERLGNVAELLELYSSLGFCLKKEFAGWKATVISSSEDLLSCLRLRADKTYRLYNGALECQLRVYSIGEKLQVTDDGSENAGRITDSGKDAGFTLSTETLRVAEEFANRLKKNLKRLEKWAAREGIEAYRIYDADLPNYNAAIDLYGSYVVIQEYAAPNSVDAKIAHRRMLDLIQVVVGVTGIKGDHVILKVRERKKGESQYEKLNETKHTLLVREYMASFIVNLWDYLDTGLFLDHREVRRMITKMSAGKSFLNIFSYTGSATVAAAIGGARETTTVDMSRTYLAWAKDNMLANGFSGRNHQFIQADCLRWLDISPKTYDLIFADPPTFSNSKRMEATFDVQRDHVALIAKLTRLLNLGGTLIFSNNNRSFKLDSDAITAMGYKITDVSEKTVQEDFRRNKKIHCCFILEKVIDVPVPEDYSDASFGSVSGLKAKVEYLNGGVSGDRREGRGGRERPVRDGRDGAPGRERNGSFRKHDNDAFGKSRSYTFRNGERQEAPADGRSFRETDGSENRPVIPAVRRSRMPSRVIGGASAGGQTAPRGPRLSRNIGRKEDKE

SEQ ID NO: 1120 - protein, 719 aa, Unknown
  Description of Unknown: uncultivated organism sequence
  Category: MG60 effectors
  Description: MG60-335 effector
MKVVKRDGKKVEFDAIKIENAILKAMKCGSGIVDEKCAHDIAVEIEKWHEHSDDNISIYRIEGQVFEKLIEKGQILTAKAYEGYRKVREFQRETNTIDNEIYGIVNQTNKEAMEENSNKDATVLATQRDLIAGEFSRDYCRRLLLPPKIVQAHDDGIIHFHDMDYYIQKMHNCDLVNLKDMFAKGTVINDKLIETPKSLQTACTVATQIVQQVANGQYGGQTISLAHLSPFVRLSYEKHQHNVRHEGRLIGIEYTDEQVEKIATSRIKDEIKAGIQTIQYQINTFSTTNGQAPFLSVFMYLREEPEYIKETAMLIEETLRQRYVGMKNPVGAYVTPAFPKLLYVLDDNNVPQDSEYRYLTDLAVKCVSKRMMPDFISAKVMRENYEGQVFPCMGCRSFLSPWKDENGEYKWYGRFNQGVVTLNLADAGLSANHKLDVFWKILDERLELCKEALMLRHESLKGTLSDVSPIHWRYGALARLKSGETIDKLLENGYSTISLGYIGLYECVVSLIGDTHTSKDGNELATKIMQRLREACDSWKEETGLGFGLYGTPAESTTYTFARALKKRFGIVKGITDKDYLTNSYHVNVKEHIDAFDKLKVEAKFQKVSSGGAISYVEVTNMSENLDALSALIDYMYDTIQYAEINTKSDYCQECGFDGEILLDENREWYCPNCGNRNHKSLNVCRRTCGYLGDNFWNQGRTQEIAERFVHLDNHLLGE

SEQ ID NO: 1121 - protein, 716 aa, Unknown
  Description of Unknown: uncultivated organism sequence
  Category: MG60 effectors
  Description: MG60-336 effector
MLEVIKRNGERVPFNRDKITVAIEKAMNSSSGIYEEGQAAKIASEIEAYAASIQKDLTIYAIEDQVYYRLLKYNNPATARAYENYKTIQAFKRQTNTTDDDVFGLLNNTNLEVLDENSNKNGHVVSTQRDLIAGEVSKDIARRKLIPADIVQAHDSGAIHFHDMDYIIQPMFNCCLINLEDMLANGTVINGKKIDTPKSFQVACTVTTQIIAQVASGQYGGQSINGIDRILAPYVRKSFKKYMKAVVEEQREVYGIEPDMEKAEEIAWKRTKKEIKDGIQTIQYQINTLMTTNGQAPFVTLFMYFQPDYEYAREAALIDEELLRQRIQGIKNEANVYVTPAFPKLIYVLDEHNVREGSPYFYLTKLAAECTAKRMYPDYISAKKMRESYEGNVFSPMGCRSFLSPWKDEKGNYQFDGRFNMGVVSLNLPQIGILADGDEEKFFQILDKRLELCKKALLLRVDLLKRITSDVSPIHWQYGAIARLKPGETIEKFIYGGYATLSLGYIGIYEATVLTKHCSHTAPEGRKFAMRIMDDLNAHIKKWRKETNIGFALYGTPAENLTNLFCKIDKARFGSIPDVTDKGYYTNSYHVDVREPINVFDKFSFEADFEDKSTGGCISYAEIPNMTHNIPAVLTMVQYIYDHITYGEFNTKLDYCHECGFDGEIILNDDNEWECPRCHNKDRNKLTVIRRTCGYLGENFWNEGRTQEIKNRVLHI

SEQ ID NO: 1122 - protein, 638 aa, Unknown
  Description of Unknown: uncultivated organism sequence
  Category: MG60 effectors
  Description: MG60-337 effector
MKVIKRDGRVVDFNREKIAIAIEKANQEVTEKERADKQDIKDIIKYIESLDKKRILVEDVQDIIEEQLMDKKKFKLAKKYMIYRYNRALVRKKNTTDESILGLIKNQNMEMLEDGTRKNAVLASSQRDYIAGEVSKDLTKRLLLPEKIVKAHGEGVLYFHDMDYFLQPIFNSSVINIGDMLDNGTVINGKLIESPKSFRVACTVLAQILATVASTQYGGQSVDISHLGKYVRKSYEKFKEEFGGVSSNEILDKKIKEEVTSGVQTLQYQINTLMTTNGRSPLVSLFMYLREGDEYIKENALIIEEILKQRIDGMKDAEGEYINPEFPKLIYVIDKDNCLNGGKYDYLTHLALDCANKTQEPSFISAKKMRENYSGNVFSPMGFRSFLTPWKDENGTYKFEGRFNQGIVSINLPQIAIVADGDEDKFFSLLDERLELCHEALLCRHYALLGTVSDTSPIHWIYGAIAHLKSGEKIDKYLKDGYSTISLGYVGVYEATMMIKEVSNTEPNGKEFAIKIVKHLKETVEKWKKASGLGFCLYGETSQKVCKTFERIDKERFGVIKNVTDKEKYTSSYHASEDEKIDYKEKLAFESVFQKLSLGGVVSQIPSEYIGELSDKEEFIKFVYDNVQYLGFTKELKK

SEQ ID NO: 1123 - protein, 716 aa, Unknown
  Description of Unknown: uncultivated organism sequence
  Category: MG60 effectors
  Description: MG60-338 effector
MLEVIKRNGERVPFNRDKITNAIEKAMNSSSGIYEEGQAAKIASEIEAYAASIQKDLTIYAIEDQVYYRLLKYNNPATARAYENYKTIQAFKRQTNTTDDDVFGLLNNTNLEVLDENSNKNGHVVSTQRDLIAGEVSKDIARRKLIPADIVQAHDSGAIHFHDMDYIIQPMFNCCLINLEDMLANGTVINGKKIDTPKSFQVACTVTTQIIAQVASGQYGGQSINGIDRILAPYVRKSFKKYMKAVVEEQREVYGIEPDMEKAEEIAWKRTKKEIKDGIQTIQYQINTLMTTNGQAPFVTLFMYFKPDYEYAKEAALIDEELLRQRIQGIKNEANVYVTPAFPKLIYVLDEHNVREGNPYFYLTKLAAECTAKRMYPDYISAKKMRESYEGNVFSPMGCRSFLSPWKDEQGNYKFDGRFNMGVVSLNLPQIGILADGDEEKFFQILDKRLELCKKALLLRVDLLKRITSDVSPIHWQYGAIARLKPGETIEKFIYGGYATLSLGYIGIYEATMLTKHCSHTTAEGRKFAMRIMDDLNAHIKKWRKETNIGFALYGTPAENLTNLFCKIDKARFGSIPDVTDKGYYTNSYHVDVREPINVFDKFSFEADFEDKSTGGCISYAEIPNMTHNIPAVLTMVQYIYDHIAYGEFNTKLDYCHECGFDGEIILNDDNEWECPRCHNKDRNKLTVIRRTCGYLGENFWNEGRTQEIKNRVLHI

SEQ ID NO: 1124 - protein, 724 aa, Unknown
  Description of Unknown: uncultivated organism sequence
  Category: MG60 effectors
  Description: MG60-339 effector
MNVIKRSGEEVVFDASKIENAIKKANKATTHNQMSDELIRSVTQSVINKCENLKRSPNVEEIQDMVEGELMEHRCFAVAHNYITYRYERALVRKANSTDKQIMSLLERNNEEVKQENSNKNPLVNSVQRDYMAGEVSKDITKRFLLPQDVMEAHEQGIIHFHDSDYFAQHMHNCCLVNLEDMLQNGTVISETMIEKPHSFSTACNVATQIIAQVASSQYGGQSITLSHLAPFVQVSREKARREVKEELESLNLDSSEDTVNKMAEMRVRKEIEKGVQMIQYQVITLMTTNGQAPFVTVFMYLNEVPEGQTRDDLAIIIEEMLKQRIKGVKNEKGIWITPAFPKLIYVLEENNIEEGSKYWYLTELAAKCTAKRMVPDYISEKKMLELKVDANGEGHCYPCMGCRSFLTTYLDENGKPKYYGRFNQGVVTLNLVDVACSSKQDEEAFWRIMDERLALCKKALMCRHERLLGTPSDVAPILWQNGALARLKKGEPIDKLLFGGYSTISLGYAGLCECVYYMTGHPHTEEPGTSFGLKVMQYLNDACAKWKAEENIDFSLYGTPMESTTFKFSKHLQERFGIIPHVTDKNYITNSYHVHVTEEIDAFTKLSFESQFQKLSPGGAISYVEVPNMENNIDAVLAIMKHIYNHIMYAELNTKSDYCQVCGYTGEIKIVEDENHKLVWECPNCGNRDQEKMNVARRTCGYIGTQFWNQGRTQEIKERVLHL

SEQ ID NO: 1125 - protein, 724 aa, Unknown
  Description of Unknown: uncultivated organism sequence
  Category: MG60 effectors
  Description: MG60-340 effector
MNVIKRSGEEVVFDASKIENAIKKANKATTHNQMSDELIRSVTQSVIDKCENLKRSPNVEEIQDMVEGELMEHRCFAVAHNYITYRYERALVRKANSTDKQIMSLLERNNEEVKQENSNKNPLVNSVQRDYMAGEVSKDITKRFLLPQDVMEAHEQGIIHFHDSDYFAQHMHNCCLVNLEDMLQNGTVISETMIEKPHSFSTACNVATQIIAQVASSQYGGQSITLSHLAPFVQVSREKARREVKEELESLNLDSSEDTVNKMAEMRVRKEIEKGVQMIQYQVITLMTTNGQAPFVTVFMYLNEVPEGQTRDDLAIIIEEMLKQRIKGVKNEKGIWITPAFPKLIYVLEENNIEEGSKYWYLTELAARCTAKRMVPDYISEKKMLELKVDANGEGHCYPCMGCRSFLTTYLDENGKPKYYGRFNQGVVTLNLVDVACSSKQDEDAFWRIMDERLELCKKALMCRHERLLGTPSDVAPILWQNGALARLKKGEPIDKLLFGGYSTISLGYAGLCECVYYMTGHPHTEEPGTSFGLKVMQYLNDACAKWKAEENIDFSLYGTPMESTTFKFSKHLQERFGIIPHVTDKNYITNSYHVHVTEEIDAFTKLSFESQFQKLSPGGAISYVEVPNMENNIDAVLAIMKHIYNHIMYAELNTKSDYCQVCGYTGEIKIVEDENHKLVWECPNCGNRDQEKMNVARRTCGYIGTQFWNQGRTQEIKERVLHL

SEQ ID NO: 1126 - protein, 724 aa, Unknown
  Description of Unknown: uncultivated organism sequence
  Category: MG60 effectors
  Description: MG60-341 effector
MNVIKRSGEEVVFDSIKIENAIKKANKATTHNQMSDELIRSVTQSVIDKCENLKRSPNVEEIQDMVEGELMEHRCFAVAHNYITYRYERALVRKANSTDKQIMSLLERNNEEVKQENSNKNPLVNSVQRDYMAGEVSKDITKRFLLPQDVMEAHEQGIIHFHDSDYFAQHMHNCCLVNLEDMLQNGTVISETMIEKPHSFSTACNVATQIIAQVASSQYGGQSITLSHLAPFVQVSREKARREVKEELESLNLDSSEDTVNKMAEMRVRKEIEKGVQMIQYQVITLMTTNGQAPFVTVFMYLNEVPEGQTRDDLAIIIEEMLKQRIKGVKNEKGIWITPAFPKLIYVLEENNIEEGSKYWYLTELAAKCTAKRMVPDYISEKKMLELKVDANGEGHCYPCMGCRSFLTTYLDENGKPKYYGRFNQGVVTLNLVDVACSSKQDEEAFWRIMDERLALCKKALMCRHERLLGTPSDVAPILWQNGALARLKKGEPIDKLLFGGYSTISLGYAGLCECVYYMTGHPHTEEPGTSFGLKVMQYLNDACAKWKAEENIDFSLYGTPMESTTFKFSKHLQERFGIIPHVTDKNYITNSYHVHVTEEIDAFTKLSFESQFQKLSPGGAISYVEVPNMENNIDAVLAIMKHIYNHIMYAELNTKSDYCQVCGYTGEIKIVEDENHKLVWECPNCGNRDQEKMNVARRTCGYIGTQFWNQGRTQEIKERVLHL

SEQ ID NO: 1127 - protein, 735 aa, Unknown
  Description of Unknown: uncultivated organism sequence
  Category: MG60 effectors
  Description: MG60-342 effector
MKKPMLVLKRNGEEVTFDRQKIFNAISAANKEVAPIHQLNKYQIEAVTKNVTEKIEEMSHIVSVEEIQDMVEVAIMEMRGYEVAQKYVRYRHKRELARKSNTTDEGILALINLSNEEIKQENSNKNPTVNSTQRDYMAGEVSKDLTMRVLLPEDIVKAHKEGIIHFHDSDYFAQKMYNCCLVNLKDMFENETVISGTKIETPKSFYTGCNVATQIVAQVASNQYGGQTITLSDLAPFVDVSRKKITQKVKEELAESGLSATDKQISKIVHKRLKEEIKSGIQTIQYQLVTLMTTNGQTPFVSIFMYLDEVPEGQTRDDLALIIEEVLRQRIQGVKNEKGVWVTPAFPKLLYILDEDNIHEDSKYWYLTELAAKCTAKRMVPDYISAKIMKEIKNGEVYPCMGCRSFLTVEDGIRNPDGSHKFYGRFNQGVVTINLVDVACSSYGDMDKFWKILDERLELCHKALRYRHERLLHTKSDVAPILWQNGAIARLEKGETIDKLLFGGYSTISLGYAGLYEMCVRMTGHSHTDPEAKKFALSVMQRLNDKCKEWREAENIGYSVYGTPMESTTYKFAKCLQKRFGIIPGVTDKNYITNSYHVHVTEEIDAFSKLKFESEFQKLSPGGAISYVEVPDMQGNIPAVLSLIKYIYENIMYAELNSKSDYCEVCGYEGEIKIVETESGKLIWECPCCGNRDQNKMFVARRTCGYIGTQFWNQGRTQEIKDRVIHMSYHALNKN

SEQ ID NO: 1128 - protein, 706 aa, Unknown
  Description of Unknown: uncultivated organism sequence
  Category: MG60 effectors
  Description: MG60-343 effector
METNPQIELAFDFLQYTGTNVFLTGKAGTGKTTFLRELKRRSPKRMIVVAPTGVAAINAGGVTIHSFFQLPFGPYVPGNMEETPGGENRYTNKFSREKINIIRSLDLLVIDEISMVRADLLDAVSDVLCRYKDRSRPFGGVQLLMIGDLQQLAPVVKEEEWGVLKERYASPFFFCSRALQEVPYAGIELTQVYRQTDAFFLDLLNKVRDNRADQQTLQALNRRYIPGFRPDDTEGYITLTTHNYQAQQINREKLDELEGKAYSYEAEIVDEFPEYSFPTDQHLVLKKGAQVMFVKNDASPEKRYYNGKIGRITAISSDHILVRCGGEKEAITVAKEEWTNTKYSIDAETQEITETVEGVFRQYPLKTAWAITIHKSQGLTFERAIVDAGAAFTHGQVYVALSRCKTLEGLVLSSPLRTGALICDQVVRQFTESVERNQPGREQLADARKAYYLQLLKELFDYSGVLRRVQYMSRLMNEHLWRLYPELTERYRTVREFCHNELKDVGERFQAQLERLVSECGDPEQDGQVRERVAKGLAYFRENTERVAVLVRDTQPEVDNKEVRKSLNEALGRLQQEVEVKMATLEAAVGGFSVMGHLQAKAKAMIEKPKPKTRKVSDKVDVPDDILHPDLYQILRQWRKEEAASMNLPVYTVLHQKALLGIANTLPTNGRELLAIPGIGKKVAERYGAKLLEIVNDFRFATLGEA

SEQ ID NO: 1129 - protein, 724 aa, Unknown
  Description of Unknown: uncultivated organism sequence
  Category: MG60 effectors
  Description: MG60-344 effector
MNVIKRSGEEVVFDASKIENAIKKANKATTHNQMSDELIRSVTQSVIDKCENLKRSPNVEEIQDMVEGELMEHRCFAVAHNYITYRYERALVRKANSTDKQIMSLLERNNEEVKQENSNKNPLVNSVQRDYMAGEVSKDITKRFLLPQDVMEAHEQGIIHFHDSDYFAQHMHNCCLVNLEDMLQNGTVISETMIEKPHSFSTACNVATQIIAQVASSQYGGQSITLSHLAPFVQVSREKARREVKEELESLNLDSSEDTVNKMAEMRVRKEIEKGVQMIQYQVITLMTTNGQAPFVTVFMYLNEVPEGQTRDDLAIIIEEMLKQRIKGVKNEKGIWITPAFPKLIYVLEENNIEEGSKYWYLTELAAKCTAKRMVPDYISEKKMLELKVDVNGEGHCYPCMGCRSFLTTYLDENGKPKYYGRFNQGVVTLNLVDVACSSKQDEEAFWKIMDERLALCKKALMCRHERLLGTPSDVAPILWQNGALARLKKGEPIDKLLFGGYSTISLGYAGLCECVYYMTGHPHTEEPGTSFGLKVMQYLNDACAKWKAEENIDFSLYGTPMESTTFKFSKHLQERFGIIPHVTDKNYITNSYHVHVTEEIDAFTKLSFESQFQKLSPGGAISYVEVPNMENNIDAVLAIMKHIYNHIMYAELNTKSDYCQVCGYTGEIKIVEDENHKLVWECPNCGNRDQEKMNVARRTCGYIGTQFWNQGRTQEIKERVLHL

SEQ ID NO: 1130 - protein, 724 aa, Unknown
  Description of Unknown: uncultivated organism sequence
  Category: MG60 effectors
  Description: MG60-345 effector
MNVIKRSGEEVVFDASKIENAIKKANKATTHNQMSDELIRSVTQSVIDKCENLKRSPNVEEIQDMVEGELMEHRCFAVAHNYITYRYERALVRKANSTDKQIMSLLERNNEEVKQENSNKNPLVNSVQRDYMAGEVSKDITKRFLLPQDVMEAHEQGIIHFHDSDYFAQHMHNCCLVNLEDMLQNGTVISETMIEKPHSFSTACNVATQIIAQVASSQYGGQSITLSHLAPFVQVSREKARREVKEELESLNLDSSEDTVNKMAEMRVRKEIEKGVQMIQYQVITLMTTNGQAPFVTVFMYLNEVPEGQTRDDLAIIIEEMLKQRIKGVKNEKGIWITPAFPKLIYVLEENNIEEGSKYWYLTELAARCTAKRMVPDYISEKKMLELKVDANGEGHCYPCMGCRSFLTTYLDENGKPKYYGRFNQGVVTLNLVDVACSSKQDEEAFWRIMDERLALCKKALMCRHERLLGTPSDVAPILWQNGALARLKKGEPIDKLLFGGYSTISLGYAGLCECVYYMTGHPHTEEPGTSFGLKVMQYLNDACAKWKAEENIDFSLYGTPMESTTFKFSKHLQERFGIIPHVTDKNYITNSYHVHVTEEIDAFTKLSFESQFQKLSPGGAISYVEVPNMENNIDAVLAIMKHIYNHIMYAELNTKSDYCQVCGYTGEIKIVEDENHKLVWECPNCGNRDQEKMNVARRTCGYIGTQFWNQGRTQEIKERVLHL

SEQ ID NO: 1131 - protein, 716 aa, Unknown
  Description of Unknown: uncultivated organism sequence
  Category: MG60 effectors
  Description: MG60-346 effector
MLEVIKRNGERVPFNRDKITVAIEKAMNSSSGIYEEGQAAKIASEIEAYAASIQKDLTIYAIEDQVYYRLLKYNNPATARAYENYKTIQAFKRQTNTTDDDVFGLLNNTNLEVLDENSNKNGHVVSTQRDLIAGEVSKDIARRRLIPADIVQAHDSGAIHFHDMDYIIQPMFNCCLINLEDMLANGTVINGKKIDTPKSFQVACTVTTQIIAQVASGQYGGQSINGIDRILAPYVRKSFKKYMKAVVEEQREVYGIEPDMEKAEEIAWKRTKKEIKDGIQTIQYQINTLMTTNGQAPFVTLFMYFQPDYEYAREAALIDEELLRQRIQGIKNEANVYVTPAFPKLIYVLDEHNVREGSPYFYLTKLAAECTAKRMYPDYISAKKMRESYEGNVFSPMGCRSFLSPWKDEKGNYQFDGRFNMGVVSLNLPQIGILADGDEEKFFQILDKRLELCKKALLLRVDLLKRITSDVSPIHWQYGAIARLKPGETIEKFIYGGYATLSLGYIGIYEATVLTKHCSHTAPEGRKFAMRIMDDLNAHIKKWRKETNIGFALYGTPAENLTNLFCKIDKARFGSIPDVTDKGYYTNSYHVDVREPINVFDKFSFEADFEDKSTGGCISYAEIPNMTHNIPAVLTMVQYIYDHITYGEFNTKLDYCHECGFDGEIILNDDNEWECPRCHNKDRNKLTVIRRTCGYLGENFWNEGRTQEIKNRVLHI

SEQ ID NO: 1132 - protein, 708 aa, Unknown
  Description of Unknown: uncultivated organism sequence
  Category: MG60 effectors
  Description: MG60-347 effector
MKVIKRDGRVVDYNRDKIITAIEKANKEVKTKERVTKEEIKEITKYIEELDKKRILVEDIQDIIEEQLMDLKKFELAKKYMIYRYTRALVRKANTTDESILGLIKNQNKELLEENSNKNAVLASTQRDYIAGEVSKDLTKRILLPEKITKAHEDGVLHFHDMDYFLQPIFNCCLINIGDMLDNGTVMNGKLIESPKSFQVACTVMTQIIAAVASNQYGGQSVDISHLGKYVRKSYEKFRRTFENEFGNELSEDIIERLTQQRLKKEISAGVQTIQYQINTLMTTNGQSPFVTIFLNLKKDDPYIKENAMVIEEIIRQRYEGIKNEKGVYVTPAFPKLIYVLDEHNCLKGGEYDYLTKLAVKCSAKRLYPDYISAKKMRENYEGNVFSPMGCRSFLSPWKDENGNYKFEGRFNQGVVSINLPQIGIIADGDEEKFWKLLDERLEICKEALMCRHYSLLGTLSNTSPIHWRYGAIARMKPGEKIDELLKGGYSTLSLGYIGIYETTKLMKGVSHTTPEGHEFAIKVMKRLRDATAEWKKETGLGFALYGTPAESLCYRFARIDKEKFGEIKDVTDKGYYTNSYHVDVREKIDAFSKLKFESEFQELSLGGAISYVEIPNMRHNLKALEDLVKFIYDNIQYAEFNTKSDYCHVCGFDGEIIINDNLEWECPNCGNKDKNKMNVTRRTCGYLGENFWNEGKTKEIKARVLHL

SEQ ID NO: 1133 - protein, 716 aa, Unknown
  Description of Unknown: uncultivated organism sequence
  Category: MG60 effectors
  Description: MG60-348 effector
MLEVIKRNGERVPFNRDKITIAIEKAMNSSSGIYEEGQAAKIASEIEAYAASIQKDLTIYAIEDQVYYRLLKYNNPATARAYENYKTIQAFKRQTNTTDDDVFGLLNNTNLEVLDENSNKNGHVVSTQRDLIAGEVSKDIARRKLIPADIVQAHDSGAIHFHDMDYIIQPMFNCCLINLEDMLANGTVINGKKIDTPKSFQVACTVTTQIIAQVASGQYGGQSINGIDRILAPYVRKSFKKYMKAVVEEQREVYGIEPDMEKAEEIAWKRTKKEIKDGIQTIQYQINTLMTTNGQAPFVTLFMYFQPDYEYAREAALIDEELLRQRIQGIKNEANVYVTPAFPKLIYVLDEHNVREGSPYFYLTKLAAECTAKRMYPDYISAKKMRESYEGNVFSPMGCRSFLSPWKDEKGNYQFDGRFNMGVVSLNLPQIGILADGDEEKFFQILDKRLELCKKALLLRVDLLKRITSDVSPIHWQYGAIARLKPGETIEKFIYGGYATLSLGYIGIYEATVLTKHCSHTAPEGRKFAMRIMDDLNAHIKKWRKETNIGFALYGTPAENLTNLFCKIDKARFGSIPDVTDKGYYTNSYHVDVREPINVFDKFSFEADFEDKSTGGCISYAEIPNMTHNIPAVLTMVQYIYDHITYGEFNTKLDYCHECGFDGEIILNDDNEWECPRCHNKDRNKLTVIRRTCGYLGENFWNEGRTQEIKNRVLHI

SEQ ID NO: 1134 - protein, 724 aa, Unknown
  Description of Unknown: uncultivated organism sequence
  Category: MG60 effectors
  Description: MG60-349 effector
MNVIKRSGEEVVFDASKIENAIKKANKATTHNQMSDELIRSVTQSVINKCENLKRSPNVEEIQDMVEGELMEHRCFAVAHNYITYRYERALVRKANSTDKQIMSLLERNNEEVKQENSNKNPLVNSVQRDYMAGEVSKDITKRFLLPQDVMEAHEQGIIHFHDSDYFAQHMHNCCLVNLEDMLQNGTVISETMIEKPHSFSTACNVATQIIAQVASSQYGGQSITLSHLAPFVQVSREKARREVKEELESLNLDSSEDTVNKMAEMRVRKEIEKGVQMIQYQVITLMTTNGQAPFVTVFMYLNEVPEGQTRDDLAIIIEEMLKQRIKGVKNEKGIWITPAFPKLIYVLEENNIEEGSKYWYLTELAARCTAKRMVPDYISEKKMLELKVDANGEGHCYPCMGCRSFLTTYLDENGKPKYYGRFNQGVVTLNLVDVACSSKQDEEAFWRIMDERLALCKKALMCRHERLLGTPSDVAPILWQNGALARLKKGEPIDKLLFGGYSTISLGYAGLCECVYYMTGHPHTEEPGTSFGLKVMQYLNDACAKWKAEENIDFSLYGTPMESTTFKFSKHLQERFGIIPHVTDKNYITNSYHVHVTEEIDAFTKLSFESQFQKLSPGGAISYVEVPNMENNIDAVLAIMKHIYNHIMYAELNTKSDYCQVCGYTGEIKIVEDENHKLVWECPNCGNRDQEKMNVARRTCGYIGTQFWNQGRTQEIKERVLHL

SEQ ID NO: 1135 - protein, 724 aa, Unknown
  Description of Unknown: uncultivated organism sequence
  Category: MG60 effectors
  Description: MG60-350 effector
MNVIKRSGEEVVFDASKIENAIKKANKATTHNQMSDELIRSVTQSVINKCENLKRSPNVEEIQDMVEGELMEHRCFAVAHNYITYRYERALVRKANSTDKQIMSLLERNNEEVKQENSNKNPLVNSVQRDYMAGEVSKDITKRFLLPQDVMEAHEQGIIHFHDSDYFAQHMHNCCLVNLEDMLQNGTVISETMIEKPHSFSTACNVATQIIAQVASSQYGGQSITLSHLAPFVQVSREKARREVKEELESLNLDSSEDTVNKMAEMRVRKEIEKGVQMIQYQVITLMTTNGQAPFVTVFMYLNEVPEGQTRDDLAIIIEEMLKQRIKGVKNEKGIWITPAFPKLIYVLEENNIEEGSKYWYLTELAARCTAKRMVPDYISEKKMLELKVDANGEGHCYPCMGCRSFLTTYLDENGKPKYYGRFNQGVVTLNLVDVACSSKQDEEAFWKIMDERLALCKKALMCRHERLLGTPSDVAPILWQNGALARLKKGEPIDKLLFGGYSTISLGYAGLCECVYYMTGHPHTEEPGTSFGLKVMQYLNDACAKWKAEENIDFSLYGTPMESTTFKFSKHLQERFGIIPHVTDKNYITNSYHVHVTEEIDAFTKLSFESQFQKLSPGGAISYVEVPNMENNIDAVLAIMKHIYNHIMYAELNTKSDYCQVCGYTGEIKIVEDENHKLVWECPNCGNRDQEKMNVARRTCGYIGTQFWNQGRTQEIKERVLHL

SEQ ID NO: 1136 - protein, 745 aa, Unknown
  Description of Unknown: uncultivated organism sequence
  Category: MG60 effectors
  Description: MG60-351 effector
MAIVIKMNDKKNENAKYVIKRNGAEALFDEDKIVNALFKANDSTLKNKITKQQIVNIADHIKAYVEQTTYALNIEDIQDMVENELMQIKAFDVARSYITYRYKRALARQKNTTDDKILSLIEHNNEEVKQENSNKNPVVNSVQRDYMAGEVSKDLCKRIFLPSDIWEAHEDGIIHFHDADYFAQHMHNCCLVNLEDMLQNGTVISDTMIDRPKSFSTACNIATQAIAQIASQQYGGQTMSIAHLAPFVDVSRQKYMRKQMASMEKAGIKTTEAQLESVVEDMVDEEIKRGVQMIQYQLITLMTTNGQAPFVTIYMYLNECKDGRTKADMVKVIREMLKQRIQGVKNEKGVYVTPAFPKLIYVLEEDNIHEGDKYWELTKLAAKCTAKRMVPDYISEKIMKELKQGDVYSCMGCRSFLTVDRTKENIANAGNYKDGEHKYYGRFNQGVVTLNLVDVACTSARDEDYFWEILDKRLELCHKALRIRHERLLGTPSDVAPILWQHGALARLKKGETIDKLLYGGYSTISLGYAGLCECTRYMKGVSHTDPLGTEFATRVMQKLNDACAKWKAEENIDYSVYGTPLESTTYKFAKCLQKRFGIIPGVTDKNYITNSYHVHVTEKINAFDKLKFEAPFQKLSPGGAISYVEVPNLQDNIEAVLAIMQYIYENIMYAELNTKSDYCEVCGYDGEIRVVEDEHGKLVWECPNCGNRDQNKMSVARRTCGYIGTQFWNQGRTQEIKERYVHLQ

SEQ ID NO: 1137 - protein, 853 aa, Unknown
  Description of Unknown: uncultivated organism sequence
  Category: MG60 effectors
  Description: MG60-352 effector
MARSIEKIFEDNILLKYNLYNSIFTTLPFEKIEHVGTLLPLFSSYCSKGFEKKQSPKQIVQGFFENYLPDIKEEKQFDILFRFIQYVEREIVLFDAIEESAFPLLQSKKQNNSIKYIIEQALQEKKTEELKHFIENFRIRTVLTAHPTQFYPGKVLGIITDLSEAIKNNNFVLIKNLLLQLGKTPFIKHKKPSPLDEANHLIWYLENILYDAIPEIYNNIIEDLLEKESPNAIFEIGFWPGGDRDGNPFVTTEITLKVAEQLKLAILKKYHSDLKKLKRRLTFNGIFNKLESLEKNIQKIIINPKKKTELTQEKLLDRLHEIRTVLKEKHQSIFISDLDELIRKVRIFGFYFASLDIRQDSRIHTSAFNHITRIYPDVLTENYADFDEKQKLVYLGEINKKINISEFKDPMAISTLESMQAIKKIQKSNGKKGAHRYIISNTQSATNVMQVFCMLRMSGFNKKMPVDIVPLFETINDLQSAGKIMEILYKNPAYKKHLKSRKNEQIIMLGFSDGTKDGGYLAANWSIYRAKEDLSLMAQKYDIKVVFFDGRGGPPARGGGKTHSFYSSLGKNIENKAIEITVQGQTISSQYGSIELAKHNLEQLLSAGIKNKVFQGENNELSAENRKILEHLSDLAYRKYKNFKEHPKFIPYLEKMSTLKYYGKTKIGSRPTKRANSDKLIFSDLRAIPFVGAWSQLKQNVPGFFGVGSALLHYEQEGAFNKIENLYAESKFFKALIENVIVSLKKSFFQLTEYMKNDEEFGDFWKIIYDEYNNTQRLLLKLTKRKDLLEKSPETKASIETRHKIVLPLLTIQQYALQEIQITGKENKERIENLEKMIVRSLFGNINASRNAV

SEQ ID NO: 1138 - protein, 717 aa, Unknown
  Description of Unknown: uncultivated organism sequence
  Category: MG60 effectors
  Description: MG60-353 effector
MKVIKRDGHVVDYEPEKIEAAIQKANQEVDEADRVSDIQIRNIIKYIEGLKKKRMLVEDIQDVIEMRLMSLGKYVLAKAYITYRYTRELVRRSNTTDLTIKELIDGDSEYWNTENSNKNARVVTTQRDYLAGITSTDITRRFLLPEDVVNAHDSGIIHFHDADYFAQNALHNCDLINLDDMLQNGTSINGVMIEKPHRFLTAMTIATQLITAVSSSQYGGATITLTHLAPFVRASREYYEKRYSNRKLTKEQVKKFVEEDLHKEIVDGVQTFQYQINSMTTTNGQAPFLSVNMYLGETEEYKDELAMIIEEVLRQRIQGMKNEKGVWITPAFPKLLYVLEEDNINPKSKYYYLTKLATECTAKRMVPDYISEKVMKELKIDKNGNGQCYPCMGCRSFLTPYVDNDGKPKYYGRFNQGVVTLNLPDIALSSKKDMDEFWKIFDERLELSHKALRIRYKRLSKATSDVAPILWQHGALARLPKGASIKELLHNGYSTISLGYAGLYECVKYMTGKSHTDGAEGEEFGLKVMQHLNDACNKWKEEEKIDYSVYGTPIESTTYKFAKCLKERFGVIKGITDRNYITNSYHIPVFEEVDAFTKLAIESKFQKLSPGGAISYVEAPNLVKNLDAVLELITFIYNNIMYAEINTKSDYCHKCGYTGEILIDDNLEWYCPECGNRDHTKLNVARRTCGYIGTNFWNKGRTQEIKERVLHIDNKEA

SEQ ID NO: 1139 - protein, 706 aa, Unknown
  Description of Unknown: uncultivated organism sequence
  Category: MG60 effectors
  Description: MG60-354 effector
METNPQIELAFDFLQYTGTNVFLTGKAGTGKTTFLRELKRRSPKRMIVVAPTGVAAINAGGVTIHSFFQLPFGPYVPGNAEGGAENEKRYTNKFSREKINIIRSLDLLVIDEISMVRADLLDAVSDVLCRYKDRSRPFGGVQLLMIGDLQQLAPVVKDDEWSLLKERYASPFFFCSRALQEVPYVGIELTQVYRQTDAFFLDLLNKVRDNRADQATLQALNRRYIPGFRPDDTEGYITLTTHNYQAQQINREKLEELEEKAYSYEAEIVDEFPEYSFPTDRHLVLKKGAQVMFVKNDASPEKRYYNGKIGRVTAISSDHILVRCGEEREAITVAKEEWTNTKYTIDAETQEISETVEGVFRQYPLKTAWAITIHKSQGLTFERAIVDAGAAFTHGQVYVALSRCKTLEGLVLSSPLRTGALICDQVVRQFTEGIEQGQPGREQLADAKRAYYLQLLKELFDYNGVLRRMQYMSRILNEHLWRLYPELTERYRTEREFCHNELKDVGERFQMQLERLVNECREPEQDGQVRERVAKGLAYFRERTGRVFALVQDTQPEVDNKEVRKSLNEALGRLQQEVEVKMATLEAAAGGFSVMGYLQAKARAMIEKPKAKARKISDKVDVPEDILHPDLYQILRQWRKEEAASMNLPVYTVLHQKALLGIANILPTNGRELLSIPGIGKKVAERYGKKLLEMVNDYRFATLGDA

SEQ ID NO: 1140 - protein, 716 aa, Unknown
  Description of Unknown: uncultivated organism sequence
  Category: MG60 effectors
  Description: MG60-355 effector
MLEVIKRNGERVPFNRDKITVAIEKAMNSSSGIYEEGQAAKIAGEIEAYAASIQKDLTIYAIEDQVYYRLLKYNNPATARAYENYKTIQAFKRQTNTTDDDVFGLLNNTNLEVLDENSNKNGHVVSTQRDLIAGEVSKDIARRKLIPADIVQAHDSGAIHFHDMDYIIQPMFNCCLINLEDMLANGTVINGKKIDTPKSFQVACTVTTQIIAQVASGQYGGQSINGIDRILAPYVRKSFKKYMKAVVEEQREVYGIEPDMEKAEEIAWKRTKKEIKDGIQTIQYQINTLMTTNGQAPFVTLFMYFQPDYEYAREAALIDEELLRQRIQGIKNEANVYVTPAFPKLIYVLDEHNVREGSPYFYLTKLAAECTAKRMYPDYISAKKMRESYEGNVFSPMGCRSFLSPWKDEKGNYQFDGRFNMGVVSLNLPQIGILADGDEEKFFQILDKRLELCKKALLLRVDLLKRITSDVSPIHWQYGAIARLKPGETIEKFIYGGYATLSLGYIGIYEATVLTKHCSHTAPEGRKFAMRIMDDLNAHIKKWRKETNIGFALYGTPAENLTNLFCKIDKARFGSIPDVTDKGYYTNSYHVDVREPINVFDKFSFEADFEDKSTGGCISYAEIPNMTHNIPAVLTMVQYIYDHITYGEFNTKLDYCHECGFDGEIILNDDNEWECPRCHNKDRNKLTVIRRTCGYLGENFWNEGRTQEIKNRVLHI

SEQ ID NO: 1141 - protein, 716 aa, Unknown
  Description of Unknown: uncultivated organism sequence
  Category: MG60 effectors
  Description: MG60-356 effector
MLEVIKRNGERVPFNRDKITVAIEKAMNSSSGIYEEGQAAKIAGEIEAYAASIQKDLTIYAIEDQVYYRLLKYNNPATARAYENYKTIQAFKRQTNTTDDDVFGLLNNTNLEVLDENSNKNGHVVSTQRDLIAGEVSKDIARRKLIPADIVQAHDSGAIHFHDMDYIIQPMFNCCLINLEDMLANGTVINGKKIDTPKSFQVACTVTTQIIAQVASGQYGGQSINGIDRILAPYVRKSFKKYMKAVVEEQREIYGIEPDMEKAEEIAWKRTKKEIKDGIQTIQYQINTLMTTNGQAPFVTLFMYFQPDYEYAREAALIDEELLRQRIQGIKNEANVYVTPAFPKLIYVLDEHNVREGSPYFYLTKLAAECTAKRMYPDYISAKKMRESYEGNVFSPMGCRSFLSPWKDEKGNYQFDGRFNMGVVSLNLPQIGILADGDEEKFFQILDKRLELCKKALLLRVDLLKRITSDVSPIHWQYGAIARLKPGETIKKFIYGGYATLSLGYIGIYEATVLTKHCSHTAPEGRKFAMRIMDDLNAHIKKWRKETNIGFALYGTPAENLTNIFCKIDKARFGSIPDVTDKGYYTNSYHVDVREPINVFDKFSFEADFEDKSTGGCISYAEIPNMTHNIPAVLTMVQYIYDHITYGEFNTKLDYCHECGFDGEIILNDDNEWECPRCHNKDRNKLTVIRRTCGYLGENFWNEGRTQEIKNRVLHI

SEQ ID NO: 1142 - protein, 752 aa, Unknown
  Description of Unknown: uncultivated organism sequence
  Category: MG60 effectors
  Description: MG60-357 effector
MYIYDEILDGNMHTEEPNMCVMKRSGERVPFDRVKIAEAIERANREEGILSERLTDAQIDQITRGIEKDASNAGRDLSVEEIQDKVEDALMCSGRPKVARLYITYRYKHNEMRKMSNIDQKIAGVVERDNEEVKQENSNKNPTVLSVQRDYMAGEWSRYYTSRYLLPEEIVDAHKNGIIHFHDADYFAQHMHNCDLVNLEDMLQNGTCISGTHIDKPKSFSTACTVASQIVAQVASSQYGGQTITMSHLAPFVDISRKKITSRLAEELHETGIEVPAEKLSELVEKELLKEIESGCQTIQYQLITLQSTNGQAPFVTVFLYLGEVPEGQLRDDLAIVIEVMLKQRILGVKDKSGVYITPAFPKLIYVLQEDNIREGTPYFYLTELAAKCTAKRMVPDYISEKKALELKGDVYPCMGCRSFLTPDRFTDAGVGNIANDKSYVPGRHKYYGRFNQGVVTLNLVDIACSSGRDERKFWDIMNERLDLCHRALRIRHERLKGTPSDVAPILWQDGAIARLASGETIDRLLMNGYSTISLGYAGLAECVFYMKGTSHTSEEGKEFGLRVMQALNDACAKWKKAENIDYSVYGTPLESTTYKFAKCLQRRFGKIPGVTDKNYITNSYHIHVSEHIDAFSKLSKEAEFQQLSPGGAISYVEVPNMQNNIPAVIRVMQHIYDSILYAELNTKSDLCEVCGFDGEIQVKKDVTGKLVWECPNCGNRDQSKMHVARRTCGYIGTQYWNQGRTAEIADRVLHL

SEQ ID NO: 1143 - protein, 716 aa, Unknown
  Description of Unknown: uncultivated organism sequence
  Category: MG60 effectors
  Description: MG60-358 effector
MLEVIKRNGERVPFNRDKITIAIEKAMNSSSGIYEEGQAAKIAGEIEAYAASIQKDLTIYAIEDQVYYRLLKYNNPATARAYENYKTIQAFKRQTNTTDDDVFGLLNNTNLEVLDENSNKNGHVVSTQRDLIAGEVSKDIARRKLIPADIVQAHDSGAIHFHDMDYIIQPMFNCCLINLEDMLANGTVINGKKIDTPKSFQVACTVTTQIIAQVASGQYGGQSINGIDRILAPYVRKSFKKYMKAVVEEQREVYGIEPDMEKAEEIAWKRTKKEIKDGIQTIQYQINTLMTTNGQAPFVTLFMYFQPDYEYAREAALIDEELLRQRIQGIKNEANVYVTPAFPKLIYVLDEHNVREGSPYFYLTKLAAECTAKRMYPDYISAKKMRESYEGNVFSPMGCRSFLSPWKDKKGNYQFDGRFNMGVVSLNLPQIGILADGDEEKFFQILDKRLELCKKALLLRVDLLKRITSDVSPIHWQYGAIARLKPGETIEKFIYGGYATLSLGYIGIYEATVLTKHCSHTAPEGRKFAMRIMDDLNAHIKKWRKETNIGFALYGTPAENLTNLFCKIDKARFGSIPDVTDKGYYTNSYHVDVREPINVFDKFSFEADFEDKSTGGCISYAEIPNMTHNIPAVLTMVQYIYDHITYGEFNTKLDYCHECGFDGEIILNDDNEWECPRCHNKDRNKLTVIRRTCGYLGENFWNEGRTQEIKNRVLHI

SEQ ID NO: 1144 - protein, 656 aa, Unknown
  Description of Unknown: uncultivated organism sequence
  Category: MG60 effectors
  Description: MG60-359 effector
MKKEGLMKVIKRDGRAVDYDRSKIQIAIEKANQEVKESERVSKEDILGIISYIEELDKKRILVEDIQDIIEQKIMELKKYELAKKYIVYRYTRALVRKQNTTDETILGIIRNDNKEEGQEDNEITVSAQRDYIAGEVSKDLTKRLLLPEKVASADEEGVLYFHDSEYFVHPMINSSFVGIGDMLDNGTVMSNAKIESPKSFLVACTVATQIMAAIANNQYGGQAIDMQCFGKYLRKSYEKFKGEIENEFNGELEKESIENLVNKRLKTELKSGIQIMQYQFNTLKVIKGRMPQITLFLHLDKEDTYIKENAMIIEEILKQKQNGFKDENGQNITLEFPKLIYVIDEFNNLAGGEYDYLTKLALECSLKTKSPSYISAKIMRQYYNGNVFCPMDAGSFLLPWERENLINKETSTKSNNSIDFKEKSKFNQGIVSINLPQIAIIADGDEKKFWKLLEERLDICLDALKCRHYSLVGISSDMSPTHWQYGGIARLEKGEKIDKLLYNGYSTLTLGYVGIYEMAMKMTGQNHLEGNGREFAVKVLEYLNETTKKWKKETNIDFILCGITSKKVGKRFLKKDKEKFGTIKGITDKEYYTGSYLMDPKQNEETLTALSFEKEFQKMSPGGNASYLKVANLKMDELEEILKYSYENICYLRLI

SEQ ID NO: 1145 - protein, 706 aa, Unknown
  Description of Unknown: uncultivated organism sequence
  Category: MG60 effectors
  Description: MG60-360 effector
METNPQIELAFDFLQYTGTNVFLTGKAGTGKTTFLRELKRRSPKRMIVVAPTGVAAINAGGVTIHSFFQLPFGPYVPGNMEETPGGENRYTNKFSREKINIIRSLDLLVIDEISMVRADLLDAVSDVLCRYKDRSRPFGGVQLLMIGDLQQLAPVVKEEEWGLLKERYASPFFFCSRALQEVPYAGIELTQVYRQTDAFFLDLLNKVRDNRADQQTLQALNRRYIPGFRPDDTEGYITLTTHNYQAQQINREKLDELEGKAYSYEAEIVDEFPEYSFPTDQHLVLKKGAQVMFVKNDASPEKRYYNGKIGRITAISSDHILVRCGGEKEAITVAKEEWTNTKYSIDAETQEITETVEGVFRQYPLKTAWAITIHKSQGLTFERAIVDAGAAFTHGQVYVALSRCKTLEGLVLSSPLRTGALICDQVVRQFTESVERNQPGREQLADARKAYYLQLLKELFDYSGVLRRVQYMSRLMNEHLWRLYPELTERYRTVREFCHNELKDVGERFQAQLERLVSECGDPEQDGQVRGRVAKGLAYFRENTERVAVLVRDTQPEVDNKEVRKSLNEALGRLQQEVEVKMATLEAAVGGFSVMGHLQAKAKAMIEKPKPKTRKVSDKVDVPDDILHPDLYQILRQWRKEEAASMNLPVYTVLHQKALLGIANTLPTNGRELLAIPGIGKKVAERYGAKLLEIVNDFRFATLGEA

SEQ ID NO: 1146 - protein, 717 aa, Unknown
  Description of Unknown: uncultivated organism sequence
  Category: MG60 effectors
  Description: MG60-361 effector
MKVIKRDGHVVDYEPEKIEAAIQKANQEVDEADRVSDIQIRNIIKYIEGLKKKRMLVEDIQDVIEMRLMSLGKYVLAKAYITYRYTRELVRRSNTTDLTIKELIDGDSEYWNTENSNKNARVVTTQRDYLAGITSTDITRRFLLPEDVVNAHDSGIIHFHDADYFAQNALHNCDLINLNDMLQNGTSINGVMIEKPHRFLTAMTIATQLITAVSSSQYGGATITLTHLAPFVRASREYYEKRYSNRKLTKEQVKKFVEEDLHKEIVDGVQTFQYQINSMTTTNGQAPFLSVNMYLGETEEYKDELAMIIEEVLRQRIQGMKNEKGVWITPAFPKLLYVLEEDNINPKSKYYYLTKLAAECTAKRMVPDYISEKVMKELKIDKNGNGQCYPCMGCRSFLTPYVDNDGKPKYYGRFNQGVVTLNLPDIALSSKKDMDEFWKIFDERLELSHKALRIRYKRLSKATSDVAPILWQHGALARLPKGASIKELLHNGYSTISLGYAGLYECVKYMTGKSHTDGAEGEEFGLKVMQHLNDACNKWKEEEKIDYSVYGTPIESTTYKFAKCLKERFGVIKGITDRNYITNSYHIPVFEEVDAFTKLAIESKFQKLSPGGAISYVEAPNLVKNLDAVLEIITFIYNNIMYAEINTKSDYCHKCGYTGEILIDDNLEWYCPECGNRDHTKLNVARRTCGYIGTNFWNKGRTQEIKERVLHIDNKEA

SEQ ID NO: 1147 - protein, 724 aa, Unknown
  Description of Unknown: uncultivated organism sequence
  Category: MG60 effectors
  Description: MG60-362 effector
MNVIKRSGEEVVFDASKIENAIKKANKATTHNQMSDELIRSVTQSVIDKCENLKRSPNVEEIQDMVEGELMEHRCFAVAHNYITYRYERALVRKANSTDKQIMSLLERNNEEVKQENSNKNPLVNSVQRDYMAGEVSKDITKRFLLPQDVMEAHEQGIIHFHDSDYFAQHMHNCCLVNLEDMLQNGTVISETMIEKPHSFSTACNVATQIIAQVASSQYGGQSITLSHLAPFVQVSREKARREVKEELESLNLDSSEDTVNKMAEMRVRKEIEKGVQMIQYQVITLMTTNGQAPFVTVFMYLNEVPEGQTRDDLAIIIEEMLKQRIKGVKNEKGIWITPAFPKLIYVLEENNIEEGSKYWYLTELAARCTAKRMVPDYISEKKMLELKVDANGEGHCYPCMGCRSFLTTYLDENGKPKYYGRFNQGVVTLNLVDVACSSKQDEEAFWKIMDERLALCKKALMCRHERLLGTPSDVAPILWQNGALARLKKGEPIDKLLYGGYSTISLGYAGLCECVYYMTGHPHTEEPGTSFGLKVMQYLNDACAKWKAEENIDFSLYGTPMESTTFKFSKHLQERFGIIPHVTDKNYITNSYHVHVTEEIDAFTKLSFESQFQKLSPGGAISYVEVPNMENNIDAVLAIMKHIYNHIMYAELNTKSDYCQVCGYTGEIKIVEDENHKLVWECPNCGNRDQEKMNVARRTCGYIGTQFWNQGRTQEIKERVLHL

SEQ ID NO: 1148 - protein, 724 aa, Unknown
  Description of Unknown: uncultivated organism sequence
  Category: MG60 effectors
  Description: MG60-363 effector
MNVIKRSGEEVVFDSIKIENAIKKANKATTHNQMSDELIHTVTQSVVDKCENLKRSPNVEEIQDMVEGELMEKRCFAVAHNYITYRYERALVRKANSTDKQIMSLLERNNEEVKQENSNKNPLVNSVQRDYMAGEVSKDITKRFLLPQDVMEAHEQGIIHFHDSDYFAQHMHNCCLVNLDDMLQNGTVISETMIEKPHSFSTACNVATQIIAQVASSQYGGQSITLSHLAPFVQVSREKARREVKEELESLNLDSSEDTVNKMAEMRVRKEIEKGVQMIQYQVITLMTTNGQAPFVTVFMYLNEVPEGQTRDDLAIIIEEMLKQRIKGVKNEKGIWITPAFPKLIYVLEENNIEEGSKYWYLTELAAKCTAKRMVPDYISEKKMLELKVDANGEGHCYPCMGCRSFLTTYLDENGKPKYYGRFNQGVVTLNLVDVACSSKQDEEAFWKIMDERLALCKKALMCRHERLLGTPSDVAPILWQNGALARLKKGEPIDKLLFGGYSTISLGYAGLCECVYYMTGHPHTEEPGTSFGLKVMQYLNDACAKWKAEENIDFSLYGTPMESTTFKFSKHLQERFGIIPHVTDKNYITNSYHVHVTEEIDAFTKLSFESQFQKLSPGGAISYVEVPNMENNIDAVLAIMKHIYNHIMYAELNTKSDYCQVCGYTGEIKIVEDENHKLVWECPNCGNRDQEKMNVARRTCGYIGTQFWNQGRTQEIKERVLHL

SEQ ID NO: 1149 - protein, 752 aa, Unknown
  Description of Unknown: uncultivated organism sequence
  Category: MG60 effectors
  Description: MG60-364 effector
MYIYDEILDGNMHTEEPNMCVMKRSGERVPFDRVKIAEAIERANREEGILSERLTDAQIDQITRGIEKDASNAGRDLSVEEIQDKVEDALMCSGRPKVARLYITYRYKHNEMRKMSNIDQKIAGVVERDNEEVKQENSNKNPTVLSVQRDYMAGEWSRYYTSRYLLPEEIVDAHKSGIIHFHDADYFAQHMHNCDLVNLEDMLQNGTCISGTHIDKPKSFSTACTVASQIVAQVASSQYGGQTITMSHLAPFVDISRKKITSRLAEELHETGIEVPAEKLSELVEKELLKEIESGCQTIQYQLITLQSTNGQAPFVTVFLYLGEVPEGQLRDDLAIVIEVMLKQRILGVKDKSGVYITPAFPKLIYVLQEDNIREGTPYFYLTELAAKCTAKRMVPDYISEKKALELKGDVYPCMGCRSFLTPDRFTDAGVGNIANDKSYVPGRHKYYGRFNQGVVTLNLVDIACSSGRDERKFWDIMNERLDLCHRALRIRHERLKGTPSDVAPILWQDGAIARLASGETIDRLLMNGYSTISLGYAGLAECVFYMKGTSHTSKEGKEFGLRVMQALNDACAKWKKAENIDYSVYGTPLESTTYKFAKCLQRRFGKIPGVTDKNYITNSYHIHVSEHIDAFSKLSKEAEFQQLSPGGAISYVEVPNMQNNIPAVIRVMQHIYDSILYAELNTKSDLCEVCGFDGEIQVKKDVTGKLVWECPNCGNRDQSKMHVARRTCGYIGTQYWNQGRTAEIADRVLHL

SEQ ID NO: 1150 - protein, 760 aa, Unknown
  Description of Unknown: uncultivated organism sequence
  Category: MG60 effectors
  Description: MG60-365 effector
MKVIKRDCSEVDFDKSKISTAILKAMKNGSGIVKQKIAEDIANEIEEDCKDKDEVSISDIESMVYDKLITKKQRLTAKAYEGYRSIREFQRENENTIDTEITELLSGESDYWNNENSNKNPRLNTTQRDYLAGIVSKDASRRYILPPEIVQAHDDGLIHVHDLDYLIQYMNNCCLINLEDMLQNGTVISETLIEKPHSFSTACTVATQIIAQVASSQYGGQSISLAHLAPFVDISRQKIRKEVIEEQEYLYRNIDEKEWVKPRKVLGKKLRKDQEKFYKNKDRLLKFIDATDIEDIVEKRLKKEIEKGIQTIQYQITTLMTTNGQAPFITLFMYLNEAHNQREKDDLAMLIEEELRQSYLGVKNEEGVYITPAFPKVIYVLQEDNIHEEDKYWYLTEMAAKCSMKRLTPDYISEKIMKEMKDGNCYPVMGCRSALTVWHDENGKPKFYGRFNSGVVTVSLPDIALSSGGDFNEFWRIFDERTELCHKALKIRHQRLRGTKSDVAPILWQHGAFARLKKGESIDKLLFGGYSTLSLGYAGLAECVKYMTGHYHCDEGIGEKFGLEVMQALNDKCSQWKIDENIDYSLYGTPLEATTEKFAKKLKERFGIIEGVTDRTYITNSYHIPVFIHIDAFGKLRIEAKFQRLSPGGSISYIECPNMENNIPAVLEVMKFIYNNNMYAELNTKSDYCQKCGWSKEIKLIDEGGKLIWECPNCGNRDVRTMDITRRTCGYKGTARNGWNQGRLGDIHDRVPHLDDIEEE

SEQ ID NO: 1151 - protein, 733 aa, Unknown
  Description of Unknown: uncultivated organism sequence
  Category: MG60 effectors
  Description: MG60-366 effector
MNILKRNGSEVLFDKSKIVIAISKANEEVEPHERLPISRIEAIANDIEADCAHLGYEVSVEDVQDMVEKQILDSNAFTLAKTYMRYRQDHNIARGKQELYKRLLAIVEGDSEEATQENSNKNPVIASTQRDYMAGEVSRDITNTMLLPKDIVDAHNAGIIHFHDADYYAQHMHNCDLINLEDMLQNGTVISGTLIEKPHSFSTACNIATQIIAQVASNQYGGQSISLSHLAPFVDVSRQKIRDSVMKELELAGAAPTQETIAEIVEMRLKDEIKRGIQTIQYQVVTLMTTNGQAPFITVFMYLDEVSDPQTKADLAMIIEETLRQRYQGVKNETGAWVTPAFPKLIYVLDEDNIHEDSPYWYLTVMAAKCTARRMVPDYISAKKMRELKGDVYTCMGCRSFLTPDRFTDEGAGNIANAGNYDPTKHKYYGRFNQGVVTINLPDVGLSAHKDFDLFWKIFDERLELCHRALKLRHERLLGTPSDISPIHWQYGALARLKKGETIDKLLFNGYSTISLGYAGLYECTVAMTGKSHTDPAGKEFALAVMQHMNDKCNEWKAAENIDYSLYGTPIESTTYKFAKCLKKRFGIIPEVTDHNYITNSYHISVREKVDAFTKLAFESDFQKLSPGGAISYVEVPDMQNNIPAVLEVMKFIYDHIMYAELNTKSDYCQVCGWDGEIPIVEDENGKLIFKCPRCGNEDRSKLNIARRTCGYIGTNDWNQGRVQEIKERVLHL

SEQ ID NO: 1152 - protein, 717 aa, Unknown
  Description of Unknown: uncultivated organism sequence
  Category: MG60 effectors
  Description: MG60-367 effector
MKVIKRDGHMVDWCPEKIEDAIMKANKEVEEDEQASSVQIRNIIKYIEKLGKKRILVEDIQDIIEMKLMSQGKYELAKRYITYRYTRELVRRSNTTDQSIKELIDGESEYWNTENSNKNAKIVTTQRDYLAGITSTDITRRFLLPEDIVEAHDAGIIHFHDADYFAQNALHNCDLVNLEDMLQNGTSINGVMIEKPHRFLTAMTIATQIITAVSSSQYGGVTITLTHLAPFVRDSYKRYLDKYKKRKLSKEDCEKFAMEDTKKEIVDGVQTFQYQVNSMTTTNGQAPFLSVCMYLGETDEYKEELAWIIEEFLKQRIVGMKNEQGVYITPAFPKLLYVLEEDNIHKNSKYYYLTKLAAECTSKRMVPDYISEKIMKELKIDKNGNGNCYPCMGCRSFLTPYVDENGKPKYYGRFNQGVVTINLVDVALSSDKDMDVFWQIFEERLELCHRALQIRHKRLSKATSDVAPILWQHGALARLPKGASIHDLLHNGYSTISLGYAGLYECVKYMTGHSHTDNGKGKEFGLKVMEKMNEKCKEWKELENIDYSVYGTPIEATTYKFAKGLKERFGVVKGITDRDYITNSYHVPVFEEIDAFTKLKLESEFQKLSPGGAISYIETPNLSNNIDVVLEVMNFIYDNIMYAELNTKSDYCQECGYTGEILIDDNMEWYCPNCGNRDHSKLNVARRTCGYIGTNFWNKGRTQEIKERVIHIDNKEA

SEQ ID NO: 1153 - protein, 724 aa, Unknown
  Description of Unknown: uncultivated organism sequence
  Category: MG60 effectors
  Description: MG60-368 effector
MNVIKRSGEEVVFDASKIENAIKKANKATTHNQMSDELIHSVTQSVIDKCENLKRSPNVEEIQDMVEGELMEHRCFAVAHNYITYRYERALVRKANSTDKQIMSLLERNNEEVKQENSNKNPLVNSVQRDYMAGEVSKDITKRFLLPQDVMEAHEQGIIHFHDSDYFAQHMHNCCLVNLEDMLQNGTVISETMIEKPHSFSTACNVATQIIAQVASSQYGGQSITLSHLAPFVQVSREKARREVKEELESLNLDSSEDTVNKMAEMRVRKEIEKGVQMIQYQVITLMTTNGQAPFVTVFMYLNEVPEGQTRDDLAIIIEEMLKQRIKGVKNEKGIWITPAFPKLIYVLEENNIEEGSKYWYLTELAAKCTAKRMVPDYISEKKMLELKVDANGEGHCYPCMGCRSFLTTYLDENGKPKYYGRFNQGVVTLNLVDVACSSKQDEEAFWRIMDERLALCKKALMCRHERLLGTPSDVAPILWQNGALARLKKGEPIDKLLFGGYSTISLGYAGLCECVYYMTGHPHTEEPGTSFGLKVMQYLNDACAKWKAEENIDFSLYGTPMESTTFKFSKHLQERFGIIPHVTDKNYITNSYHVHVTEEIDAFTKLSFESQFQKLSPGGAISYVEVPNMENNIDAVLAIMKHIYNHIMYAELNTKSDYCQVCGYTGEIKIVEDENHKLVWECPNCGNRDQEKMNVARRTCGYIGTQFWNQGRTQEIKERVLHL

SEQ ID NO: 1154 - protein, 752 aa, Unknown
  Description of Unknown: uncultivated organism sequence
  Category: MG60 effectors
  Description: MG60-369 effector
MTYYDETLDGNLDMEEQKIYIMKRSGERVIFDKEKIIQAIRKANLEEGILAERLTEDQIVDIVNGIEKDARNASRDLSVEEIQDKVEDGLMGTGKHKVARLYITYRYKHNEMRKMSNIDQKISGVVERDNEEVKQENSNKNPTVLSVQRDYMAGEWSRYYTSRYLLPDDIVMAHKEGVIHFHDADYFAQHMHNCCLVNLGDMLDNGTCISGTHIDTPRSFSTACTVASQIVAQVASSQYGGQTITMSHLAKYVDISRQKITKRLRNEFEEAGINIPEDKLKDIVELEVRKEVESGCQTVQYQLITLQSTNGQAPFVTVFLYLNEVPEGQTRDDLAMIIEVMFKQRILGVKDREGHYITPAFPKLIYVLQENNITEGSKYFYLTKLAAECTAKRMVPDYISEKKSMELKGDCFPCMGCRSFLTPDRFTDTGVGNLANALNFDVTKHKYYGRFNQGVVTINLVDAACSSGGDEKKFWEIMEERLDLCHKALRIRHERLLGTPSDVAPILWQDGALARLKPGETIDKLLYDGYSTISLGYAGLAECVYYMKGVSHTSEEGEAFGLRVMQLLNDSCATWKQHENIDYSVYGTPLESTTYKFAKCLQRRFGKIPHVTDKNYITNSYHVHVTEKIDAFSKLTKEAEFQKLSPGGAVSYVEVPSMQNNIPAVITVLQHMYNTILYAELNTKLDMCDKCGFNGEIQIVKDDTGKLVWECPNCGNRDQNEMHVSRRTCGYIGTQYWNQGRTAEIADRVLHL

SEQ ID NO: 1155 - protein, 758 aa, Unknown
  Description of Unknown: uncultivated organism sequence
  Category: MG60 effectors
  Description: MG60-370 effector
MSGVLFILERGGNMIIIKKNPEAEKKAGAKYVIKRNGSEDLFDENKIVIALFKANDSTIRNKITKKQIGAIADHIKSKVDETPHALNIEDIQDMVENELMRIRAFDVARSYITYRYKRALARQHNTTDDKILSLIEHNNEEVKQENSNKNPIVNSVQRDYMAGEVSKDLCKRVFLPGDIWEAHEDGLIHFHDADYFAQHMHNCCLVNLEDMLQNGTVISGTMIDKPKSFATACNIATQAIAQIASQQYGGQTMSIAHLAPFVEISRQKYMKKQRESMEKAGVKATEAQIASIVEDMVDEEIKRGVQMIQYQLITLMTTNGQAPFVTIYMYLNECRDEKTKADMVKIIREMFRQRIQGVKNEQGVWVTPAFPKLIYVLEEDNIREGSRYWDLTQLAAKCTAKRMVPDYISEKIMKQLKNGDVYSCMGCRSFLTVDRTNGNIANATNYKEGEHKYYGRFNQGVVTLNLVDVACTSAGDEDYFWEILDKRLELCHKALRIRHERLLGTPSDVAPILWQHGALARLKKGETIDKLLYGGYSTISLGYAGLCECTGYMKGVSHTDPDGTEFAMKVMQRLNDACAKWKEAENIDYSVYGTPLESTTYKFAKCLQKRFGIIPGVTDKNYITNSYHVHVTEKINAFDKLKFEAPFQKLSPGGAISYVEVPNLQNNIEAVLSIMQYIYDNIMYAELNTKSDYCEACGYDGEIKIVEDEHGKLVWECPNCGNRDQSRMSVARRTCGYIGTQFWNQGRTQEIKERFVHL

SEQ ID NO: 1156 - protein, 758 aa, Unknown
  Description of Unknown: uncultivated organism sequence
  Category: MG60 effectors
  Description: MG60-371 effector
MSGVLFILERGGNMIIIKKNPEAEKKAGAKYVIKRNGSEDLFDENKIVIALFKANDSTIRNKITKKQIGAIADHIKSKVDETPHALNIEDIQDMVENELMRIGAFDVARSYITYRYKRALARQHNTTDDKILSLIEHNNEEVKQENSNKNPIVNSVQRDYMAGEVSKDLCKRVFLPGDIWEAHEDGLIHFHDADYFAQHMHNCCLVNLEDMLQNGTVISGTMIDKPKSFATACNIATQAIAQIASQQYGGQTMSIAHLAPFVEISRQKYMKKQRESMEKAGVKATEAQIASIVEDMVDEEIKRGVQMIQYQLITLMTTNGQAPFVTIYMYLNECRDEKTKADMVKIIREMFRQRIQGVKNEQGVWVTPAFPKLIYVLEEDNIREGSRYWDITQLAAKCTAKRMVPDYISEKIMKQLKNGDVYSCMGCRSFLTVDRTNGNIANATNYKEGEHKYYGRFNQGVVTLNLVDVACTSAGDEDYFWEILDKRLELCHKALRIRHERLLGTPSDVAPILWQHGALARLKKGETIDKLLYGGYSTISLGYAGLCECTRYMKGVSHTDPDGTEFAMKVMQRLNDACAKWKEAENIDYSVYGTPLESTTYKFAKCLQKRFGIIPGVTDKNYITNSYHVHVTEKINAFDKLKFEAPFQKLSPGGAISYVEVPNLQNNIEAVLSIMQYIYDNIMYAELNTKSDYCEACGYDGEIKIVEDEHGKLVWECPNCGNRDQSRMSVARRTCGYIGTQFWNQGRTQEIKERFVHL

SEQ ID NO: 1157 - protein, 732 aa, Unknown
  Description of Unknown: uncultivated organism sequence
  Category: MG60 effectors
  Description: MG60-372 effector
MNVIKRSGEEVSFDADKILLAIEKANQATQENRQISEDKITEITNRVIQKCNEIARSISVEEIQDLVENELMAEGAYTVAHNYITYRYERALVRKANTTDKKILSLLGRNNEEAMQENSNKNPTVNSTQRDYMAGEVSKDITRRFLLPKEIWDAHEKGIIHFHDSDYFAQPMYNCCLVNLEDMLQNGTVISGTHIDKPHSFATACNIATQIIAQVASNQYGGQTITLSHLAPFVDISRQKYRKSVKAEMEAAGVEISEDKINTIAEERVKREVTTGVQTIQYQIITLMTTNGQAPFVTVFMYLDEVAEGQTRDDLALIIEEMLKQRMQGVKNEKGVYITPAFPKLIYCLDEDNIYNDSKYYYLTKLAAECTAKRMVPDYISAKIMKELKGDVYPCMGCRSFLTPDRFTENGWENNEHAMNSSSKHKYYGRFNQGVVTINLVDVACSSKKDMNAFWKIFDERLDLCYKALMIRHDRLKGTPSDVAPILWQYGAIARLEKGETIDKLLFNGYSTISLGYGGLAECVRYMTGLSHTTPEGEKFGLAVMKHLNDACAKWKQQTNIDFSVYGTPMESTTYKFAKCLQERFGIIKGVTDKNYITNSYHIHVTEEINAFDKLTEESKFQELSPGGAISYVEVPNMQNNIQAVLQLMKHIYNTIMYAELNTKSDYCQVCGYTGEIQITEDENKKLIWKCPNCGNTDQNKMNVARRTCGYIGTQFWNQGRTQEIKERVLHL

SEQ ID NO: 1158 - protein, 822 aa, Unknown
  Description of Unknown: uncultivated organism sequence
  Category: MG60 effectors
  Description: MG60-373 effector
MKQKPVHNPELQLAYDFVQYTGQNIFLTGRAGTGKTTFLRDLKRQSPKRMIVVAPTGVAAINAGGVTIHSFFQLPFGPRVPGYTENEDNHLRFGRHKRNIIRSLDLLVIDEISMVRADLLDSIDERLRQFRRNNQPFGGVQLLLIGDMQQLPPVVKGDEWELLRKFYDTPYFFSSRALLKSNYVTITLQHVYRQRDEKFINILNKIRDKQVDEETLARLNERYQPDFNPGDDNYIILTTHNAKAKAINDKKLAALKGKKVRFTASVTGNFPEYMYPTELELELKPGAQVMFVKNDPDAEKRFFNGKIGNITEIREDGIVVRCPDDDEDIYVEPLEWQNVKYIIEEQNKEIKEKVEGTFTQIPLKLAWAITIHKSQGLTFDRAVIDSEAAFAHGQVYVALSRCRSLEGLVLSTKFSPYSLKQDKSIEGFNIQTNKRQAGPEELTVSKTAYQRQLLEDLIDFSEMQRHVNSFYFLLHDNRKSLQPEVEVPVKEMKEQVLKEITEISEKFKSQIGRLLEKKNDAEKHDELQERIRKGAVYFSDKLNDCILRKIKEFSVESDNAEVLKKVKKAEKRLLEEVWYKRACLDACRDGFIVKDYLKERAMASLEEMPKKRPSKTEKLPVSKDIANAGLYELLKEWRNVRAQELGMPYFMVLPLKTMRALSNQVPSNMDELKRVHGFGRKKIEQFGEELLELLNEYRHDHELKTEPLPEPVKKKEKKPKINTREVSLKLWLQHKDIAKVALERGLTRATVEGHLAHYVGLGELQVEEFVDEEKIRKITKVMTEHNNFTLAEIKAKLGDDVSYGELKMVRQHLLWLGKSKSI

SEQ ID NO: 1159 - protein, 732 aa, Unknown
  Description of Unknown: uncultivated organism sequence
  Category: MG60 effectors
  Description: MG60-374 effector
MNVIKRSGEEVSFDADKILLAIEKANQATQENRQISEDKITEITNRVIQKCNEIARSISVEEIQDLVENELMAEGAYTVAHNYITYRYERALVRKANTTDKKILSLLGRNNEEAMQENSNKNPTVNSTQRDYMAGEVSKDITRRFLLPKEIWDAHEKGIIHFHDSDYFAQPMYNCCLVNLEDMLQNGTVISGTHIDKPHSFATACNIATQIIAQVASNQYGGQTITLSHLAPFVDISRQKYRKSVKAEMEAAGVEISEDKINTIAEERVKREVTTGVQTIQYQIITLMTTNGQAPFVTVFMYLDEVAEGQTRDDLALIIEEMLKQRMQGVKNEKGVYITPAFPKLIYCLDEDNIYNDSKYYYLTKLAAECTAKRMVPDYISAKIMKELKGDVYPCMGCRSFLTPDRFTENGWENNEHAMNSSSKHKYYGRFNQGVVTINLVDVACSSKKDMNAFWKIFDERLDLCYKALMIRHDRLKGTPSDVAPILWQYGAIARLEKGETIDKLLFNGYSTISLGYGGLAECVRYMTGLSHTTPEGEKFGLAVMKHLNDACTKWKQQTNIDFSVYGTPMESTTYKFAKCLQERFGIIKGVTDKNYITNSYHIHVTEEINAFDKLTEESKFQELSPGGAISYVEVPNMQNNIQAVLQLMKHIYNTIMYAELNTKSDYCQVCGYTGEIQITEDENKKLIWKCPNCGNTDQNKMNVARRTCGYIGTQFWNQGRTQEIKERVLHL

SEQ ID NO: 1160 - protein, 716 aa, Unknown
  Description of Unknown: uncultivated organism sequence
  Category: MG60 effectors
  Description: MG60-375 effector
MLEVIKRNGERVPFNRDKITIAIEKAMNSSSGIYEEGQAAKIAGEIEAYAASIQKDLTIYAIEDQVYYRLLKYNNPATARAYENYKTIQAFKRQTNTTDDDVFGLLNNTNLEVLDENSNKNGHVVSTQRDLIAGEVSKDIARRKLIPADIVQAHDSGAIHFHDMDYIIQPMFNCCLINLEDMLANGTVINGKKIDTPKSFQVACTVTTQIIAQVASGQYGGQSINGIDRILAPYVRKSFKKYMKAVVEEQREVYGIEPDMEKAEEIAWKRTKKEIKDGIQTIQYQINTLMTTNGQAPFVTLFMYFQPDYEYAREAALIDEELLRQRIQGIKNEANVYVTPAFPKLIYVLDEHNVREGSPYFYLTKLAAECTAKRMYPDYISAKKMRESYQGNVFSPMGCRSFLSPWKDEKGNYQFDGRFNMGVVSINLPQIGILADGDEEKFFQILDKRLELCKKALLLRVDLLKRITSDVSPIHWQYGAIARLKPGETIEKFIYGGYATLSLGYIGIYEATVLTKHCSHTAPEGRKFAMRIMDDLNAHIQKWKKETNIGFALYGTPAENLTNLFCKIDKARFGSIPDVTDKGYYTNSYHVDVREPINVFDKFSFEADFEDKSTGGCISYAEIPNMTHNIPAVLTMVQYIYDHITYGEFNTKLDYCHECGFDGEIILNDDNEWECPRCHNKDRNKLTVIRRTCGYLGENFWNEGRTQEIKSRVLHI

SEQ ID NO: 1161 - protein, 706 aa, Unknown
  Description of Unknown: uncultivated organism sequence
  Category: MG60 effectors
  Description: MG60-376 effector
METNPQIELAFDFLQYTGTNVFLTGKAGTGKTTFLRELKRRSPKRMIVVAPTGVAAINAGGVTIHSFFQLPFGPYVPGNAEGGAENEKRYTNKFSREKINIIRSLDLLVIDEISMVRADLLDAVSDVLCRYKDRSRPFGGVQLLMIGDLQQLAPVVKDDEWVLLKERYASPFFFCSRALQEVPYVGIELTQVYRQTDAAFLDLLNKVRDNRADQATLQALNRRYIPGFRPDDTEGYITLTTHNYQAQQINREKLEELEEKAYSYEAEIVDEFPEYSFPTDRHLVLKKGAQVMFVKNDASPEKRYYNGKIGRVTAISSDHILVRCGEEREAIMVAKEEWTNTKYTIDAETQEISETVEGVFRQYPLKTAWAITIHKSQGLTFERAIVDAGAAFTHGQVYVALSRCKTLEGLVLSSPLRTGALICDQVVRQFTEGIEQGQPGREQLADAKRAYYLQLLKELFDYNGVLRRMQYMSRILNEHLWRLYPELTERYRTEREFCHNELKDVGERFQMQLERLVNECREPEQDGQVRERVAKGLAYFREHTGRVFALVQDTQPEVDNKEVRKSLNEALGRLQQEVEVKMATLEAAAGGFSVMGHLQAKARAMIEKPKVKARKISDKVDVPEDILHPDLYQILRQWRKEEAASMNLPVYTVLHQKALLGIANILPTNGRELLSIPGIGKKVAERYGKKLLEMVNDYRFATLGDA

SEQ ID NO: 1162 - protein, 1147 aa, Unknown
  Description of Unknown: uncultivated organism sequence
  Category: MG60 effectors
  Description: MG60-377 effector
MKTFAYKQQKSVTFGLIGKEGNPFVKEKKNNFKIKYREQEINFNCDARDRIYGDNLWWLQRIFHYMQNILHMIFAKEPYHRFTFSYEFTLVERKKLQTRRIAEKALKDKIWRKYEKQFQKLLNNISLFDEILEEKEDNFSKISHIVRIIRYINWDTQKLEHCISNYTYFWDKIEKKSALEEFKNFIQKNWDFWELLEFYSKLDKEQFEEYKIALNPAILNTHSEVNQQNWTQELDSLKRSLEALERKNNFNKNIKRFFEEDLEAYINYILYQKNFFKQSKNVEYKNKTQRIYEKYSNLSSNARYQEELVIDFIEGNEIDLENPYKVAQEELDKYLQQQESINSLKNLKSNINFVQLKTFLYQLTWKRAEIKENNKKSEEKLDYQKLSEYIVIIKWEINSRLENANYRYGEFIKRDGIKAQTAQKLWQKYGEYMQKLNFDKELKWYTHFWFIVRKWKRFFIRTYKKEDILNKNQGFTLQDAENLLKEKRDVKWEYTAFLFQSLTLKWLLKLIFIKNAFNLDFKEEYKIYQIWKQKKYIKDRFQSTKLIDFLIKILTSNKWKELFPYVDNYFKKGNQYSKFQEFEKDLLKNSYKVKKYQCNFDESELIELDIVDRKFEHNDAVEPRLKRQNDIQILVEWFFSKQNFSFIRLLPEIKIFVRYQKLFNDMKKRVVSWIDSNWDRYEKEINEKERFYKTISKASFMLELNPCRIGGTPQKEKKEYQDYIIDLYEKREDFHIISIDIGENSFATLGVYDRDLMPKKIDVKWLPQQNENQNKDIIDITDLKIEKWEIVQTNTKNSEKYKSYKNMFENILRYQIYLKDILEQVGEIELKKENYNNIAQKIEESINRISELRFNTGNIIDEVKQDFPLLKNGLKQLLFSYIQNLHNGQDKTINITQYYHQIFEKLELQKVINFKDAFWANFVGVMKEILNRYPGIIVFESLHTGNNYDSYNDVIKKRLQNTTSEKSKEFRTFGTYIWMYIVQSLVNSFSKIIDIKNEKVNQLIYWEKNYETTIWKEKYSNNGILFFVDEKNTSSVCPICNWNFIQKIKKNWEVIEQENKNIKKLFGHWRWKEFETSMHHINDENNKNYQRWKWKSGNLEKGDLCDYGIWNKNYPEFEFIKSWDDLATYNIAKKAKEYLESLSKKED

SEQ ID NO: 1163 - protein, 463 aa, Unknown
  Description of Unknown: uncultivated organism sequence
  Category: MG60 effectors
  Description: MG60-378 effector
MVNLKNFKNLYEVRKTVRFELKPYKKTRELLKWKNNYQSLDSYIKHIKDWEFEDWFDWNDFCLWKYEDFLKESKKYYWFLFQINAEIQKWRNDTTKKNIHFDLKKSKGIFKNIPSLKKIQWFEWLKSKLLEIQDEYQNYFNFFDQLQHKQHKNEKKSDISIYLRKIAYLNRNLFTIFNFFDTYKTNQEILDKKKEIIDYDFEKLNNSIIASHENEISGACFWKFTFNKFALFRREASLLKEKLETNKQVLQKAVATMVADGEIINDNWTIVDINTNQIHSLTLQKKICYSLKFEEEIWTLQGRLEKFNFNRNLDEVISELDDINGQLLNQYIQNFVNGYKNDENILEVSFYTDHEGNEIFDKSKKYDSYENGQKKEKFYPSLLKLDLEQFVEAQKRNQIKIQPGQTLEWYQYINLLGKDELANEEKEQKKLLNKFLQILFKQEFINPDYNTIKKFRDTLAKYR

SEQ ID NO: 1164 - protein, 1232 aa, Unknown
  Description of Unknown: uncultivated organism sequence
  Category: MG61 effectors
  Description: MG61-1 effector
MDYAKFTKQGKLIKGIKLELVPQGNTRDAISEYKIVEADQQLADMVKEVVMAGNEFYKDFIKQIVRHMDGADWQAYGEAVENKTADQKAYDEAVKSISASIKNAILDTAELYGGKKTLFAKDFITIVLRKYVETAENFPYNRERVLTCIDVLSDKNALFKTPYVKWEHIIFGESKGSIAERMLSNFDIFYDNRNKYAALKEATAITDFDDFFTDYASYTRYVGQGGIELYNSAIRGIYSESGAKISEGINEYINKLKMKHPELHVNMLKKLQKQILSNSEPLFKVATIQNAEELKGIMNKVKVAEESVLSSAKELLVHMETSDLHDLYISGQRLYFVCQKVAKDGEILEELIFNDECSRVEKLTEKKKEEIRGAIVKQDYNFAYIDSLLSEYAEKTVKMVINEELQKLIAAIVSSGASYDSITINPKWKAVPDKEVTVIREYLESFVELNKFIKCLQVRDSDVYPDFKTYATLNALADELGALNKAYNMVRNFVTKKVNDKDGKTRLCFGKGALLERGWNRKNQAVDWLGNIDHMLLTKDGKYYYAVPAPVKRKTKIYISDTKPSDEVYEYMEISKQSSFLKTFARLFTSLGLKNIGDADDITMDLGNGSMTVTKEFLVKYKDGECKKDVDFMHKSIDIAKEFLAKHYSYANFNFSELKKTEDYASFYEFANDVDKYTYAVKTKYIDAAIIDKAVEDKELLLFMLSSMDLYKPQESCKDITALYTRYFFSEENKKKADIWLNANPAIYYRKPLIKFEKTHPAGSILVRKTYEDKDGITHIVPDKVYMSLYNHYNKNTPLNEEAMQYVDLVEHHVAVQDYVKDARYTREMFTINLSFTLNGDAGDAAQTYTINNMVKEQIKAKMPRMLTVVRGYRNLLEYCVTDETGKVFESGNFNTIGGVNFKEKLEDLDKIRKIDAQNWKYEKTVVNIKESYLGMVTSSIVKKAVEYDAIINVEQLSDAFKDKRSCMDNQVFKKFEEKLVNKLACYYDKEKAPTEPGGYLNPLQLASPNCLSNTQNGILFYVSPAYTNEVCPKSNFINLLDFSAAKTLKAKREFLRKMSGICYDAEHEAFHFSFCYDDMPIKLPVKEKKELNDKTNQEFGKHIWTVYTNGVRTEYNKKERKLIELNGTEILGKECAKNNVMLTDHMDVDSMPNSVVNEMIHIFQKYSFGEVAQKDVYYVSPVSPQAGPICTPGELRLKSMSEKGYMILHNIVAGKEKFAVNKIEWLEEKLG

SEQ ID NO: 1165 - protein, 1253 aa, Unknown
  Description of Unknown: uncultivated organism sequence
  Category: MG61 effectors
  Description: MG61-2 effector
MELNKFCRLNQSIKTCSLELVPIGRTRETIEKHNVIEEDSKRKENAVLAKEVSDSFIREFIADYKGDFDWSELVACFGKHEEYAGIKEKMEEKIAREFSDAFNGYISKFLKANGVGKADNKTKWSDASYIDVVLPLYASLHPDYDNPKYKEAIASICHCSSTIFKRYITAYEKIINGTKKGSFAERVMDNFQIICTNRLMCEIVFSKIKKADDFRLFLDAPESMNEYLSQKGIDQYNETIGDSFSEKGEILRYGLNHYINEWNQKNPDSRMPKLQKLKKQILSVAEPAFRIDVIDNEKELQETIKNIRAAEVRYSGKLKDILENLNYTNTYIHDGVLVKAAGRENLAKMITGEWNFFREQIREREERRIRDEYLQKKNRIKTKLTKKDEKQIEDTVSKGMYSLVDLNKMLGEEKANIESKLLDEYVKNRSEREKHYTVVANADFMSKESLPTSDEIKIIQNYLDKVIQMTHIIRCLDADAQNEKVDLVFLDDAAELEDDKTLIVTGYNLIRNFLTKKREKTAKEKAVQLCFGRPAHFEQKWNNKQAGKFGNVDAALLEENGKFYYIVPAAKNESKLNFPVTDEPQAGRCYNYLSTQKAIGFAKAFAKFTIKSPEAMSGYAKSEEPFEISVGNQKMTVSKKMYDSYEAKTFRDSEEEKIKLIDYAKEFLQKHGSYNTYDWSELRESKDYVNYGEFCSEVDSIAFRVVNRYISKDLVDDAVLRGDLYMFEITSQDMYKDKNRMKNIMALRFHAIMEGMKTGNKSIIINNAPQIRYRPQIIEAEDKHPAGSKLVNKKTTDGKTIPGDIYLELCDFYNGRKSSLSPEASLYNERVSVKVSDREHIKDKHYTAEKFLITLSYTMNKNVASNTSVYKLNEMIRNEIKENGCNIMSVIRGIDNLLYYAVIDENGNKIEAGDLNVVGDTDFNEMLSVVGTQRYIDQKNWKYEKKVAELKDTYLGQACRKIASIAVKNNAVIVIDKINENTKRKNAAFDNNVYRKFEDALVNTLSNYYDRSIKADEPGGISNPLQLCVNEDNNFQNGILFYTYDAFTKNICMDTGFINLLNTFNVKTVAAKLGFLKKMDGIYYDSDRQEFVFEFAWGKLGSVLKEEEAALYTGLDKSWKVRTHLTRYKRDRESGKYKEVDGTEILKKLIKEKHPDMIGEKINVDKLTSNEVQTVYEIFTLYVNGFIPRMDGESSEYMSPVSDWNSMSNIAYDEMTALQLARKGSLTIGRIKNGFEGKDINISRVDWLNEILR

SEQ ID NO: 1166 - protein, 846 aa, Unknown
  Description of Unknown: uncultivated organism sequence
  Category: MG61 effectors
  Description: MG61-3 effector
MDFTKFQKLNSIIKTCSFEMIPIGKTRETMEKHNVIEEDAERKSNAELTKEASDSFIREFIADYKEDMDWKDLYDAYGEDRARFTDIMNQKAEKLAKRFSDSFNEYINTFLKANGINDKKSKWSDSGYVDVVLPLYVSIHPDFSNDKYERAVASLLHCSNSLFKKYTTSYARIIAGTKKGSFADRSMENFQTACANSVMFDLISRNLSSVGSHDAFKEVFADAPLNMNEYLSQKGISRYNEFVGDSFDESGQVIRYGVNHYINEWNQTHPDERMPKMHKLKKQILSIVEPSFRIRTINDETELFGTFDNIRTAEQRYAGMLESILENMNTADIYDKSGILVTSAERDSLANAITGEWSYFRRQIKEEEENRIREEYLQKKNRVKTKLTQKDNKQIEDALNKSIYSVADLNKMLGSDFGTIEEKLLDEYIRNKSKKESAYAQLVKTDFYDKKTIPAGDDVQRIQQYLDKVLSLTHIVRGLCADSQDPRTDFVFSDDVSSLEDDRVQIISCYNLIRNFVTKKREKTAKEKQIQLCFGRPAHFEQVWNNKQEGKFGNVDAALLEYAGKYYYMVPAAKNEAKLNFPVTDEPQMGECYNYLATKKAIGFAKAFAKFYIKSPEAMEGFEKTEEPFEISVGNDTMIISRKVYEDYEAKTFRESEEAKNKLIDCAKEFLSKNLSYCIYDWSVLKEANDYVNYGEFCNEVDSIAFRVINRYVSKKLVDDAVERGNLYMFEISSLDMYKDSSRMKNIMALRFNQIMNGMFTGDKSIIINNAPQIRYRPVVIEKKDVHPVGSRLVNKNTTDGRTIPGDVYLELCAYYNGKKDSLSPEASLYNEKVSVKDSDRAHIKD

SEQ ID NO: 1167 - protein, 1259 aa, Unknown
  Description of Unknown: uncultivated organism sequence
  Category: MG61 effectors
  Description: MG61-4 effector
MDFTKFQKLNSIIKTCSFEMIPIGKTRETMEKHNVIEEDAERKSNAELTKEVSDSFIREFIADYKEDMDWKDLYDAYGEDRARFTDIMNQKAEKLAKRFSDSFNEYINTFLKANGIKDKKSKWSDSGYVDVVLPLYVSIHPDFSNDKYERAVASLLHCSNSLFKKYTTSYARIIAGTKKGSFADRSMENFQTACANSVMFDLISINLSNVGSHDAFKEVFADAPLNMNEYLSQKGISRYNEFVGDSFDESGQVIRYGVNHYINEWNQTHPDERMPKMHKLKKQILSIVEPSFRIRTINDETELFGTFDNIRTAEQRYAGMLESILENMNTADIYDKSGILVTSAERDSLANAITGEWSYFRRQIKEEEENRIREEYLQKKNRVKTKLTQKDNKQIEDALNKSIYSVADLNKMLGSDFGTIEEKLLDEYIRNKSKKESAYAQLVKTDFYDKKTIPAGDDVQRIQQYLDKVLGLTHIVRGLCADSQDPRTDFVFSDDVSSLEDDRVQIISCYNLIRNFVTKKREKTAKEKQIQLCFGRPAHFEQVWNNKQEGKFGNVDAALLEYAGKYYYMVPAAKNEAKLNFPVTDEPQRGECYNYLATKKAIGFAKAFAKFYIKSPEAMEGFEKTEEPFEISVGNDTMIISRKVYEDYEAKTFRESEEAKNKLIDCAKEFLSKNLSYCIYDWSGLKETKDYVNYGEFCNEVDSIAFRVINRYVSKKLVDDAVERGNLYMFEISSLDMYKDSSRMKNIMALRFNQIMNGMFTGDKSIIINNAPQIRYRPVVIEKKDVHPVGSRLVNKNTTDGRTIPGDVYLELCAYYNGKKDSLSPEASLYNEKVSVKDSDRAHIKDKHYTEEKFLITFSYTANKNVASATSGYQLNEMVRKEIRENGCNIMAVIRGIDNLLYYAVVDENGNRIEAGDLNVVGDTDFYEKLTILGKQRYTDQKNWKHENKVADLKDTYLGQVCRKIASIAVKNNAVIVIDKINERTKRKNAAFDNNMYRKFENALVNSLTDYYDIGIRGDEPGSVKNPLQLTVKEDNGFQNGIIFYQFDTFTKNICMRTGFVNLLNTFEIKTVASKVAFLKKLSGIYYDNDINEFVFEFTWRNIGCILKDEELSLYDGMDKIWKVRTHFTRYMRNAEKNKYVEIDGTEVLKELIRKNHPDMIGGKIDVDRLTSEEVKKVFEIFTLYTNGYIPRMDDAESGYMSPACDWNNFGTIRYDEMTALQLAKKSSLMIGKVKSGKDWKDMNVSRVEWLNHVLKADW

SEQ ID NO: 1168 - protein, 1259 aa, Unknown
  Description of Unknown: uncultivated organism sequence
  Category: MG61 effectors
  Description: MG61-5 effector
MDFTKFQKLNSIIKTCSFEMIPIGKTRETMEKHNVIEEDAERKSNAELTKEVSDSFIREFIADYKEDMDWKDLYDAYGEDRARFTDIMNQKAEKLAKRFSDSFNEYINTFLKANGIKDKKSKWSDSGYVDVVLPLYVSIHPDFSNDKYERAVASLLHCSNSLFKKYTTSYARIIAGTKKGSFADRSMENFQTACANSVMFDLISINLSNVGSHDAFKEVFADAPLNMNEYLSQKGISRYNEFVGDSFDESGQVIRYGVNHYINEWNQTHPDERMPKMHKLKKQILSIVEPSFRIRTINDETELFGTFDNIRTAEQRYAGMLESILENMNTADIYDKSGILVTSAERDSLANAITGEWSYFRRQIKEEEENRIREEYLQKKNRVKTKLTQKDNKQIEDALNKSIYSVADLNKMLGSDFGTIEEKLLDEYIRNKSKKESAYAQLVKTDFYDKKTIPAGDDVQRIQQYLDKVLGLTHIVRGLCADSQDPRTDFVFSDDVSSLEDDRVQIISCYNLIRNFVTKKREKTAKEKQIQLCFGRPAHFEQVWNNKQEGKFGNVDTALLEYAGKYYYMVPAAKNEAKLNFPVTDEPQRGECYNYLATKKAIGFAKAFAKFYIKSPEAMEGFEKTEEPFEISVGNDTMIISRKVYEDYEAKTFRESEEAKNKLIDCAKEFLSKNLSYCIYDWSGLKETKDYVNYGEFCNEVDSIAFRVINRYVSKKLVDDAVERGNLYMFEISSLDMYKDSSRMKNIMALRFNQIMNGMFTGDKSIIINNAPQIRYRPVVIEKKDVHPVGSRLVNKNTTDGRTIPGDVYLELCAYYNGKKDSLSPEASLYNEKVSVKDSDRAHIKDKHYTEEKFLITFSYTANKNVASATSGYQLNEMVRKEIRENGCNIMAVIRGIDNLLYYAVVDENGNRIEAGDLNVVGDTDFYEKLTILGKQRYTDQKNWKHENKVADLKDTYLGQVCRKIASIAVKNNAVIVIDKINERTKRKNAAFDNNMYRKFENALVNSLTDYYDIGIRGDEPGSVKNPLQLTVKEDNGFQNGIIFYQFDTFTKNICMRTGFVNLLNTFEIKTVASKVAFLKKLSGIYYDNDINEFVFEFTWRNIGCILKDEELSLYDGMDKIWKVRTHFTRYMRNAEKNKYVEIDGTEVLKELIRKNHPDMIGGKIDVDRLTSEEVKKVFEIFTLYTNGYIPRMDDAESGYMSPACDWNNFGTIRYDEMTALQLAKKSSLMIGKVKSGKDWKDMNVSRVEWLNHVLKADW

SEQ ID NO: 1169 - protein, 1259 aa, Unknown
  Description of Unknown: uncultivated organism sequence
  Category: MG61 effectors
  Description: MG61-6 effector
MDFTKFQKLNSIIKTCSFEMIPIGKTRETMEKHNVIEEDAERKSNAELTKEVSDSFIREFIADYKEDMDWKDLYDAYGEDRARFTDIMNQKAEKLAKRFSDSFNEYINTFLKANGIKDKKSKWSDSGYVDVVLPLYVSIHPDFSSDKYERAVASLLHCSNSLFKKYTTSYARIIAGTKKGSFADRSMENFQTVCANSVMFDLISRNLSSVECHDTFKEVFADAPLNMNEYLSQKGISRYNEFVGDSFDESGQVIRYGVNHYINEWNQTHPDERMPKMHKLKKQILSIVEPSFRIRTINDETELFGTFDNIRTAEQRYAGMLESILENMNTADIYDKSGILVTSAERDSLANAITGEWSYFRRQIKEEEENRIREEYLQKKNRVKTKLTQKDNKQIEDALNKSIYSVADLNKMLGSDFGTIEEKLLDEYIRNKSKKESAYAQLVKTDFYDKKTIPAGDDVQRIQQYLDKVLSLTHIVRGLCADSQDPRTDFVFSDDVSSLEDDRVQIVTCYNLIRNFVTKKREKTAKEKQIQLCFGRPAHFEQVWNNKQEGKFGNVDAALLEYAGKYYYMVPAAKNEAKLNFPVTDEPQRGECYNYLATKKAIGFAKAFAKFYIKSPEAMEGFEKTEEPFEISVGNDTMIISRKVYEDYEAKTFRESEEAKNKLIDCAKEFLSKNLSYCIYDWSVLKEANDYVNYGEFCNEVDSIAFRVINRYVSKKLVDDAVERGNLYMFEISSLDMYKDSSRMKNIMALRFNQIMNGMFTGDKSIIINNAPQIRYRPVVIEKKDVHPVGSRLVNKNTTDGRTIPGDVYLELCAYYNGKKDSLSPEASLYNEKVSVKDSDRAHIKDKHYTEEKFLITFSYTANKNVASATSGYQLNEMVRKEIRENGCNIMAVIRGIDNLLYYAVVDENGNRIEAGDLNVVGDTDFYEKLTILGKQRYTDQKNWKHENKVADLKDTYLGQVCRKIASIAVKNNAVIVIDKINESTKRKNAAFDNNMYRKFENALVNSLTDYYDIGIRGDEPGSVKNPLQLTVKEDNGFQNGIIFYQFDTFTKNICMRTGFVNLLNTFEIKTVASKVAFLKKLSGIYYDNDINEFVFEFTWRNIGCILKDEELSLYDGMDKIWKVRTHFTRYMRNAEKNKYVEIDGTEVLKELIRKNHPDMIGGKIDVDRLTSEEVKKVFEIFTLYTNGYIPRMDDAESGYMSPACDWNNFGTIRYDEMTALQLAKKSSLMIGKVKSGKDWKDMNVSRVEWLNHVLKADW

SEQ ID NO: 1170 - protein, 1259 aa, Unknown
  Description of Unknown: uncultivated organism sequence
  Category: MG61 effectors
  Description: MG61-7 effector
MDFTKFQKLNSIIKTCSFEMIPIGKTRETMEKHNVIEEDAERKSNAELTKEVSDSFIREFIADYKEDMDWKDLYDAYGEDRARFTDIMNQKAEKLAKRFSDSFNEYINTFLKANGIKDKKSKWSDSGYVDVVLPLYVSIHPDFSSDKYERAVASLLHCSNSLFKKYTTSYARIIAGTKKGSFADRSMENFQTVCANSVMFDLISRNLSSVECHDTFKEVFADAPLNMNEYLSQKGISRYNEFVGDSFDESGQVIRYGVNHYINEWNQTHPDERMPKMHKLKKQILSIVEPSFRIRTINDETELFGTFDNIRTAEQRYAGMLESILENMNTADIYDKSGILVTSAERDSLANAITGEWSYFRRQIKEEEENRIREEYLQKKNRVKTKLTQKDNKQIEDALNKSIYSVADLNKMLGSDFGTIEEKLLDEYIRNKSKKESAYAQLVKTDFYDKKTIPAGDDVQRIQQYLDKVLSLTHIVRGLCADSQDPRTDFVFSDDVSSLEDDRVQIVTCYNLIRNFVTKKREKTAKEKQIQLCFGRPAHFEQVWNNKQEGKFGNVDAALLEYAGKYYYMVPAAKNEAKLNFPVTDEPQRGECYNYLATKKAIGFAKAFAKFYIKSPEAMEGFEKTEEPFEISVGNDTMIISRKVYEDYEAKTFRESEEAKNKLIDCAKEFLSKNLSYCIYDWSVLKEANDYVNYGEFCNEVDSIAFRVINRYVSKKLVDDAVERGNLYMFEISSLDMYKDSSRMKNIMALRFNQIMNGMFTGDKSIIINNAPQIRYRPVVIEKKDVHPVGSRLVNKNTTDGRTIPGDVYLELCAYYNGKKDSLSPEASLYNEKVSVKDSDRAHIKDKHYTEEKFLITFSYTANKNVASATSGYQLNEMVRKEIRENGCNIMAVIRGIDNLLYYAVVDENGNRIEVGDLNVVGDTDFYEKLTILGKQRYTDQKNWKHENKVADLKDTYLGQVCRKIASIAVKNNAVIVIDKINESTKRKNAAFDNNMYRKFENALVNSLTDYYDIGIRGDEPGSVKNPLQLTVKEDNGFQNGIIFYQFDTFTKNICMRTGFVNLLNTFEIKTVASKVAFLKKLSGIYYDNDINEFVFEFTWRNIGCILKDEELSLYDGMDKIWKVRTHFTRYMRNAEKNKYVEIDGTEVLKELIRKNHPDMIGGKIDVDRLTSEEVKKVFEIFTLYTNGYIPRMDDAESGYMSPACDWNNFGTIRYDEMTALQLAKKSSLMIGKVKSGKDWKDMNVSRVEWLNHVLKADW

SEQ ID NO: 1171 - protein, 1259 aa, Unknown
  Description of Unknown: uncultivated organism sequence
  Category: MG61 effectors
  Description: MG61-8 effector
MDFTKFQKLNSIIKTCSFEMIPIGKTRETMEKHNVIEEDAERKSNAELTKEVSDSFIREFIADYKEDMDWKDLYDAYGEDRARFTDIMNQKAEKLAKRFSDSFNEYINTFLKANGINDKKSKWSDSGYVDVVLPLYVSIHPDFSNDKYERAVASLLHCSNSLFKKYTTSYARIIAGTKKGSFADRSMENFQTACANSVMFDLISRNLSSVGSHDAFKEVFADAPLNMNEYLSQKGISRYNEFVGDSFDESGQVIRYGVNHYINEWNQTHPDERMPKIHKLKKQILSIVEPSFRIRTINDETELFGTFDNIRTAEQRYAGMLESILENMNTADIYDKSGILVTSAERDSLANAITGEWSYFRRQIKEEEENRIREEYLQKKNRVKTKLTQKDNKQIEDALNKSIYSVADLNKMLGSDFGTIEEKLLDEYIRNKSKKESAYAQLVKTDFYDKKTIPAGDDVQRIQQYLDKVLSLTHIVRGLCADSQDPRTDFVFSDDVSSLEDDRVQIISCYNLIRNFVTKKREKTAKEKQIQLCFGRPAHFEQVWNNKQEGKFGNVDAALLEYAGKYYYMVPAAKNEAKLNFPVTDEPQMGECYNYLATKKAIGFAKAFAKFYIKSPEAMEGFEKTEEPFEISVGNDTMIISRKVYEDYEVKTFRESEEAKNKLIDCAKEFLSKNLSYCIYDWSVLKEANDYVNYGEFCNEVDSIAFRVINRYVSKKLVDDAVERGNLYMFEISSLDMYKDSSRMKNIMALRFNQIINGMFTGDKSIIINNAPQIRYRPVVIEKKDVHPVGSRLVNKNTTDGRTIPGDVYLELCAYYNGKKDSLSPEASLYNEKVSVKDSDRAHIKDKHYTEEKFLITFSYTANKNVASATSGYQLNEMVRKEIRENGCNIMAVIRGIDNLLYYAVVDENGNRIEAGDLNVVGDTDFYEKLTILGKQRYTDQKNWKHENKVADLKDTYLGQVCRKIASIAVKNNAVIVIDKINESTKRKNAAFDNNMYRKFENALVNSLTDYYDIGIRGDEPGSVKNPLQLTVKEDNGFQNGIIFYQFDTFTKNICMRTGFVNLLNTFEIKTVASKVAFLKKLSGIYYDNDINEFVFEFTWRNIGCILKDEELPLYDGMDKIWKVRTHFTRYMRNAEKNKYVEIDGTEVLKELIRKNHPDMIGGKIDVDRLTSEEVKKVFEIFTLYTNGYIPRMDDAESGYMSPACDWNNFGTIRYDEMTALQLAKKSSLMIGKVKSGKDWKDMNVSRVEWLNHVLKADW

SEQ ID NO: 1172 - protein, 1259 aa, Unknown
  Description of Unknown: uncultivated organism sequence
  Category: MG61 effectors
  Description: MG61-9 effector
MDFTKFQKLNSIIKTCSFEMIPIGKTRETMEKHNVIEEDAERKSNAELTKEVSDSFIREFIADYKEDMDWKDLYDAYGEDRARFTDIMNQKAEKLAKRFSDSFNEYINTFLKANGINDKKSKWSDSGYVDVVLPLYVSIHPDFSNDKYERAVASLLHCSNSLFKKYTTSYARIIAGTKKGSFADRSMENFQTACANSVMFDLISRNLSSVGSHDAFKEVFADAPLNMNEYLSQKGISRYNEFVGDSFDESGQVIRYGVNHYINEWNQTHPDERMPKMHKLKKQILSIVEPSFRIRTINDETELFGTFDNIRTAEQRYAGMLESILENMNTADIYDKSGILVTSAERDSLANAITGEWSYFRRQIKEEEENRIREEYLQKKNRVKTKLTQKDNKQIEDALNKSIYSVADLNKMLGSDFGTIEEKLLDEYIRNKSKKESAYAQLVKTDFYDKKTIPAGDDVQRIQQYLDKVLSLTHIVRGLCADSQDPRTDFVFSDDVSSLEDDRVQIISCYNLIRNFVTKKREKTAKEKQIQLCFGRPAHFEQVWNNKQEGKFGNVDAALLEYAGKYYYMVPAAKNEAKLNFPVTDEPQMGECYNYLATKKAIGFAKAFAKFYIKSPEAMEGFEKTEEPFEISVGNDTMIISRKVYEDYEAKTFRESEEAKNKLIDCAKEFLSKNLSYCIYDWSGLKETKDYVNYGEFCNEVDSIAFRVINRYVSKKLVDDAVERGNLYMFEISSLDMYKDSSRMKNIMALRFNQIMNGMFTGDKFIIINNAPQIRYRPVVIEKKDVHPVGSRLVNKNTTDGRTIPGDVYLELCAYYNGKKDSLSPEASLYNEKVSVKDSDRAHIKDKHYTEEKFLITFSYTANKNVASATSGYQLNEMVRKEIRENGCNIMAVIRGIDNLLYYAVVDENGNRIEAGDLNVVGDTDFYEKLTILGKQRYTDQKNWKHENKVADLKDTYLGQVCRKIASIAVKNNAVIVIDKINERTKRKNAAFDNNMYRKFENALVNSLTDYYDIGIRGDEPGSVKNPLQLTVKEDNGFQNGIIFYQFDTFTKNICMRTGFVNLLNTFEIKTVASKVAFLKKLSGIYYDNDINEFVFEFTWRNIGCILKDEELSLYNGMDKIWKVRTHFTRYMRNAEKNKYVEIDGTEVLKELIRKNHPDMIGGKIDVDRLTSEEVKKVFEIFTLYTNGYIPRMDDAESGYMSPACDWNNFGTIRYDEMTALQLAKKSSLMIGKVKSGKDWKDMNVSRVEWLNHVLKADW

SEQ ID NO: 1173 - protein, 1259 aa, Unknown
  Description of Unknown: uncultivated organism sequence
  Category: MG61 effectors
  Description: MG61-10 effector
MDFTKFQKLNSIIKTCSFEMIPIGKTRETMEKHNVIEEDAERKSNAELTKEVSDSFIREFIADYKEDMDWKDLYDAYGEDRARFTDIMNQKAEKLAKRFSDSFNEYINTFLKANGINDKKSKWSDSGYVDVVLPLYVSIHPDFSNDKYERAVASLLHCSNSLFKKYTTSYARIIAGTKKGSFADRSMENFQTACANSVMFDLISRNLSSVGSHDAFKEVFADAPLNMNEYLSQKGISRYNEFVGDSFDESGQVIRYGVNHYINEWNQTHPDERMPKMHKLKKQILSIVEPSFRIRTINDETELFGTFDNIRTAEQRYAGMLESILENMNTADIYDKSGILVTSAERDSLANAITGEWSYFRRQIKEEEENRIREEYLQKKNRVKTKLTQKDNKQIEDALNKSIYSVADLNKMLGSDFGTIEEKLLDEYIRNKSKKESAYAQLVKTDFYDKKTIPAGDDVQRIQQYLDKVLSLTHIVRGLCADSQDPRTDFVFSDDVSSLEDDRVQIISCYNLIRNFVTKKREKTAKEKQIQLCFGRPAHFEQVWNNKQEGKFGNVDAALLEYAGKYYYMVPAAKNEAKLNFPVTDEPQMGECYNYLATKKAIGFAKAFAKFYIKSPEAMEGFEKTEEPFEISVGNDTMIISRKVYEDYEAKTFRESEEAKNKLIDCAKEFLSKNLSYCIYDWSVLKEANDYVNYGEFCNEVDSIAFRVINRYVSKKLVDDAVERGNLYMFEISSLDMYKDSSRMKNIMALRFNQIMNGMFTGDKSIIINNAPQIRYRPVVIEKKDVHPVGSRLVNKNTTDGRTIPGDVYLELCAYYNGKKDSLSPEASLYNEKVSVKDSDRAHIKDKHYTEEKFLITFSYTANKNVASATSGYQLNEMVRKEIRENGCNIMAVIRGIDNLLYYAVVDENGNRIEAGDLNVVGDTDFYEKLTILGKQRYTDQKNWKHENKVADLKDTYLGQVCRKIASIAVKNNAVIVIDKINESTKRKNAAFDNNMYRKFENALVNSLTDYYDIGIRGDEPGSVKNPLQLTVKEDNGFQNGIIFYQFDTFTKNICMRTGFVNLLNTFEIKTVASKVAFLKKLSGIYYDNDINEFVFEFTWRNIGCILKDEELPLYDGMDKIWKVRTHFTRYMRNAEKNKYVEIDGTEVLKELIRKNHPDMIGGKIDVDRLTSEEVKKVFEIFTLYTNGYIPRMDDAESGYMSPACDWNNFGTIRYDEMTALQLAKKSSLMIGKVKSGKDWKDMNVSRVEWLNHVLKADW

SEQ ID NO: 1174 - protein, 1259 aa, Unknown
  Description of Unknown: uncultivated organism sequence
  Category: MG61 effectors
  Description: MG61-11 effector
MDFTKFQKLNSIIKTCSFEMIPIGKTRETMEKHNVIEEDAERKSNAELTKEVSDSFIREFIADYKEDMDWKDLYDAYGEDRARFTDIMNQKAEKLAKRFSDSFNEYINTFLKANGINDKKSKWSDSGYVDVVLPLYVSIHPDFSNDKYERAVASLLHCSNSLFKKYTTSYARIIAGTKKGSFADRSMENFQTACANSVMFDLISRNLSSVGSHDAFKEVFADAPLNMNEYLSQKGISRYNEFVGDSFDESGQVIRYGVNHYINEWNQTHPDERMPKMHKLKKQILSIVEPSFRIRTINDETELFGTFDNIRTAEQRYAGMLESILENMNTADIYDKSGILVTSAERDSLANAITGEWSYFRRQIKEEEENRIREEYLQKKNRVKTKLTQKDNKQIEDALNKSIYSVADLNKMLGSDFGTIEEKLLDEYIRNKSKKESAYAQLVKTDFYDKKTIPAGDDVQRIQQYLDKVLSLTHIVRGLCADSQDPRTDFVFSDDVSSLEDDRVQIISCYNLIRNFVTKKREKTAKEKQIQLCFGRPAHFEQVWNNKQEGKFGNVDAALLEYAGKYYYMVPAAKNEAKLNFPVTDEPQMGECYNYLATKKAIGFAKAFAKFYIKSPEAMEGFEKTEEPFEISVGNDTMIISRKVYEDYEAKTFRESEEAKNKLIDCAKEFLSKNLSYCIYDWSVLKEANDYVNYGEFCNEVDSIAFRVINRYVSKKLVDDAVERGNLYMFEISSLDMYKDSSRMKNIMALRFNQIMNGMFTGDKSIIINNAPQIRYRPVVIEKKDVHPVGSRLVNKNTTDGRTIPGDVYLELCAYYNGKKDSLSPEASLYNEKVSVKDSDRAHIKDKHYTEEKFLITFSYTANKNVASATSGYQLNEMVRKEIRENGCNIMAVIRGIDNLLYYAVVDENGNRIEAGDLNVVGDTDFYEKLTILGKQRYTDQKNWKHENKVADLKDTYLGQVCRKIASIAVKNNAVIVIDKINESTKRKNAAFDNNMYRKFENALVNSLTDYYDIGIRGDEPGSVKNPLQLTVKEDNGFQNGIIFYQFDTFTKNICMRTGFVNLLNTFEIKTVASKVAFLKKLSDIYYDNDINEFVFEFTWRNIGCILKDEELPLYDGMDKIWKVRTHFTRYMRNAEKNKYVEIDGTEVLKELIRKNHPDMIGGKIDVDRLTSEEVKKVFEIFTLYTNGYIPRMDDAESGYMSPACDWNNFGTIRYDEMTALQLAKKSSLMIGKVKSGKDWKDMNVSRVEWLNHVLKADW

SEQ ID NO: 1175 - protein, 1259 aa, Unknown; identical to SEQ ID NO: 1172
  Description of Unknown: uncultivated organism sequence
  Category: MG61 effectors
  Description: MG61-12 effector

SEQ ID NO: 1176 - protein, 1259 aa, Unknown
  Description of Unknown: uncultivated organism sequence
  Category: MG61 effectors
  Description: MG61-13 effector
MDFTKFQKLNSIIKTCSFEMIPIGKTRETMEKHNVIEEDAERKSNAELTKEVSDSFIREFIADYKEDMDWKDLYDAYGEDRARFTDIMNQKAEKLAKRFSDSFNEYINTFLKANGINDKKSKWSDSGYVDVVLPLYVSIHPDFSNDKYERAVASLLHCSNSLFKKYTTSYARIIAGTKKGSFADRSMENFQTACANSVMFDLISRNLSSVGSHDAFKEVFADAPLNMNEYLSQKGISRYNEFVGDSFDESGQVIRYGVNHYINEWNQTHPDERMPKMHKLKKQILSIVEPSFRIRTINDETELFGTFDNIRTAEQRYAGMLESILENMNTADIYDKSGILVTSAERDSLANAITGEWSYFRRQIKEEEENRIREEYLQKKNRVKTKLTQKDNKQIEDALNKSIYSVADLNKMLGSDFGTIEEKLLDEYIRNKSKKESAYAQLVKTDFYDKKTIPAGDDVQRIQQYLDKVLSLTHIVRGLCADSQNPRTDFVFSDDVSSLEDDRVQIISCYNLIRNFVTKKREKTAKEKQIQLCFGRPAHFEQVWNNKQEGKFGNVDAALLEYAGKYYYMVPAAKNEAKLNFPVTDEPQMGECYNYLATKKAIGFAKAFAKFYIKSPEAMEGFEKTEEPFEISVGNDTMIISRKVYEDYEAKTFRESEEAKNKLIDCAKEFLSKNLSYCIYDWSVLKEANDYVNYGEFCNEVDSIAFRVINRYVSKKLVDDAVERGNLYMFEISSLDMYKDSSRMKNIMALRFNQIMNGMFTGDKSIIINNAPQIRYRPVVIEKKDVHPVGSRLVNKNTTDGRTIPGDVYLELCAYYNGKKDSLSPETSLYNEKVSVKDSDRAHIKDKHYTEEKFLITFSYTANKNVASATSGYQLNEMVRKEIRENGCNIMAVIRGIDNLLYYAVVDENGNRIEAGDLNVVGDTDFYEKLTILGKQRYTDQKNWKHENKVADLKDTYLGQVCRKIASIAVKNNAVIVIDKINESTKRKNAAFDNNMYRKFENALVNSLTDYYDIGIRGDEPGSVKNPLQLTVKEDNGFQNGIIFYQFDTFTKNICMRTGFVNLLNTFEIKTVASKVAFLKKLSGIYYDNDINEFVFEFTWRNIGCILKDEELPLYDGMDKIWKVRTHFTRYMRNAEKNKYVEIDGTEVLKELIRKNHPDMIGGKIDVDRLTSEEVKKVFEIFTLYTNGYIPRMDDAESGYMSPACDWNNFGTIRYDEMTALQLAKKSSLMIGKVKSGKDWKDMNVSRVEWLNHVLKADW

SEQ ID NO: 1177 - protein, 1259 aa, Unknown
  Description of Unknown: uncultivated organism sequence
  Category: MG61 effectors
  Description: MG61-14 effector
MDFTKFQKLNSSIKTCSFEMIPIGKTRETMEKHNVIEEDAERKSNAELTKEVSDSFIREFIADYKEDMDWKDLYDAYGEDRARFTDIMNQKAEKLAKRFSDSFNEYINTFLKANGINDKKSKWSDSGYVDVVLPLYVSIHPDFSNDKYERAVASLLHCSNSLFKKYTTSYARIIAGTKKGSFADRSMENFQTACANSVMFDLISRNLSSVGSHDAFKEVFADAPLNMNEYLSQKGISRYNEFVGDSFDESGQVIRYGVNHYINEWNQTHPDERMPKMHKLKKQILSIVEPSFRIRTINDETELFGTFDNIRTAEQRYAGMLESILENMNTADIYDKSGILVTSAERDSLANAITGEWSYFRRQIKEEEENRIREEYLQKKNRVKTKLTQKDNKQIEDALNKSIYSVADLNKMLGSDFGTIEEKLLDEYIRNKSKKESAYAQLVKTDFYDKKTIPAGDDVQRIQQYLDKVLSLTHIVRGLCADSQDPRTDFVFSDDVSSLEDDRVQIISCYNLIRNFVTKKREKTAKEKQIQLCFGRPAHFEQVWNNKQEGKFGNVDAALLEYAGKYYYMVPAAKNEAKLNFPVTDEPQMGECYNYLATKKAIGFAKAFAKFYIKSPEAMEGFEKTEEPFEISVGNDTMIISRKVYEDYEAKTFRESEEAKNKLIDCAKEFLSKNLSYCIYDWSVLKEANDYVNYGEFCNEVDSIAFRVINRYVSKKLVDDAVERGNLYMFEISSLDMYKDSSRMKNIMALRFNQIMNGMFTGDKSIIINNAPQIRYRPVVIEKKDVHPVGSRLVNKNTTDGRTIPGDVYLELCAYYNGKKDSLSPEASLYNEKVSVKDSDRAHIKDKHYTEEKFLITFSYTANKNVASATSGYQLNEMVRKEIRENGCNIMAVIRGIDNLLYYAVVDENGNRIEAGDLNVVGDTDFYEKLTILGKQRYTDQKNWKHENKVADLKDTYLGQVCRKIASIAVKNNAVIVIDKINESTKRKNAAFDNNMYRKFENALVNSLTDYYDIGIRGDEPGSVKNPLQLTVKEDNGFQNGIIFYQFDTFTKNICMRTGFVNLLNTFEIKTVASKVAFLKKLSDIYYDNDINEFVFEFTWRNIGCILKDEELPLYDGMDKIWKVRTHFTRYMRNAEKNKYVEIDGTEVLKELIRKNHPDMIGGKIDVDRLTSEEVKKVFEIFTLYTNGYIPRMDDAESGYMSPACDWNNFGTIWYDEMTALQLAKKSSLMIGKVKSGKDWKDMNVSRVEWLNHVLKADW

SEQ ID NO: 1178 - protein, 848 aa, Unknown
  Description of Unknown: uncultivated organism sequence
  Category: MG61 effectors
  Description: MG61-15 effector
MLGSDFGTIEEKLLDEYIRNKSKKESAYAQLVKTDFYDKKTIPAGDDVQRIQQYLDKVLSLTHIVRGLCADSQDPRTDFVFSDDVSSLEDDRVQIISCYNLIRNFVTKKREKTAKEKQIQLCFGRPAHFEQVWNNKQEGKFGNVDAALLEYAGKYYYMVPAAKNEAKLNFPVTDEPQMGECYNYLATKKAIGFAKAFAKFYIKSPEAMEGFEKTEEPFEISVGNDTMIISRKVYEDYEAKTFRESEEAKNKLIDCAKEFLSKNLSYCIYDWSVLKEANDYVNYGEFCNEVDSIAFRVINRYVSKKLVDDAVERGNLYMFEISSLDMYKDSSRMKNIMALRFNQIMNGMFTGDKSIIINNAPQIRYRPVVIEKKDVHPVGSRLVNKNTTDGRTIPGDVYLELCAYYNGKKDSLSPEASLYNEKVSVKDSDRAHIKDKHYTEEKFLITFSYTANKNVASATSGYQLNEMVRKEIRENGCNIMAVIRGIDNLLYYAVVDENGNRIEAGDLNVVGDTDFYEKLTILGKQRYTDQKNWKHENKVADLKDTYLGQVCRKIASIAVKNNAVIVIDKINESTKRKNAAFDNNMYRKFENALVNSLTDYYDIGIRGDEPGSVKNPLQLTVKEDNGFQNGIIFYQFDTFTKNICMRTGFVNLLNTFEIKTVASKVAFLKKLSDIYYDNDINEFVFEFTWRNIGCILKDEELPLYDGMDKIWKVRTHFTRYMRNAEKNKYVEIDGTEVLKELIRKNHPDMIGGKIDVDRLTSEEVKKVFEIFTLYTNGYIPRMDDAESGYMSPACDWNNFGTIRYDEMTALQLAKKSSLMIGKVKSGKDWKDMNVSRVEWLNHVLKADW

SEQ ID NO: 1179 - protein, 1259 aa, Unknown; identical to SEQ ID NO: 1167
  Description of Unknown: uncultivated organism sequence
  Category: MG61 effectors
  Description: MG61-16 effector

SEQ ID NO: 1180 - protein, 1259 aa, Unknown; identical to SEQ ID NO: 1172
  Description of Unknown: uncultivated organism sequence
  Category: MG61 effectors
  Description: MG61-17 effector

SEQ ID NO: 1181 - protein, 519 aa, Unknown
  Description of Unknown: uncultivated organism sequence
  Category: MG61 effectors
  Description: MG61-16 effector
MYRTACFKLRVHPHDRRRLATALARWSAGMGEALDRARADQRALLRTLRPRGAGRSAPPGDGMGSDRPARFEVDSRALHARVLGYCRGLPRDLHSALAMALIVAVEGLLGSWLALYAEWLTSGKPAGRKPGFPTVAAGTARGARERWEAALDASRTVLTRAEEDRWRAAVTREARERRMPLYFGAAQSGVRPGHLAHCGLIRRADRKWFAALTLWPKGDPLGETPRRAGNRANRGPLANVRSREEYLPGRATSTMLVPIEMGTGPGRRRKRWERLFPGRGTPKSALLVERDGEYYLHVEFEYPRREPRPTSGAVLALLRGVHTLVAGVLLDARGRRLATTAIDGRDLMRTISALTRLRAIRQRKGRSLAGDRRAARVAEHVLYSAGHQIIDLACRHGAEIVLLEDPGRRRPTPLLRYKHFSRLAEILVQLTEEAGLPPARVRRIYGPSLTCTACGWAPGEPVRVEEAPAPACPGCGRDRELPFHAAELLALDTLRLRTGRKETRPTLPNYVKSVRRNVP

SEQ ID NO: 1182 - protein, 1259 aa, Unknown; identical to SEQ ID NO: 1167
  Description of Unknown: uncultivated organism sequence
  Category: MG61 effectors
  Description: MG61-17 effector

SEQ ID NO: 1183 - protein, 369 aa, Unknown
  Description of Unknown: uncultivated organism sequence
  Category: MG61 effectors
  Description: MG61-18 effector
MAVIRGIDNLLYYAVVDENGNRIEAGDLNVVGDTDFYEKLTILGKQRYTDQKNWKHENKVADLKDTYLGQVCRKIASIAVKNNAVIVIDKINESTKRKNAAFDNNMYRKFENALVNSLTDYYDIGIRGDEPGSVKKPLQLTVKEDNGFQNGIIFYQFDTFTKNICMRTGFVNLLNTFEIKTVASKVAFLKKLSGIYYDNDINEFVFEFTWRNIGCILKDEELSLYDGMDKIWKVRTHFTRYMRNAEKNKYVEIDGTEVLKELIRKNHPDMIGGKIDVDRLTSEEVKKVFEIFTLYTNGYIPRMDDAESGYMSPACDWNNFGTIRYDEMTALQLAKKSSLMIGKVKSGKDWKDMNVSRVEWLNHVLKADW

SEQ ID NO: 1184 - protein, 350 aa, Unknown
  Description of Unknown: uncultivated organism sequence
  Category: MG61 effectors
  Description: MG61-19 effector
MSDSIVRCTTLSVASPVEGSWEALWRDLHACWAQTTAASNWLMTELAKADHQRLPGDAKLPPMPATYFYPKLTQLFPDLDTRTCASLERAVKRKYKAVLYQVLWQHAASLPTYRYPTPYPVHNQAWRPSWDQGNRPLVSLPLGRGAEKRWQLRLKGGPNFARQVALFRQFVEGAALKSEAKIYRRGNALLVGLVGRFPPPLLSERTRLMRVLTSSTCLWVVEIEGQEPRYWNHDDLRRLCISHRAYLQRIAEDSKYELRLPPGKLRHIREKRQERCQKHQRRIHTSLHQLTAQLVGLAERQKVARVIYTDHDKSWLPLFPWSELRRLLAYKLQGLGITFGGGDEDPNAHN

SEQ ID NO: 1185 - protein, 410 aa, Unknown
  Description of Unknown: uncultivated organism sequence
  Category: MG61 effectors
  Description: MG61-20 effector
MDFTKFQKLNSIIKTCSFEMIPIGKTRETMEKHNVIEEDAERKSNAELTKEVSDSFIREFIADYKEDMDWKDLYDAYGEDRARFTDIMNQKAEKLAKRFSDSFNEYINTFLKANGINDKKSKWSDSGYVDVVLPLYVSIHPDFSNDKYERAVASLLHCSNSLFKKYTTSYARIIAGTKKGSFADRSMENFQTACANSVMFDLISRNLSSVGSHDAFKEVFADAPLNMNEYLSQKGISRYNEFVGDSFDESGQVIRYGVNHYINEWNQTHPDERMPKMHKLKKQILSIVEPSFRIRTINDETELFGTFDNIRTAEQRYAGMLESILENMNTADIYDKSGILVTSAERDSLANAITGEWSYFRRQIKEEENRIREEYLQKKNRVKTKLTQKDNKQIEDALNKSIYETVSSFV

SEQ ID NO: 1186 - protein, 379 aa, Unknown
  Description of Unknown: uncultivated organism sequence
  Category: MG61 effectors
  Description: MG61-21 effector
MPEYLAISIPFSVHGESARLIWFTAWLSKLCAHRLLNDVKSNEVLINFSQTGFLGYARRRCYDLLPNRRYIDGITTLVHSTLKSTKRLRVDVKSLELKHWLLFQSEAEKEKKGNLNIRLLTLERAEVLVLNSNSESKRIIVELRTPKSYVKLLKTIMEKAWRNEIGYPARIVIKESNFYPGDVHLYCNLQVMVPYSVYVEVMKKHSKPLSNLVGGVDINVDRLNLTIVDRYGRLRDVKTFWFREVTARGYEKKPAWTKIHQAIHDMLSYAYHHGVSLLALESPEIIGYLRYYWVRNGDRGSRNYNYKVSIFRNRVIEAVSYKASLYAVDVAYVDPKGTTSSKEHDEVMKRYGLDRHSASAYLIALRGIEKHILTQKDTI

SEQ ID NO: 1187 - protein, 363 aa, Unknown
  Description of Unknown: uncultivated organism sequence
  Category: MG61 effectors
  Description: MG61-22 effector
MSYITIALPFNVGGEVAGRILSTAWLFKAATHRVLHLAKSSPALPGSDIGWKATFRKDAYAVIPNRRYADGAVVLVRGIYESCRELGVDFRGVELGDWLMFQQAEKEYPARNITLRPGGEVYVTTISYSGAVERVVLKPTVPKSYATLLEKILEERQEHAARVVIKGYGVRKGVVWISGEGQLTIPLTFYYRHMARYRANKGSLYGGVDVNVDRVNLAIIDNSGELRDTYTFWFREVVARGYPRRSARSVIGMRVHEMLEYAYHHGVKVLFLENPAVLGRLRLLWARSTERRSENYNWKVSAFRSSIIEMIALKAPLYGIEVAYVDPKGTSNSREHSEAMKKLRLDRHATSAYLIALRGVAKK

SEQ ID NO: 1188 - protein, 1262 aa, Unknown
  Description of Unknown: uncultivated organism sequence
  Category: MG61 effectors
  Description: MG61-23 effector
MKYHKYTKLNSTIKSATFELVPVGKTRDFLELHDVIKEDSERKAKVVLVKEVSDTFIVEFLRNYNNAGICDWENLHKIYNSATCTEIRGCIEKEKEKIAKDLNSALNAYIESFLKYNDINCSDVGWNKKSYVEVALPLYAKSVPDFNTDEYEDALASMKESSSAMFKKCRATYERIINGTNHGSIADRVIENFETFLANKLLYEKILETATGFENDETFTNVSQFGKYLSQNGIDKYNSTIGDFYNSSGELIKRGVNSRITEWNQSNPDNKLPKLQKLKKQILVDREKMFTIETIENKSDFNKTLNTVLILDEKITIETTKLLTSILAKDMYNTEGVYVTRAGGSYIANGLTGSWDYFEAIKTDAITKTVKDKLLTDYFNAKGKVKTNLTKADEKEIEKATKDFSYTIAELDRMLAGTDYITVEEMLIKKLEELKSRKKESYHLMTTCAFWNNDNKPTQDENGVIQKYLDDVLAVVRFTKIFSIDVKLTNADTIFMEDVAGMDKDKHGINKTYNMIRNYLTKKTELDAKQRRVQLCFGRPTHFEQKWNLMHGDKGIFGNCDAGLLEKDGCYYYIVPASKNGEKLNIHVSDCEDEADSYNMLSTKKGMGFLKMLIKCTLKSKSAIAKYKETDEPFELPIGDETITISKKMAEDYANKKHSKSKEELIKVIDFAKEFIAKHPSFKRYDLSSLKESSAYDNLKQFSDEVDSLCFAVTRLYVSKEQIDDAVEKGNLYMFMITSQDMYKSADKKHNIYSIRFNAIMKSMFEAGNHIIVNNSPSIYYRPALIEAEDKHPAGSILVNKLTTEGKTIPGEIYLELCAFYNGKCDKLSPLASVYNEKVSVKESTFPHIKDKHYTEEKFSITLSYKMNTNVVGNTSVFTLNNLVQEDIRENGCNIMSVIRGMDNLLYYCIVDSGNKRIASGNLNTIGNADYYEKLCVLGTQRYIDAKNWKYEKKVAELKETYLRQICRKIIKIAIENNAVICIDKVSDLRKNKLSAFDNQVYKKFENTLITALANYYDTSIPNTEAGGSLNPLQLAVEGADTMQNGILFHVAETNTRNICMKTGFINLMSTFGISTVKAKMEYLKKVSRIYYDSKADDFVFEFTWRNLGCCLKKDELPLYNGLDKVWQLHTHLTRLKWNKEKSQYEEIDGTELIKAIRRSHSDMIGKDIEVDMLSSKEIQTLYDVFILYANGFMPKEFMEDTSSYDSPIVPWSSVGRIEYDEMTAYQLCRKASLTMEKIKKGLSSKELVVYRTEWLNYLLEN

SEQ ID NO: 1189 - protein, 1262 aa, Unknown
  Description of Unknown: uncultivated organism sequence
  Category: MG61 effectors
  Description: MG61-24 effector
MKYRKYTKLNSTIKSATFELVPVGKTRDFLELHDVIKEDSERKAKVALVKEVSDAFIVEFLRNYNNAGICDWENLHKIYNSATRTEIRGCIEKEKEKIAKDLNSALNAYIESFLKYNDINCSDVGWNKKAYVEVALPLYAKSVPDFNTDEYEDALASMKASSSAMFKKCRATYERIINGTNRGSVADRVIENFETFLANKLLYEKILETATGFENDETFTNVSQFGKYLSQNGVDKYNSTIGDFYNSSGELIKRGINSRITEWNQSNPDNKLPKLQKLKKQILVDREKMFTIETIENKADFNKTLNTILILDEKITIETTKLLTSILAKDMYNTEGVYVTRAGGSYIANGLTGSWDYFEAIKTDAITKTVKDKLLTDYFNAKGKVKTNLTKADEKEIEKATKDFSYTIAELDRMLAGTDYTTVEEMLIKKLEKLKSRKNESYRLMTTCSFWNNDNKPTQDENGVIQKYLNDVLAVVRLTKIFSIDVKLANADTIFMEDVAGMDEDKHGVNKAYNMIRNYLTKKTELDAKQRRVQLCFGRPTHFEQKWNLMQEDKGIFGNCDAGLLEKDGCYYYIVPASKNGGKLNIHVSDFEDEVDSYNMLSTKKGMGFLKMLIKCTLKSKSAIAKYKETDEPFELPIGVETITISKKMAEDYANKKYSKSKEELIKVIDFAKEFIAKHPSFKRYDLSSLKESSAYDNLKQFSDEVDSLCFAITRLYVPKEQIDDAVEKGNLYMFMITSQDMYKSADKKRNVYSIRFNAIMKSMFEAGNHIIVNNSPSIYYRPALIEAEDKHPVGSILVNKLTTEGKTIPGEIYLELCAFYNGKCDKLSPLASVYNEKVSVKESTFPHIKDKHYTEEKFSITLSYKMNTNVVGNTSVFTLNNLVQEDIRENGCNIMSVIRGMDNLLYYCIVDSDNNRIASGNLNTIGNADYYEKLYVLSTQRYIDAKNWKYEKKVAELKETYLRQVCRKIIKIAIENNAVICIDKVSDLRKNKLSAFDNQVYKKFENTLINALANYYDTSLPNTEAGGSLNPLQLAVEGADTMQNGILFHVAETNTRNICMKTGFINLMSTFGISTVKAKMEYLKKVSRIYYDSKADDFVFEFTWRNLGCCLKKDELPLYNGVDKVWQLHTHLTRLKWNKEKSQYEEIDGTKLIKTIRRSHPDMIGKDIEVDMLSSKEIQTLYDIFILYANGFMPKEFAEDTSSYDSPIVPWSSVGRIEYDAMTAYQLCRKASLTMEKIKKGLSSKELVVYRTEWLNYLLEN

SEQ ID NO: 1190 - protein, 358 aa, Unknown
  Description of Unknown: uncultivated organism sequence
  Category: MG61 effectors
  Description: MG61-25 effector
MSQCQINSSVVDASALVEYATITGKLIPVSSEDYMKLARLAWSFRRAVQVAVRMIARGVEDSAVLKELRKTLNKAYADSAFKLAKAIVKGCIATGGNPRKAEIRKLFIVSDGESSRLGNRNIRLEDTGLVKVKYPYEGSWLVFRAQFEEEHTPLLRELVELAKQKRASYRAKIVFRDGKAYLHVSVPIELYLKHFKKGEAKGSLIAGFDLNSDRINLAIIDEYGRLVDTRTEWFPEVTSPGFPRGKAKALRLRALAKLLRYCYVHGVGAVVFENLFTVKRRRFTRSRSANRKMSKFAKRKLLQHAIVMSLKYGFKVLLVDPKGTTSSPEHAEIMKTHGLDRHTASAYLIAVRALGQNK

SEQ ID NO: 1191 - protein, 375 aa, Unknown
  Description of Unknown: uncultivated organism sequence
  Category: MG61 effectors
  Description: MG61-26 effector
MELPKYITLTIDFHVSGDYARNILSTAWLSKLVAHRVLRLIKENEVLADLSEYKFLKILRSKCYDILPNRRYVDGILKLVHSTLKSAKALEVNMKDIGLKQWLLFQSDGERGYARGNMNIRFIGTHRVRVLTLGYDKKTRYIELKVPTPKGWKKLIEVLVNRAFDGQIGYPARVVVKDYGIGKHGLHVHGEVQVMVPYSLYLDVMRRYDKPRGDKIAGVDVNVERLDAVVIDRHGNLLSYGTFWLKNATFMGVRRKRSWSLVGEKIHALLKWLYSQGVSVVGLENPEVIGYLRYYWIRNGERRESRWNWKVSMFRNSIIERITWKAPLYSIKPTYVNPKNTSKEGERIGRRLGLDRHLGSAYIMAKRTLKSLQRP

SEQ ID NO: 1192 - protein, 1258 aa, Unknown
  Description of Unknown: uncultivated organism sequence
  Category: MG61 effectors
  Description: MG61-27 effector
MEFTKYTRSNKIVRSVIFEMSPIGNTRAAIKEHGVIEEDAVRKSNAVLIKEVSDNFIREFLNDDKLEKYDWVEWEDLCLLIDDKPAFDAKAEKMKESIATSISKSFDSYINRFMAANGKANGKYSWKSAGYIDEVIPMYILCHPDYQDEKYTLAAESLKHASSAMFKKYFVSYERILNGTKTGSIAYRVMENVLIFCTNSKMYKKFAAKISGADLFAKIADITVLEDLISQNGIDFYNEMIGDLYDKDGQLIRKGFNSRINEYNSTHPDDKIPYLKKMKKQILSYVEPFFTIDKIESKEDLDNILTSVRATEESLTENLKTLFSNLLSNDKFPLDRILLTSAARSTIANSLAGRWDYFENIIREKETDKLKADYFEKKNRILTKLTKKDQKKINDAVTSNISSIADLNQMLHNVSEETVEDFLIKSLNKQISLKESSYSVLNNSGFMKSDSKPAWDDNQKIQDYLDHVIAISRMLKYFYTDLMNEKVDPIFVEELQMFDDSKDKIVKSYNMIRNYCTTKTELTAKEKRIQLCFGRPVHFEQTWNNKQEGKFGNLDAALLEFDGLYYYIVPAAKNKRKLNFPVTDIPQEGVNYHYLSTKKSIKLSMALPKMTFKSPAAVKKYAETEEPFTINIGNSTMTVSKKMYDDYNLKTFSSSPDARIALIDYAKEFISKEFSFKCYDYSSLKPSEEYRSYGEFCNEVDSITFSTTSKYVNKDLVDNAVMDGDLYMFLITSADMYKDREKNKDITAIRFNTIMQSMFTGDTSIIINNSPTIYYRPQIIEAVDKHPVGSILVNKMTTDGRTIPGEIYLELCDFYNGKKDYLSAEAKAYNENVSVKESSFPHIKDAHYTREMFTISLSYTLNKGVSNEKLGYALNDEIRRDIVKEGCNVMSIIRGINNLLYYCIVDQNGNQLKAGSLNIVGGVDYYEKLTLLSTQRYIDSKNWKYEKKSAELKDTYLGQVCREIAKIAIANNAIIVIDKLIDSIKNKAASFDNQVYKKFENRLISTLGNYYDVTLPDNEPGGSSNPLQLTVPDNTSIQNGIIFFIIDSGTKNICQETGYVNLLNTYNVNTVTAKAKFLSKISKIYFDADLNEFVFEFSWKDIGSINLKEDEEIPLYLGMNKVWKVRTHITRYKKNKEKRSYEEIDGTEIMKAVMKNYPDMIGKDIDITKLSSKDIQAVYEVFTYYANGFIPRIGNEDSEFISPVSTWTSIGNVPYDEMSAYQLAKKSLLGINKIQFAEDSGRYQYTPVSKVEWYNSLL

SEQ ID NO: 1193 - protein, 1262 aa, Unknown
  Description of Unknown: uncultivated organism sequence
  Category: MG61 effectors
  Description: MG61-28 effector
MKYHKYTKLNSTIKSATFELVPVGKTRDFLELHDVIKEDSERKAKVVLVKEVSDTFIVEFLRNYNNAGICDWENLHKIYNSATCTEIRGCIEKEKEKIAKDLNSALNAYIESFLKYNDINCSDVGWNKKSYVEVALPLYAKSVPDFNTDEYEDALASMKASSSAMFKKCRATYERIINGTNHGSIADRVIENFETFLANKLLYEKILETATGFENDETFTNVSQFGKYLSQNGIDKYNSTIGDFYNSSGELIKRGVNSRITEWNQSNPDNKLPKLQKLKKQILVDREKMFTIETIENKSDFNKTLNTVLILDEKITIETTKLLTSILAKDMYNTEGVYVTRAGGSYIANGLTGSWDYFEAIKTDAITKTVKDKLLTDYFNAKGKVKTNLTKADEKEIEKATKDFSYTIAELDRMLAGTDYITVEEMLIKKLEELKSRKKESYHLMTTYAFWNNDNKPTQDENGVIQKYLDDVLAVVRFTKIFSIDVKLTNADTIFMEDVAGMDKDKHGINKTYNMIRNYLTKKTELDAKQRRVQLCFGRPTHFEQKWNLMHGDKGIFGNCDAGLLEKDGCYYYIVPASKNGEKLNIHVSDCEDEADSYNMLSTKKGMGFLKMLIKCTLKSKSAIAKYKETDEPFELPIGDETITISKKMAEDYANKKYSKSKEELIKVIDFAKEFIAKHPSFKRYDLSSLKESSAYDNLKQFSDEVDSLCFAVTRLYVSKEQIDDAVEKGNLYMFMITSQDMYKSADKKHNIYSIRFNAIMKSMFEAGNHIIVNNSPSIYYRPALIEAEDKHPADSILVNKLTTEGKTIPGEIYLELCAFYNGKCDKLSPLASVYNEKVSVKESTFPHIKDKHYTEEKFSITLSYKMNTNVVGNTSVFTLNNLVQEDIRENGCNIMSVIRGMDNLLYYCIVDSGNKRIASGNLNTIGNADYYEKLCVLGTQRYIDAKNWKYEKKVAELKETYLRQICRKIIKIAIENNAVICIDKVSDLRKNKLSAFDNQVYKKFENTLITALANYYDTSIPNTEAGGSLNPLQLAVEGADTMQNGILFHVAETNTRNICMKTGFINLMSTFGISTVKAKMEYLKKVSRIYYDSKADDFVFEFTWRNLGCCLKKDELPLYNGLDKVWQLHTHLTRLKWNKEKSQYEEIDGTELIKAIRRSHSDMIGKDIEVDMLSSKEIQTLYDVFILYANGFMPKEFMEDTSSYDSPIVPWSSVGRIEYDEMTAYQLCRKASLTMEKIKKGLSSKELVVYRTEWLNYLLEN

SEQ ID NO: 1194 - protein, 1258 aa, Unknown
  Description of Unknown: uncultivated organism sequence
  Category: MG61 effectors
  Description: MG61-29 effector
MEFTKYTRSNKIVRSVTFEMSPIGNTRAAIKEHGVIEEDAVRKSNAVLIKEVSDNFIREFLNDDKLEKYDWVEWENLCLLIDDKPAFDAKAEKMKESIAAALSKSFDSYINRFMAANGKANGKYSWKSAGYIDEVIPMYILCHPDYQDEKYTLAAESLKHASSAMFKKYFVSYERILNGTNAGSIAYRVMENVLIFCTNSKMYKKFAAKISGADLFAKIADITVLEDLISQNGIDFYNEMIGDLYDKDGQLIRKGFNSRINEYNSTHPDDKIPYLKKMKKQILSYVEPFFTIDKIESKEDLDNILTSVRATEESLTESLKTLFSNLLSNDKFSLDRILLTSAARSTIANSLAGRWDYFENVIREKETDKLKADYFEKKNRILTKLTKKDQKKINDAVTSNISSIADLNHMLHNISEETVEDFLIKSLNKQISLKESSYSVLNNCGFMKSDSKPAWDDNQKIQDYLDHVIAISRMLKYFYTDLMNEKVDPIFVEELQMLDGSKDKIVKSYNMIRNYCTTKTELTAKEKRIQLCFGRPVHFEQTWNNKQDGKFGNLDAALLEFDGLYYYIVPAAKNKRKLNFPVTDIPQEGVNYHYLSTKKNIKLSMALPKMTFKSPAAVKKYAETEEPFTINIGNSTMTVSKKMYDDYNLKTFSSSPDARIALIDYAKEFISKEFSFKCYDYSSLKPSEEYRSYGEFCNEVDSITFSTTSKYVNKDLVDNAVMDGDLYMFLITSANMYKDREKNKDITAIRFNTIMQSMFTGDTSIIINNSPIIYHRPQIIEAEDKHPVGSILVNKMTTDGRTIPGEIYLELCDFYNGKKDHLSAEAKVYNENVSVKESSFPHIKDAHYTREMFTISLSYTLNKGVSNEKLGYALNDEIRRDIVKEGCNVMSIIRGINNLLYYCIVDQNGNQLKAGSLNIVGGVDYYEKLTLLSTQRYIDSKNWKYEKKSAELKDTYLGQVCREIAKIAIANNAIIVIDKLIDSIKNKAASFDNQVYKKFENRLISTLGNYYDVTLPDNEPGGSSNPLQLTVPDNTSIQNGIIFFIIDSGTKNICQETGYVNLLNTYNVNTVTAKAKFLSKISKIYFDADLNEFVFEFSWKDIGSINLKEDEEIPLYLGMNKVWKVRTHITRYKKNKEKRSYEEIDGTEIMKAVMKNYPDMIGKDIDITKLSSKDIQAVYEVFTYYANGFIPRIGNEDSEFISPVSTWTSIGNVPYDEMSAYQLAKKSLLGINKIQFTEDSGRYQYTPVSKVEWYNSLL

SEQ ID NO: 1195 - protein, 363 aa, Unknown
  Description of Unknown: uncultivated organism sequence
  Category: MG61 effectors
  Description: MG61-30 effector
MSYITVSLSFNTNSDAAKRLLSTAWLFKIATHRVLDLARQTPVLPATDIGWKNMFRGVAYEAVPNRRYADGAITLIRSIYESCRVLGIDFRSVELGNWLMFQQSEMEYPVRNVTLREGYEFHITVIDYGGSTSRVIIKPTIPKGYRLLLDKILEERQEHTGRVVINGYGVRDNNVWVHGEVQLTIPIEFYYRHMVRYEQNNGRLFGGVDVNVDRINLTIVDEGGELRDVKTFWFEEASRKGVTRHRAWSVIGMAVHAMLDYAYHHGVKTLFLENPDILGRLKLMWIRNGDRRHENYNYRVATFRNSVIEMIVMKAPLYGINVEYVNPKGTTSSEDHDEVMKAYGLDKHTASAYLIVLKGLKQS

SEQ ID NO: 1196 - protein, 1262 aa, Unknown
  Description of Unknown: uncultivated organism sequence
  Category: MG61 effectors
  Description: MG61-31 effector
MQYHKYTKLNSTIKSATFELVPVGKTRDFLELHDVIKEDSERKAKVVLVKEVSDTFIVEFLRNYNNAGICDWENLHKIYNSATCTEIRGCIEKEKEKIAKDLNSALNAYIESFLKYNDINCSDVGWNKKSYVEVALPLYAKSVPDFNTDEYEDALASMKASSSAMFKKCRATYERIINGTNHGSIADRVIENFETFLANKLLYEKILETATGFENDETFTNVSQFGKYLSQNGIDKYNSTIGDFYNSSGELIKRGVNSRITEWNQSNPDNKLPKLQKLKKQILVDREKMFTIETIENKSDFNKTLNTVLILDEKITIETTKLLTSILAKDMYNTEGVYVTRAGGSYIANGLTGSWDYFEAIKTDAITKTVKDKLLTDYFNAKGKVKTNLTKADEKEIEKATKDFSYTIAELDRMLAGTDYITVEEMLIKKLEELKSRKKESYHLMTTCAFWNNDNKPTQDENGVIQKYLDDVLAVVRFTKIFSIDVKLTNADTIFMEDVAGMDKDKHGINKTYNMIRNYLTKKTELDAKQRRVQLCFGRPTHFEQKWNLMHGDKGIFGNCDAGLLEKDGCYYYIVPASKNGEKLNIHVSDCEDEADSYNMLSTKKGMGFLKMLIKCTLKSKSAIAKYKETDEPFELPIGDETITISKKMAEDYANKKHSKSKEELIKVIDFAKEFIAKHPSFKRYDLSSLKESSAYDNLKQFSDEVDSLCFAVTRLYVSKEQIDDAVEKGNLYMFMITSQDMYKSADKKHNIYSIRFNAIMKSMFEAGNHIIVNNSPSIYYRPALIEAEDKHPAGSILVNKLTTEGKTIPGEIYLELCAFYNGKCDKLSPLASVYNEKVSVKESTFPHIKDKHYTEEKFSITLSYKMNTNVVGNTSVFTLNNLVQEDIRENGCNIMSVIRGMDNLLYYCIVDSGNKRIASGNLNTIGNADYYEKLCVLGTQRYIDAKNWKYEKKVAELKETYLRQICRKIIKIAIENNAVICIDKVSDLRKNKLSAFDNQVYKKFENTLITALANYYDTSIPNTEAGGSLNPLQLAVEGADTMQNGILFHVAETNTRNICMKTGFINLMSTFGISTVKAKMEYLKKVSRIYYDSKADDFVFEFTWRNLGCCLKKDELPLYNGLDKVWQLHTHLTRLKWNKEKSQYEEIDGTELIKAIRRSHSDMIGKDIEVDMLSSKEIQTLYDVFILYANGFMPKEFMEDTSSYDSPIVPWSSVGRIEYDEMTAYQLCRKASLTMEKIKKGLSSKELVVYRTEWLNYLLEN

SEQ ID NO: 1197 - protein, 1232 aa, Unknown
  Description of Unknown: uncultivated organism sequence
  Category: MG61 effectors
  Description: MG61-32 effector
MDYAKFTKQGKLIKGIKLELVPQGNTRDAISEYKIVEADQQLADMVKEVVMAGNEFYKDFIKQIVGHMDGADWQAYGEAVENKATEQKTYDEAVKSISASIKNAILGTAELYGGKKTLFAKDFITIVLRKYVETAENFPYNRERILTCIDVLSDKNVLFKTPYVKWEHIIFGESKGSIAERMLSNFDIFYDNKNKYAALKEATAITDFDDFFTDYASYTRYVGQDGIELYNSAIRGIYSESGAKISEGINEYINKLKMKHPELHVNMLKKLQKQILSNSEPLFKVATIQNAEELKGIMNKVKVTEESVLSSAKELLVHMETSDLHDLYISGQRLYFVCQKIAKDGGILEELIFNNECSRVEKLTEKKKEEIRGAIVKHDYSFAYIDSLLSEYAEKTVKMVINEELQKLIATVVSSGASYDSITINPKWKAIPDKEITVIREYLESFVELNKFLKCLQVRDSDVYPDFKTYATLNVLVDELGALNKAYNMVRNFVTKKVNDKDGKTRLCFGRGALLERGWNRKNQAVDWLGNIDHMLLTKDGKYYYAVPAPVKRKTKIYISDTKPSDEVYEYMEISKQSSFLKTFARLFTSLGLKNIGDANDITMDLGNGSMTVTKEFLVKYKDGECKKNTDFMHKSIDIAKEFLTKHYSYATFNFSELKKTEDYTSFYEFANDVDKYTYAVKTKYIDAAIIDKAVEDKELLLFMLSSMDLYKSQEKCKDITALYTRYFFSEENRKKADIWLNANPAIYYRKPLIKFEKTHPAGSILVRKTYEDKDGITHIVPDNVYMSLYNYYNKNTPLNEEAMQYVDLVEHHVAVQDYVKDARYTREMFTINLSFTLNGNAGDAAQAYTINNMVKEEIKAKMPRMLTVVRGYRNLLEYCITDETGKVFESGNFNTIGEINFKEKLEDLDRARKADAQNWKYEKTVVNIKESYLGMVTSSIVKKAVAYNAIINVEQLSDAFKDKRSCMDNQVFKKFEEKLVSKLACYYDKAKAPTEPGGYLNPLQLASPNCLSNTQNGILFYVSPAYTNEVCPKSNFINLLDFSAAKTLKAKREFLRKMNEICYDAEHEAFHFSFCYDDMPIKLPVKEKKELNDKTNQEFGKHIWTVYINGVRTEYNKKERKLVELNGTEILGKECAKNNVMLTDHMDVDSMPNSVVNEMIHIFQKYSFGEVAQKDVYYVSPVSPQAEPICTPGELRLKNMSEKGYMILHNIVAGKEKFAVNKMEWLEEKLG

SEQ ID NO: 1198 - protein, 1262 aa, Unknown
  Description of Unknown: uncultivated organism sequence
  Category: MG61 effectors
  Description: MG61-33 effector
MKYHKYTKLNSTIKSATFELVPVGKTRDFLELHDVIKEDSERKAKVVLVKEVSDTFIVEFLRNYNNAGICDWENLHKIYNSATCTEIRGCIEKEKEKIAKDLNSALNAYIESFLKYNDINCSDVGWNKKSYVEVALPLYAKSVPDFNTDEYEDALASMKASSSAMFKKCRATYERIINGTNHGSIADRVIENFETFLANKLLYEKILETATGFENDETFTNVSQFGKYLSQNGIDKYNSTIGDFYNSSGELIKRGVNSRITEWNQSNPDNKLPKLQKLKKQILVDREKMFTIETIENKSDFNKTLNTVLILDEKITIETTKLLTSILAKDMYNTEGVYVTRAGGSYIANGLTGSWDYFEAIKTDAITKTVKDKLLTDYFNAKGKVKTNLTKADEKEIEKATKDFSYTIAELDRMLAGTDYITVEEMLIKKLEELKSRKKESYHLMTTCAFWNNDNKPTQDENGVIQKYLDDVLAVVRFTKIFSIDVKLTNADTIFMEDVAGMDKDKHGINKTYNMIRNYLTKKTELDAKQRRVQLCFGRPTHFEQKWNLMHGDKGIFGNCDAGLLEKDGCYYYIVPASKNGEKLNIHVSDCEDEADSYNMLSTKKGMGFLKMLIKCTLKSKSAIAKYKETDEPFELPIGDETITISKKMAEDYANKKHSKSKEELIKVIDFAKEFIAKHPSFKRYDLSSLKESSAYDNLKQFSDEVDSLCFAVTRLYVSKEQIDDAVEKGNLYMFMITSQDMYKSADKKHNIYSIRFNAIMKSMFEAGNHIIVNNSPSIYYRPALIEAEDKHPAGSILVNKLTTEGKTIPGEIYLELCAFYNGKCDKLSPLASVYNEKVSVKESTFPHIKDKHYTEEKFSITLSYKMNTNVVGNTSVFTLNNLVQEDIRENGCNIMSVIRGMDNLLYYCIVDSGNKRIASGNLNTIGNADYYEKLCVLGTQRYIDAKNWKYEKKVAELKETYLRQICRKIIKIAIENNAVICIDKVSDLRKNKLSAFDNQVYKKFENTLITALANYYDTSIPNTEAGGSLNPLQLAVEGADTMQNGILFHVAETNTRNICMKTGFINLMSTFGISTVKAKMEYLKKVSRIYYDSKADDFVFEFTWRNLGCCLKKDELPLYNGLDKVWQLHTHLTRLKWNKEKSQYEEIDGTELIKAIRRSHSDMIGKDIEVDMLSSKEIQTLYDVFILYANGFMPKEFMEDTSSYDSPIVPWSSVGRIEYDEMTAYQLCRKASLTMEKIKKGLSSKELVVYRTEWLNYLLEN

SEQ ID NO: 1199 - protein, 1535 aa, Unknown
  Description of Unknown: uncultivated organism sequence
  Category: MG61 effectors
  Description: MG61-35 effector
MEKKILGLDLGTNSIGWAVVNASFNMEDNRLKLENYMGIDDCGVRIFPEGVEPNTIGKGDREQSRNATRRDKRQMRRQFYRKRLRRIKLLELLVEQGMCPLDMELLKQWKNWDRKKKSEGRVFPETSEFLSWLHLNPYELRARALNEPLTFLELGRVFYHLIHRRGFLTSRKGKGNEDGTIFTKGKPDENILPVEETRKMMGNSTLGKTLYDIMVKPNEPFSINRNSDGKEIRVRGRYTVRDMYILEFERIWLAQAKFSPELNHRKVWVVRTRLLKGNIANKRNQKRLMLLEQKYGRDALTIDEGKHGIHKVTTRQQLDLKYYLAGDITILSEGDAISVQFKSNESVLFWQRPLRSQKSLLANCRFENELPVISANNQYLVKNCKIQTRSKKPCPLSHPEFERFRALQFVNNIKYGKDNRLTSEQREKVMAFINKNDASFTFDKIVKELKLNYEKFNYENDFKVTGNYTHKKVMTLFKPEIWAANSETIWHYFYFYDDNNMLTQRLSEKGFGQFADTDVKNIRLKDGYSNVSLKAIRNIMPFLEKGYTYDRAVILGGVRNAFGRRWEYFNAVQDQLEREIRSLLNGKHKEGAVIELIKDYLIDNNYGFVKNDPHFAHLYHHSQDVEQAEELSDFVPNVENLRNPIVQQGVNETRRLVNSLLKRYRKSDPNFQFARIHIEMGRELRNSRSQRQQMSDSIRENAQKNDEARERLAGFGLKPSRENVQKYLLAKEIELRAGRLVCPYTGRALGMNDVLGGRNLIQIEHIIPYSISLDDNFGNKTLCDAKFNQMKGEKTPYQFFCENQDPHLWGIRKYHNPMDGWEEISERAFRVLPFPKAKRFTSKSDFEAAGFIERQLNDTRYIARKTMEIMGHVCSDVRVMPGQLTAELRRLWGLNNVLQETQKVDFSGLSIQAEKAVPCYLFTDSDGKTISIVPKQSDYPETADYELVIGGKVVKGVFELRQAGFLMSAPEMPDGRYWVRLKVNSDISLLPVAADQPLPDVNHISFRGRVENRQFNNDNTGKVKTSEPDGTYFARFGIIRASFIAPERKNEPKAGKGQVLLYGTVNNGTFKCYIYTCPCDMPDGKYWILLDLDMTNVEFIRAFNERPTAGGNQLVIMASVTDGGLLSLDDDPRYVVPINADAGRYYATLDIEPISAELFPMDRAIPQFEKGQQLTEGTVWVDEHTGEIRFDPKKNRDDHRHHAIDAITIALTEQRFLQYMSTRNAQLKDKMRGKLNSTEKLPVPWMGFEDDVAKAANGILVSHKQNNKTLTKNRRGFSVRGQLHKESVFGKRKAPFAHEDGYHIRAKITELENNKHVAKVVDVTIRKLIEDHLKHQCGVDVANAKGYKIPKDAFFKNGEWQLFLPNKNGAPVPIKKVRICENIGNAMPLKDNVNQYVNPRNNHHVLIYKDANGELKEEVVMFWTVAERRLQGLPIYQLPEDGQSIVTTMEINDMFLVGLSPEDIMANWRNKALLSRCLYRVQKLSQMDFTFRHHLASTINDDDQGCRIASMKLWKEKNPIKVKLDETGQLTLVTQ

SEQ ID NO: 1200 - protein, 1264 aa, Unknown
  Description of Unknown: uncultivated organism sequence
  Category: MG61 effectors
  Description: MG61-36 effector
MEDRYMDFTKFQKLNSIIKTCSFEMVPIGKTRETMEKHNVIEEDAERKSNAELTKEVSDSFIREFIADYKEDMDWKDLYDAYGEDRARFTDIMNQKAEKLAKRFSDSFNEYINTFLKANGINDKKSKWSDSGYVDVVLPLYVSIHPDFSNDKYERAVASLLHCSNSLFKKYTTSYARIIAGTKKGSFADRSMENFQTVCANSVMFDLISRNLSSVECHDAFKEVFADAPLNMNEYLSQKGISRYNEFVGDSFDENGQVIRYGVNHYINEWNQTHPDERMPKMHKLKKQILSIVEPSFRIRTINDETELFGTFDNIRTAEQRYAGMLESILENMNTADIYDKSGILVTSTERDSLANAITGEWSYFRRQIKEEEENRIREEYLQKKNRVKTKLTQKDNKQIEDALNKSIYSVADLNKMLGSDLGTIEEKLLDEYIRNKSKKESAYAQLVKTDFYDKKTIPAGDDVQRIQQYLDKVLGLTHIVRGLCADSQDPRTDFVFSDDVSSLEDDRVQIVSCYNLIRNFVTKKREKAAKEKQIQLCFGRPAHFEQVWNNKQEGKFGNVDAALLEYAGKYYYMVPAAKNEEKLNFPVTDEPQTGECYNYLATKKAIGFAKAFAKFYIKSPEAMEGYKKTDEPFEISVGNDTMLISKKVYEDYEAKIFRESEEAKNKLIDCAKEFLSKNLSYCIYDWSELKEAKNYVNYGEFCNEVDSIAFRVINRYVSKKLVDDAVESGNLYMFEISSLDMYKDSSRMKNIMALRFNQIMNGMFTGDKSIIINNAPQIRYRPVVIEKKDVHPVGSRLVNKNTTDGRTIPGDVYLELCAYYNGKKDSLSPEASLYNEKVSVKDSDRAHIKDKHYTEEKFLITFSYTANKNVASATSGYQLNEMVRKEIRENGCNIMAVIRGIDNLLYYAVVDENGNRIEAGDLNVVGDTDFYEKLTILGKQRYADQKNWKHENKVADLKDTYLGQVCRKIASIAVKNNAVIVIDKINERTKRKNAAFDNNMYRKFENALVNSLTDYYDIGIRGDEPGSVKNPLQLTVKEDNGFQNGIIFYQFDTFTKNICMETGFVNLLNTFEIKTVASKVAFLKKLSGIYYDNDINEFVFEFTWRNIGCILKDEELSLYDGMDKIWKVRTHFTRYMRNAEKNKYVEIDGTEVLKELIRKNHPDMIGGKIDVDRLTSEEVKKVFEIFTLYTNGYIPRMDDAESGYMSPACDWNNFGTIRYDEMTALQLAKKSSLMIGKVKSGKDWKDMNVSRVEWLNHVLKADW

SEQ ID NO: 1201 - protein, 1264 aa, Unknown
  Description of Unknown: uncultivated organism sequence
  Category: MG61 effectors
  Description: MG61-37 effector
MEDRYMDFTKFQKLNSIIKTCSFEMIPIGKTRETMEKHNVIEEDAERKSNAELTKEVSDSFIREFIADYKEDMDWKDLYDAYGEDRARFTDIMNQKAEKLAKRFSDSFNEYINTFLKANGINDKKSKWSDSGYVDVVLPLYVSIHPDFSNDKYERAVASLLHCSNSLFKKYTTSYARIIAGTKKGSFADRSMENFQTACANSVMFDLISRNLSSVGSHDAFKEVFADAPLNMNEYLSQKGISRYNEFVGDSFDESGQVIRYGVNHYINEWNQTHPDERMPKMHKLKKQILSIVEPSFRIRTINDETELFGTFDNIRTAEQRYAGMLESILENMNTADIYDKSGILVTSAERDSLANAITGEWSYFRRQIKEEEENRIREEYLQKKNRVKTKLTQKDNKQIEDALNKSIYSVADLNKMLGSDFGTIEEKLLDEYIRNKSKKESAYAQLVKTDFYDKKTIPAGDDVQRIQQYLDKVLSLTHIVRGLCADSQDPRTDFVFSDDVSSLEDDRVQIISCYNLIRNFVTKKREKTAKEKQIQLCFGRPAHFEQVWNNKQEGKFGNVDAALLEYAGKYYYMVPAAKNEAKLNFPVTDEPQMGECYNYLATKKAIGFAKAFAKFYIKSPEAMEGFEKTEEPFEISVGNDTMIISRKVYEDYEAKTFRESEEAKNKLIDCAKEFLSKNLSYCIYDWSVLKEANDYVNYGEFCNEVDSIAFRVINRYVSKKLVDDAVERGNLYMFEISSLDMYKDSSRMKNIMALRFNQIMNGMFTGDKSIIINNAPQIRYRPVVIEKKDVHPVGSRLVNKNTTDGRTIPGDVYLELCAYYNGKKDSLSPEASLYNEKVSVKDSDRAHIKDKHYTEEKFLITFSYTANKNVASATSGYQLNEMVRKEIRENGCNIMAVIRGIDNLLYYAVVDENGNRIEAGDLNVVGDTDFYEKLTILGKQRYTDQKNWKHENKVADLKDTYLGQVCRKIASIAVKNNAVIVIDKINESTKRKNAAFDNNMYRKFENALVNSLTDYYDIGIRGDEPGSVKNPLQLTVKEDNGFQNGIIFYQFDTFTKNICMRTGFVNLLNTFEIKTVASKVAFLKKLSDIYYDNDINEFVFEFTWRNIGCILKDEELPLYDGMDKIWKVRTHFTRYMRNAEKNKYVEIDGTEVLKELIRKNHPDMIGGKIDVDRLTSEEVKKVFEIFTLYTNGYIPRMDDAESGYMSPACDWNNFGTIRYDEMTALQLAKKTSLMIGKVKSGKDWKDMNVSRVEWLNHVLKADW

SEQ ID NO: 1202 - protein, 1264 aa, Unknown
  Description of Unknown: uncultivated organism sequence
  Category: MG61 effectors
  Description: MG61-38 effector
MEDRYMDFTKFQKLNSIIKTCSFEMIPIGKTRETMEKHNVIEEDAERKSNAELTKEVSDSFIREFIADYKEDMDWKDLYDAYGEDRARFTDIMNQKAEKLAKRFSDSFNEYINTFLKANGIKDKKSKWSDSGYVDVVLPLYVSIHPDFSNDKYERAVASLLHCSNSLFKKYTTSYARIIAGTKKGSFADRSMENFQTACANSVMFDLISINLSNVGSHDAFKEVFADAPLNMNEYLSQKGISRYNEFVGDSFDESGQVIRYGVNHYINEWNQTHPDERMPKMHKLKKQILSIVEPSFRIRTINDETELFGTFDNIRTAEQRYAGMLESILENMNTADIYDKSGILVTSAERDSLANAITGEWSYFRRQIKEEEENRIREEYLQKKNRVKTKLTQKDNKQIEDALNKSIYSVADLNKMLGSDFGTIEEKLLDEYIRNKSKKESAYAQLVKTDFYDKKTIPAGDDVQRIQQYLDKVLGLTHIVRGLCADSQDPRTDFVFSDDVSSLEDDRVQIISCYNLIRNFVTKKREKTAKEKQIQLCFGRPAHFEQVWNNKQEGKFGNVDAALLEYAGKYYYMVPAAKNEAKLNFPVTDEPQRGECYNYLATKKAIGFAKAFAKFYIKSPEAMEGFEKTEEPFEISVGNDTMIISRKVYEDYEAKTFRESEEAKNKLIDCAKEFLSKNLSYCIYDWSGLKETKDYVNYGEFCNEVDSIAFRVINRYVSKKLVDDAVERGNLYMFEISSLDMYKDSSRMKNIMALRFNQIMNGMFTGDKSIIINNAPQIRYRPVVIEKKDVHPVGSRLVNKNTTDGRTIPGDVYLELCAYYNGKKDSLSPEASLYNEKVSVKDSDRAHIKDKHYTEEKFLITFSYTANKNVASATSGYQLNEMVRKEIRENGCNIMAVIRGIDNLLYYAVVDENGNRIEAGDLNVVGDTDFYEKLTILGKQRYTDQKNWKHENKVADLKDTYLGQVCRKIASIAVKNNAVIVIDKINERTKRKNAAFDNNMYRKFENALVNSLTDYYDIGIRGDEPGSVKNPLQLTVKEDNGFQNGIIFYQFDTFTKNICMRTGFVNLLNTFEIKTVASKVAFLKKLSGIYYDNDINEFVFEFTWRNIGCILKDEELSLYDGMDKIWKVRTHFTRYMRNAEKNKYVEIDGTEVLKELIRKNHPDMIGGKIDVDRLTSEEVKKVFEIFTLYTNGYIPRMDDAESGYMSPACDWNNFGTIRYDEMTALQLAKKSSLMIGKVKSGKDWKDMNVSRVEWLNHVLKADW

SEQ ID NO: 1203 - protein, 1264 aa, Unknown
  Description of Unknown: uncultivated organism sequence
  Category: MG61 effectors
  Description: MG61-39 effector
MEDRYMDFTKFQKLNSIIKTCSFEMIPIGKTRETMEKHNVIEEDAERKSNAELTKEVSDSFIREFIADYKEDMDWKDLYDAYGEDRARFTDIMNQKAEKLAKRFSDSFNEYINTFLKANGINDKKSKWSDSGYVDVVLPLYVSIHPDFSNDKYERAVASLLHCSNSLFKKYTTSYARIIAGTKKGSFADRSMENFQTACANSVMFDLISRNLSSVGSHDAFKEVFADAPLNMNEYLSQKGISRYNELVGDSFDESGQVIRYGVNHYINEWNQTHPDERMPKMHKLKKQILSIVEPSFRIRTINDETELFGTFDNIRTAEQRYAGMLESILENMNTADIYDKSGILVTSAERDSLANAITGEWSYFRRQIKEEEENRIREEYLQKKNRVKTKLTQKDNKQIEDALNKSIYSVADLNKMLGSDFGTIEEKLLDEYIRNKSKKESAYAQLVKTDFYDKKTIPAGDDVQRIQQYLDKVLSLTHIVRGLCADSQDPRTDFVFSDDVSSLEDDRVQIISCYNLIRNFVTKKREKTAKEKQIQLCFGRPAHFEQVWNNKQEGKFGNVDAALLEYAGKYYYMVPAAKNEAKLNFPVTDEPQMGECYNYLATKKAIGFAKAFAKFYIKSPEAMEGFEKTEEPFEISVGNDTMIISRKVYEDYEAKTFRESEEAKNKLIDCAKEFLSKNLSYCIYDLSVLKEANDYVNYGEFCNEVDSIAFRVINRYVSKKLVDDAVERGNLYMFEISSLDMYKDSSRMKNIMALRFNQIMNAMFTGDKSIIINNAPQIRYRPVVIEKKDVHPVGSRLVNKNTTDGRTIPGDVYLELCAYYNGKKDSLSPEASLYNEKVSVKDSDRAHIKDKHYTEEKFLITFSYTANKNVASATSGYQLNEMVRKEIRENGCNIMAVIRGIDNLLYYAVVDENGNRIEAGDLNVVGDTDFYEKLTILGKQRYTDQKNWKHENKVADLKDTYLGQVCRKIASIAVKNNAVIVIDKINESTKRKNAAFDNNMYRKFENALVNSLTDYYDIGIRGDEPGSVKNPLQLTVKEDNGFQNGIIFYQFDTFTKNICMRTGFVNLLNTFEIKTVASKVAFLKKLSGIYYDNDINEFVFEFTWRNIGCILKDEELPLYDGMDKIWKVRTHFTRYMRNAEKNKYVEIDGTEVLKELIRKNHPDMIGGKIDVDRLTSEEVKKVFEIFTLYTNGYIPRMDDAESGYMSPACDWNNFGTIRYDEMTALQLAKKSSLMIGKVKSGKDWKDMNVSRVEWLNHVLKADW

SEQ ID NO: 1204 - protein, 1253 aa, Unknown
  Description of Unknown: uncultivated organism sequence
  Category: MG61 effectors
  Description: MG61-40 effector
MELNKFCRLNQSIKTCSLELVPIGRTRETIEKHNVIEEDSKRKENAVLAKEVSDSFIREFIADYKGDFDWSELVACFGKHEEYAGIKEKMEEKIAREFSDAFNGYISKFLKANGVGKADNKTKWSDASYIDVVLPLYASLHPDYDNPKYKEAIASICHCSSTIFKRYITAYEKIINGTKKGSFAERVMDNFQIICTNRLMCEIVFSKIKKADDFRLFLDAPESMNEYLSQKGIDQYNETIGDSFSEKGEILRYGLNHYINEWNQKNPDSRMPKLQKLKKQILSVAEPAFRIDVIDNEKELQETIKNIRAAEVRYSGKLKDILENLNYTNTYIHDGVLVKAAGRENLAKMITGEWNFFREQIREREERRIRDEYLQKKNRIKTKLTKKDEKQIEDTVSKGMYSLVDLNKMLGEEKANIESKLLDEYVKNRSEREKHYTVVANADFMSKESLPTSDEIKIIQNYLDKVIQMTHIIRCLDADAQNEKVDLVFLDDAAELEDDKTLIVTGYNLIRSFLTKKREKTAKEKAVQLCFGRPAHFEQKWNNKQAGKFGNVDAALLEENGKFYYIVPAAKNESKLNFPVTDEPQAGRCYNYLSTQKAIGFAKAFAKFTIKSPEAMSGYAKSEEPFEISVGNQKMTVSKKMYDSYEAKTFRDSEEEKIKLIDYAKEFLQKHGSYNTYDWSELRESKDYVNYGEFCSEVDSIAFRVVNRYISKDLVDDAVLRGDLYMFEITSQDMYKDKNRMKNIMALRFHAIMEGMKTGNKSIIINNAPQIRYRPQIIEAEDKHPAGSKLVNKKTTDGKTIPGDIYLELCDFYNGRKSSLSPEASLYNERVSVKVSDREHIKDKHYTAEKFLITLSYTMNKNVASNTSVYKLNEMIRNEIKENGCNIMSVIRGIDNLLYYAVIDENGNKIEAGDLNVVGDTDFNEMLSVVGTQRYIDQKNWKYEKKVAELKDTYLGQACRKIASIAVKNNAVIVIDKINENTKRKNAAFDNNVYRKFEDALVNTLSNYYDRSIKADEPGGISNPLQLCVNEDNNFQNGILFYTYDAFTKNICMDTGFINLLNTFNVKTVAAKLGFLKKMDGIYYDSDRQEFVFEFAWGKLGSVLKEEEAALYTGLDKSWKVRTHLTRYKRDRESGKYKEVDGTEILKKLIKEKHPDMIGEKINVDKLTSNEVQTVYEIFTLYVNGFIPRMDGESSEYMSPVSDWNSMSNIAYDEMTALQLARKGSLTIGRIKNGFEGKDINISRVDWLNEILR

SEQ ID NO: 1205 - protein, 1264 aa, Unknown
  Description of Unknown: uncultivated organism sequence
  Category: MG61 effectors
  Description: MG61-41 effector
MEDIYMDFTKFQKLNSIIKTCSFEMIPIGKTRETMEKHNVIEEDAERKSNAELTKEVSDSFIREFIADYKEDMDWKDLYDAYGEDRARFTDIMNQKAEKLAKRFSDSFNEYINTFLKANGIKDKKSKWSDSGYVDVVLPLYVSIHPDFSSDKYERAVASLLHCSNSLFKKYTTSYARIIAGTKKGSFADRSMENFQTVCANSVMFDLISRNLSSVECHDTFKEVFADAPLNMNEYLSQKGISRYNEFVGDSFDESGQVIRYGVNHYINEWNQTHPDERMPKMHKLKKQILSIVEPSFRIRTINDETELFGTFDNIRTAEQRYAGMLESILENMNTADIYDKSGILVTSAERDSLANAITGEWSYFRRQIKEEEENRIREEYLQKKNRVKTKLTQKDNKQIEDALNKSIYSVADLNKMLGSDFGTIEEKLLDEYIRNKSKKESAYAQLVKTDFYDKKTIPAGDDVQRIQQYLDKVLSLTHIVRGLCADSQDPRTDFVFSDDVSSLEDDRVQIVTCYNLIRNFVTKKREKTAKEKQIQLCFGRPAHFEQVWNNKQEGKFGNVDAALLEYAGKYYYMVPAAKNEAKLNFPVTDEPQRGECYNYLATKKAIGFAKAFAKFYIKSPEAMEGFEKTEEPFEISVGNDTMIISRKVYEDYEAKTFRESEEAKNKLIDCAKEFLSKNLSYCIYDWSVLKEANDYVNYGEFCNEVDSIAFRVINRYVSKKLVDDAVERGNLYMFEISSLDMYKDSSRMKNIMALRFNQIMNGMFTGDKSIIINNAPQIRYRPVVIEKKDVHPVGSRLVNKNTTDGRTIPGDVYLELCAYYNGKKDSLSPEASLYNEKVSVKDSDRAHIKDKHYTEEKFLITFSYTANKNVASATSGYQLNEMVRKEIRENGCNIMAVIRGIDNLLYYAVVDENGNRIEAGDLNVVGDTDFYEKLTILGKQRYTDQKNWKHENKVADLKDTYLGQVCRKIASIAVKNNAVIVIDKINESTKRKNAAFDNNMYRKFENALVNSLTDYYDIGIRGDEPGSVKNPLQLTVKEDNGFQNGIIFYQFDTFTKNICMRTGFVNLLNTFEIKTVASKVAFLKKLSGIYYDNDINEFVFEFTWRNIGCILKDEELSLYDGMDKIWKVRTHFTRYMRNAEKNKYVEIDGTEVLKELIRKNHPDMIGGKIDVDRLTSEEVKKVFEIFTLYTNGYIPRMDDAESGYMSPACDWNNFGTIRYDEMTALQLAKKSSLMIGKVKSGKDWKDMNVSRVEWLNHVLKADW

SEQ ID NO: 1206 - protein, 371 aa, Unknown
  Description of Unknown: uncultivated organism sequence
  Category: MG61 effectors
  Description: MG61-42 effector
MSYITLCLPFNTNDSKAEKLFSTAWLFKTASHRMLTLAKQFPVLPATDIGWKNTFRKVIYEVISNRRYADGVIVLIRGVYESCRQLGIDFKDAELGDWLMFQQAEKEYPVRNITLRQGYEFHITTINYNGKPERITIKPTIPKNYKLLLEKIIEDKQKHTARIVVKDHGVRKDKLWVQGEVQLTIPLKFYYKYMVRFKRNYGRLYGGVDVNTDRINLAIVDKHGRLRDVKTFWFEDVSRKGYPRRRARVLIGMAVHEMLKYAYHHGVKTLFLENPDVLGKLKLLWIRNGRRLYKNYNWKVMTFRSSIVEIITIKAPLYAIKVDYVSPRGTTTSKQHDKLMRKYGLDRHTTSAYIIALKGMKRCTSIQNTTI

SEQ ID NO: 1207 - protein, 362 aa, Unknown
  Description of Unknown: uncultivated organism sequence
  Category: MG61 effectors
  Description: MG61-43 effector
MSPLYTIKLSFNEFGEKAKLLLSTAWLFKIACHKVLNKSKVLYENLVPSKIAWIKMFKDDAYSVIPNKRYSYGVVYLVYGVWESARKLGVDYRMVELSDWLMFQHYEREVSGNVIRVHGDGSALVTVYGYNGLKDRILIKAKPNKGQAQLLKAAVEENEKYMPKVVIRDYGVRDNTIYVRGEIHISLDYGFYAKHAQRFSEPKGNLIGGVDVNVDRINLAIVDEMGRLRDVKTFWFRETTARGYPRKRAWSIIGMRIHEMLKYAYHHGVKTIALENPDALGTLRLLWIRSGERRHENYNYKVALFRTSIIERIAMKALLYGMEVKYVDPKGTTSSREHNWIARAHGLDKHASSATLIALRSI

SEQ ID NO: 1208 - protein, 365 aa, Unknown
  Description of Unknown: uncultivated organism sequence
  Category: MG61 effectors
  Description: MG61-44 effector
MTYITLAFPFNVCCDVAKRFLSTAWLFKIAIHRLLSVAKQSPILPGTDIGWKNTFRRVAYEIIPNRRYADGVVTLVRSIYESCRQLGIDFKSVELSNWLMFQQSELEYPAKNITLKPSYEFHVTTVDYSKNTYRDVVKPIVPKSYKPLLEEILEERQKYTGRVVVKNYGIRKGNLWIRGEVQITVPIDFYYKHMVRCREPKGSLIGGIDVNVDRLNLAVIDERGNLRDSKTFWFSEATTRGFSRRSARSIIGAKIREMLSYAYHHSVKTLFLENPGVLGKLRLLWVKNGDRKHESYNYKVSVFRSSVTEMIAVKAPLYGIEAKYVDPKGTTSSKEHGEVAERCGLDRHVASAYLIALRGLRHQRI

SEQ ID NO: 1209 - protein, 374 aa, Unknown
  Description of Unknown: uncultivated organism sequence
  Category: MG61 effectors
  Description: MG61-45 effector
MKQINYITLRLPFHVTGEEARLIYWIAWLCKLCAHRLLNYVKENLLLADLSQYDFIKLGRKLCYDIIPNRRYVDGISTIVQASLQSAKALGADISKLELKPWLLFQSEAEPWARGNLNIQFKNYDVTKVLVFDNDKSSRKITIKPVIPKGYIKLVKTLVDKALKREVGYPARVYIRDYGDKLEYLYGELQVMVKYDFYIEVMKKYDKPLGNNIAGVDVNVDRLNLVVINRSGDIVWKYTTRFPHVTSRGFPRKRAWSIIGEKIHEILRNTYSHGASVIAVENPEIIGYLRYYWIRNGKRKTKNYNYKVSIFRNSMIERIIWKAPLYGLKVIPINPKGTTRSKDHEYVMRKYGLDRHVASAYLIALKARRNLQRP

SEQ ID NO: 1210 - protein, 372 aa, Unknown
  Description of Unknown: uncultivated organism sequence
  Category: MG61 effectors
  Description: MG61-46 effector
MYSQKLGKDIVITPNNSPITHVTIVGKLIISQPEDRMKLTRLAWSFKRVVEFMVREIISNRGVQEAVKRHHNVLPNYVYLESAYKHAKLIVEGCKRNNGNPRHVHVRKLFVISRGNRFDKGNRNIKLVPKGKFFEVHIKYPWGNSWLVCKAVFGEKYVPLLKELVILTERRVESYEAKIVFRRKRIELHVSIPLQLYLKYFSKTKPKGYGLLAGFDLNSDRINMVVIDENGRIITLRTEWFPEVTLHGYSRHKAKNTRLKALKKLLLHARRIGVDYVVFENLLTVKKNRRKRKLRSPHANRKKGKFAKKQLIIHGILMSLKLGLTPILINPKGTTHSKDHGEAMKRRGLDKHMASAYIIAYRDLKIIRNNEK

SEQ ID NO: 1211 - protein, 365 aa, Unknown
  Description of Unknown: uncultivated organism sequence
  Category: MG61 effectors
  Description: MG61-47 effector
MSYITLTLPFNISDSEAWRLLSTAWLFKIASHRMLSLAKQFPILPATDIGWKNTFRKIIYEVIPNRRYTDGVIVLVRGIYESCRQLGVNFKDVELGDWLMSQQAEKEYPVRNITLKQGYEFWITTVDYNGNSERIVIKPSIPKNYKLLLDRILEEKQKHTARVVIKDYGVRKNKLWIHGEIQLTIPLDFYHKYMTRYRRNYGKLYGGVDVNTDRINLAIVDEQGSLRDTYTFWFREVTARGYSRRKARSVIGMRVHEMLKYAYHHGVKTLFLENPEVLGKLKLLWIRNGKRLHKNYNWKVATFRSRILEMIAMKAPLYSIKVGYVDPKGTTNSKEHDEVMRKHRLDRHTASAYIIALRGLNHKFI

SEQ ID NO: 1212 - protein, 363 aa, Unknown
  Description of Unknown: uncultivated organism sequence
  Category: MG61 effectors
  Description: MG61-48 effector
MSVPRLSSVEELISHVTVIGKVIPETINDYMKLVRLAWSFKRVVDLMIREVINNAFMKDATKKLYQILPNYIYLESAYKHAKLIVEGCKFNNGNPKHVHVKKLFIVSRGNKYDKGNRNVKLIPDKGFFKALIKYPWDGSWIECRVLFGEKYIPLLKELLELTSKKKEGYGTRIVFRKSRIELHVSVPLHLYLKHFSAPRREGYGLVAGLDLNSDRANMVIIDSTARIVTMRTAWFPEVTLHGFPRDKARDVRLKKLRELLVFARRIGVDYIVFEDLFAVKKRSKVSSPSGNRKIVRFAKRQLLQHGLLMSLKLGLTPILVDPKGTTHSREHEEVMKKRGLDKHMASAYIIAYKGLKVIRNHEK

SEQ ID NO: 1213 - protein, 336 aa, Unknown
  Description of Unknown: uncultivated organism sequence
  Category: MG61 effectors
  Description: MG61-49 effector
MSYVTLVLPFNACCDEARKLLSTAWLFKVATHRMLSIAKQISALPATDIGWKSAFRKAVYEVIPNRRYTDGVITLVRSIYESCRQLGVDFKSVELGNWLMFQQSESEYPVRNITLKHGHEFHVTTISYNGSANRVIVKPTIPKNYRALLDKIIEEKQEHTARVVVKGFGVRKSVLWVHGEVHLTIPIEFYYGHVARYRKNGGRLYGGVDVNVDRINLTIVDEDGRLRDRKTFWFREVTARGCPRRRAWSAIGTRVHEMLSYAYHHGVKTIALENPNTLGALKLMWAKSGEKRHENYNYKVSIFRCKVVEMIAMKAPLYDIEVRCIDPRGDDPFKRT

SEQ ID NO: 1214 - protein, 376 aa, Unknown
  Description of Unknown: uncultivated organism sequence
  Category: MG61 effectors
  Description: MG61-50 effector
MSKSVAEYITLRLPFHVTGVDAKLIYWTAWLCKLCAHRLLEAIKLNPSLAYLSQYDFIKVGRRLCYDIIPNRRYVDGISTLIHASLQSAKALKVDITKLEPKHWLLFQSEAEPWAKGNLNIQFVDYDKVKVLVFDRDKSSRRIIIEPVIPKGYIRLVKALVDKALKKEIGYPARIYITDYGERLEHLYGEIQVMVKYNFYLEVMKRYDKPLGDNIAGVDVNVDRLNLVVINRDGDIVWKHTVRFPQITSRGCPRKRAWSIIGEAIHSILRNAYSHGASVVAVENPEVLGYLRYYWIKNGDRGTKNYNYRISIFRNSIIERIVWKAPLYGLHVVTVNPKGTTHSKDHEYVMRRYGLDRHTASAYLIALKTRRNLQRP

SEQ ID NO: 1215 - protein, 361 aa, Unknown
  Description of Unknown: uncultivated organism sequence
  Category: MG61 effectors
  Description: MG61-51 effector
MSTLRLSNVEELVPHVTVIGKLLPETPGDYMKLVRLAWSFRRAVELMIREVVNGTSMKDATKKVYYLLPNYVYLESAYKHAKLIIEGCRFNNGNPRHIHVRKLFIISRGNKYDKGNRNVEIIPSTKFFQVLIKYPWDGSWIECRAFFGEKYIPLLRELLELANQKREGYGARIVFREGRIELHISAPLFLYLKHFSLPERRGYGLLAGLDLNSDRINMVVIDSNGRIVAMKTAWFPELTLHGFPREKARDTRLKKLKELLSYARRIGVDYVAFENLFVMKKRGKVSSPSGNRKITRFAKKQLLQHGLLMTLKLGLSPILVDPKGTSHSREHKEVMKEKGLDRHMASAYIIAYRGLKAIRNH

SEQ ID NO: 1216 - protein, 355 aa, Unknown
  Description of Unknown: uncultivated organism sequence
  Category: MG61 effectors
  Description: MG61-52 effector
MSQFQISSTDASKLVTHVTIVGRLIPETDEDFVKLARLAHDFRKAVLYATRMIVKGIDANSILRELRSMLNKAYGDSAYKVAKAIVEGCKYSGGNPKHIKIRKLFIVSEGEASRLGNRNIRLESVDVVKIKYPYDSSWLTFKALFGEEYLQLVAELVELAKQKGVSYGARVVFRDGRIYLHLSVPLELYLKHFKKGEAREELIAGFDLNSDRVNMVIVDRFGRIRDVKTQWFTEVTSHGFPRNKAKTKRLEALAKLLRYAYHHNIGTVVFENLLAIKKRRYTSNSTANRKITRFAKRELLQHALVMAMKYGFKVKLVDPSGTTHSREHDEVMKRYGLDKHVASACLIALKELKQP

SEQ ID NO: 1217 - protein, 363 aa, Unknown
  Description of Unknown: uncultivated organism sequence
  Category: MG61 effectors
  Description: MG61-53 effector
MTYITLVFPFNVCCDVAERLLSTAWLFKIATHRLLNVVKHFPVLPATDIGWKNTFREIAYEIIPNRRYADGVVTLVRSIYESCRQFRIDLKSVELSNWLMFQQSELEHPARNITLKPGYEFHITTVDYNKNTYRDVVEPIIPKSYKPLLDKMLEERQKYTGRVAVKSYGIRKYNLWVRGEIQITIPTDFYYNHMTRYRKSKGSLIGGIDVNVDRLNLAIIDEKGNLRDCKTFWFSEAVARGFSRRSARSIIGAKIREMLSYAYHHNVKILFLENPEVLSKLKLLWVRNGDRKHENYNYKVSVFRSSVIEMIALKAPLYGIEAKYVNPKGTTNSEEHDEAMKRYGIDRHTASAYLIALRGLRNQ

SEQ ID NO: 1218 - protein, 374 aa, Unknown
  Description of Unknown: uncultivated organism sequence
  Category: MG61 effectors
  Description: MG61-54 effector
MNIVEYVTLRLPFHVAGEEARLVYWTAWLCKLCAHRLLSTVRQNPLLADLSQYDFIKIGRKLCYSIIPNRRYIDGISTLIHASLQSAKALGVEVTKLELKPWLIFQSEAEPWAKGNLNIQFTDYDKVRVLVFDRDKTSRKITIKPVIPEGYAKLVKALVDKALRKEIGYPARIYVRDYGDGLNHLYGELQIMVRYGFYLEVMKRYDKPLGSNIAGVDVNVDRINLVVINRAGDIVWKYTARFPEVMSRGCLRKKAWSIIGEAIHSVLKNAYSHGTSVIAVENPEIMGHLRYYWIRNGDRRTKNYNYKVSVFRNTVIERISWKAPLYGLHVIHINPRGTTHSEDHDYIMKRYGLDRHTASAYLIALKARRVLRRP

SEQ ID NO: 1219 - protein, 365 aa, Unknown
  Description of Unknown: uncultivated organism sequence
  Category: MG61 effectors
  Description: MG61-55 effector
MTYITLTFPFNVCCDVAKRFLSTAWLFKIATHRLLSIAKQSPVLPGTDIGWKSAFRGIAYEVIPNRRCADGVVTLVRSIYESCRQLRIDFKSVELSDWLMFQQSELEYPARNITLKPGYEFHITTVDYTKNTHRDVVKPTIPKSYKLLLDKMLEERQEYTGRVAIKSYGVEGGDLLVQGEVQITIPIDFYYKHVTRARANKGRLYSGVDVNVDRLNLAIVDGSGSLKDTHTLWFREVTARGFSKKSAGSIIGVKIREMLSYAYNHGVKTLFLENPDVLGKLKLLWVRSGDRMHENYNYRISVFRSSVIEMIALKAPLYGIEVKYVDPKGTTSSREHDEIVKRYGLDRHTASAYLIALRGLRHQRI

SEQ ID NO: 1220 - protein, 373 aa, Unknown
  Description of Unknown: uncultivated organism sequence
  Category: MG61 effectors
  Description: MG61-56 effector
MKVPRYITIRLPFHVDGNVASGIISTAWLSKVVAHRVLRIVKDNPLYLQLSETRFLKNLRNACYDVLPNRRYVDGVLKLVYSTLRSVQALGIDIRQIELKQWLLFQSDGEPQARGNLNIRLVEPYRVRILTFDYNKASEYVEFDVVLPKGWRKLVEELVERANRKEVGYPARIYVSDYGVGKNGLHVAGEVQIMAPCRLYQEVMKRYDTPRGDLVAGIDVNVERLDVAVVSPSGKLKLVKTFWLDGAVHMGVRRERAWSIIGEVIHKMLKWLYHSGVSTIVLENPEIIGYLRYYWIRNGERRGRKWNWKVSMFRSSIIERISWKAPLYAMEVRYVDPKGTTHSQDHDALMRRYGLDRHTASAYLIALKGLDRT

SEQ ID NO: 1221 - protein, 364 aa, Unknown
  Description of Unknown: uncultivated organism sequence
  Category: MG61 effectors
  Description: MG61-57 effector
MLHYQTNEVINAKTLISHVTIIGKLIPQTPNDFMKLVRLSYDFRKAVLYATRMISKGIKANEFLKELRGMLNKGYGDSAYKVAKSIVEGCRFNGGNPQHIKVEKLFIASEGETSRIGNRNVRLEATDRVKIKYPYDRTWLFFKVQFGKNYLPLVQEIVKLAKEKKTSYGAIIVFRDSRIYLHLSIPIDLYLKYFSKGSANGSLTAGFDLNADRINMVVVDGFGRIRDAKTEWFPEVTSHGFPRSKAKIKRLEALARLLDYAYHHNVGVVVFENLFIIKRRKFTKNSSANRKISRFTKKELLQYGIIMAMKYGFKVLLVNPKGTTHSKEHDEVMRKYGLDRHTASAYIIALRGMESHNLIRKAII

SEQ ID NO: 1222 - protein, 371 aa, Unknown
  Description of Unknown: uncultivated organism sequence
  Category: MG61 effectors
  Description: MG61-58 effector
MSYITLCLPFNVDGIEARKLLSIAWLFKIASHKMLSIAKQSPILPATDIGWKNTFRKTVYEVIPNRRYTDGVIVLIRGIYESCRQLGVNFKGVELGDWLMFQQAEKEYPVRNITLKQGHKFHITTIDYNGNPERITIKPTIPKNYKLLLEEIIEEKQKHTARVVVKDYGIRDSKLWVRGEIQLTIPLDFYYKHMTRYRRNYGRLYGGVDVNTDRINLAIVDKYGRLRDVKTLWYEDAPRKGYPRRKARVLISMAVHEMLKYAYYHGVKILSLENPNALGKLKLLWIKNGKRLHRNYNWKVMTFRSNIIEMVAMKAPLYSIKIEYVNPKGTTTSKEHDEVMWKYSLDRHTASAYLIALKGIERHTMIQKAII

SEQ ID NO: 1223 - protein, 349 aa, Unknown
  Description of Unknown: uncultivated organism sequence
  Category: MG61 effectors
  Description: MG61-59 effector
MRLVRLARDFRRAVLYATRMISKGIKVNDILKELRGMLNKAYGDSAYKVAKAIVEGCRFNGGEPQHVKIRRLFIVSEGEASRLGNRNVRIESTDLARIKYPYDKSWILLKVRFGKKYLPLIRELIELIKQRKVSFGARILFRDGKIYLHLSVPINLYLKYFSKGRAGGCLIAGFDLNSDRVNMVIIDRYGKIRDIKTGWFPEVTSHGYPRSKARAKRLEALAKLLRYAYHHNVGTVVFENLLTIKQRRCTGNPTANRKITKFAKRELLQYGIVMSMKYGFKTLLINPKGTTHSSEHNYIMRKHGLDKHTASAYLIALKGIESHMMIQKAVIYRFCPYTTTYTHSLVRSL

SEQ ID NO: 1224 - protein, 365 aa, Unknown
  Description of Unknown: uncultivated organism sequence
  Category: MG61 effectors
  Description: MG61-60 effector
MKYITLVMPFNVDGTKAKRLLSTAWLFKIASHRMLSLAKQFPILPTTDIGWKNAFRKIIYEIIPNRRYTDGVIVLVRSIYESCRQLGIDFKEVELGDWLMFQQVEKEYPVRNITLKQNYGFRIITIDYKYNTEKITVKPTISNNYRLILDKILEEKQKHTARIVVKDYGARREKVWIHGEIQLIVPLNFYYKYMTRYRKNYGKFYGGVDVNTDRINLVIVDKKGSLRDAYTFWFREITSRGFPRKKARTIIGMKIHEMLKYAYHHGVKILFLENPVILGKLKLLWIKNGMRLSKNYNWKVMTFRSSVTKIITMKAPLYNIRTKYVNPKGTTHSKEHDNIMKKYRLDKHMASAYLIALKGLDYGSV

SEQ ID NO: 1225 - protein, 373 aa, Unknown
  Description of Unknown: uncultivated organism sequence
  Category: MG61 effectors
  Description: MG61-61 effector
MNETYLTLRLPFNLCCDEARLLLSTARLFRHTALHLHSLILKENPRITSLIALKRMYRRRLQEILPNRRYVDGAITLVYSIYESAQALGVSFSDIEFKSWLLFQQSEKEHPCRNITLQKDYSFRITTINYQGVGKRISLKPTIPKNYKQTLGKIIGEKQPYVARIVLKGFGERKNMLWVHGEIHLSIPYRFYLEHFKRYKRNYGKLLGGVDVNVDRINLAIIDRYGRLRDVKTFWFEEASWKGCPRQRAWSIIGIAVHNMLRYAYHHGVKVLFLENPETLGYLKTLWIKKGERRSNNYNYRVQFFRNRIVERITMKTPLYSINIEYVNPKGTTHSREHDEVMRRYGLDRHTASAYLIALRGIEKHTIIQKAII

SEQ ID NO: 1226 - protein, 371 aa, Unknown
  Description of Unknown: uncultivated organism sequence
  Category: MG61 effectors
  Description: MG61-62 effector
MSYVTVTASFNASGDCAKLLLSTAWLFKIATHRVLAYAKSTPTLPGSKIGWKNTFRSVAYEVIPNRRYADSACTLVMGIYESVRRLGIDFREVELGDWLMFQQSEKEFPPRNITLKSEDEAWVTAFGYDGESRRLRLRISASGSFRRLLEAILREKQPYNPRITLKSWNVRGGELYVRGELQVSVPIDFYYRHLARCKTNSGRLYGGVDVNSDRINLAVVDGSGILRDARTIWFREVTARGYPRHRARTVIGMGVHEMLRYAYHHGVKTLFLEDPKVLGRLRLLWIRDGKRLHKNYNWRVSTFRVSIIEAIAVKAPLYSIRVEYIDPKGTTRSEEHDELMRRYGLDRHMASAYLIALRGMERYTTIQKATV

SEQ ID NO: 1227 - protein, 367 aa, Unknown
  Description of Unknown: uncultivated organism sequence
  Category: MG61 effectors
  Description: MG61-63 effector
MVYGLSYVTITAGFNARGEDAKLLLSTAWLFKIATHRVLGLAKSMPLLPASKISWKNTFREVAYEVIPNRRYADGVVVLVMGIYESCRQQGVDFREVELSNWLMFQQSEKEYPPRSITLKSVDEVWVTVLSYNGESSRIKLRVTTSGVFRKLIEMLLKEKQEYNPRVYIKTWNTRSGELYLRGELQIAVPLDFYYKHMVRRRENRGRLYAGVDVNVDRLNLAIVDERGELRDTKTFWFEEASRKGVSRRRARSILGMVVHEMLRYAYHHGVRTLFLENPEILGKLKLLWVRSGDRRGGNYNWRVNIFRSEVVEMIAVKAPLYAIDVKYVAPRGTTNSREHSEIMKKYRLDRHTSSAYLIALKGLKQT

SEQ ID NO: 1228 - protein, 361 aa, Unknown
  Description of Unknown: uncultivated organism sequence
  Category: MG61 effectors
  Description: MG61-64 effector
MNYITIQLPFNMNGKVAGELLSTAWLFRIAVHRVLTIAKQQEALPRSRIGWERAFHRIAYGATLQSDYADGAVVLVMGVYKSCRRLGIDFRRVELSDWLMFQPSKLSRKVGSIALKPNYEFHVTTVGYDGSYDRVVVRPGVSGAFRLVLDSVLDYGVEYMGRIVVRDYGVRGGQLWVRGGAHLTIPLLAYYKVMTRYLKNNGSLQGGVDVNVDRINLAIIDENGELRDTRTFWYREVASRGFPRGRAWSIIGMRIHELLNYARNNGVSVLYLENPGVIGRLRLMWVRNGDRGHENYNYKVSAFRSTIIEEIAMKAPLYSISVGYVNPRGTTSSKAHDELMRRYGLDRHTASAYLIALMGTR

SEQ ID NO: 1229 - protein, 373 aa, Unknown
  Description of Unknown: uncultivated organism sequence
  Category: MG61 effectors
  Description: MG61-65 effector
MPRYVTIGLDFHVDGEDAKAILSTAWLSKLVAHRVLNLVKENELLAGLSEYMFLKVMRRKCYSILPNRRYVDGMLKLIHSIIKSAKALGVDIESIELKQWLLFQSDGERGYARGNMNIKLIDTHHARVLTLDYTGKTRYEELKLTTPKGWNKLVESLIERASRGEIGYPVRLVIRDYGIGKHGLHVHGEVQVMAPYTLYLEVMRRYEEPRGKNIAGIDVNVGRLDAVVVDEHGNLLSYRTFWIKNATFMGVRRRRSRSLIGEQIHALLKWLYSQGVSIIGLENPEVIGYLRYYWVRSGERRGNMWNWKISMFRNSIIERLTWKAPLYSMKTIYVNPRNTSKEGKRIGKKLGLDRHLGSAYIIARRTLKNLQRP

SEQ ID NO: 1230 - protein, 376 aa, Unknown
  Description of Unknown: uncultivated organism sequence
  Category: MG61 effectors
  Description: MG61-66 effector
MNKSEVEYITLRLPFHAIGEYARLVYWTAWLCKLCAHRLLDMVKQNPLLANLSQYNFIKIGRKLCYDIIPNRRYIDGISTLIHASLQSAKALKVDIAKLELKPWLLFQSEAEPWAKGNLNIQFTSYNTVRVLVFEKDKSTRKITIKPVIPKGYTRLVQTLVDKALRKQIGYPARVYITDYGDKVEHLYGEIQVMVKHDFYLEVMKRYEKPLGNNIAGVDVNADRLNLVVINRNGDIVWRYTARFPQATSRGYPRKSAWSVIGEAIHSILNNAYSHGASVIAVENPEIIGYLRYYWVRNGERRTKNYNYKVTIFRNSIIEKIIWKSPLYGLQVVTVNPKGTTHSEDHEYVMRRYGLDKHTASAYLIALRARRNLHRP

SEQ ID NO: 1231 - protein, 375 aa, Unknown
  Description of Unknown: uncultivated organism sequence
  Category: MG61 effectors
  Description: MG61-67 effector
MGLPRYVTVALDFHVDGKEAEAVLSTAWLSKLVAHRVLNLVKKNELLVDLSEYRFLESLRSKCYNILPNRRYVDGVLKLVHSTLKSAKALGVDIKNIELKQWLLFQSDGERGYARGNMNIRLLDPNTVRVLTIGYSKEAKYVELKVSTPKGWRRLIETLVGRALNGQVGYPARVVVKDYGVGKNGLHVHGEVQAMVPYKLYLEVMRRYSRPRGSNIAGIDVNVERLDAVTIDVCGNILSYKTFWIKNATYMGIKRKRAWSLIGEQIHALLKWLYSQGTSIIGLENPEVIGYLRYYWIRNGERKGGKWNWKVSMFRSSIIERITWKTLLYSMKTTYINPRNTSKEGEKIGKKLGLDRHLGSAYIIAKRTLKRLQRP

SEQ ID NO: 1232 - protein, 360 aa, Unknown
  Description of Unknown: uncultivated organism sequence
  Category: MG61 effectors
  Description: MG61-68 effector
MSQYQTSSSVTGASTLIEYVTIAGKLIPISNEDYVKLARLAWSFRRAVQVATRMVVKGMDSNDVLKELRRMLNKAYADSAFKLAKAIVKGCITNGGNTLHVEIRKLFIISEGESDRCGNRNVRLEDTALVKVRYPYDGSWIILRAEFGEEYLSLLRELVELARQKRASYNAGIAFRDGGIYIRISVPIQLYLKHFKKGDALGELVAGFDVNSDRVNLAIIDKYGRLVDVRAEWFPEATSPGFPREKARELRVRALAKLLRYCYTHGVGTVVFENLYDVRKRRFTKSKTANRKISRFAKRELLHYAIVMSLKYGFKVLLADPKGTTSSAEHGRFMMKHGLDRHTASAYLIALRGLAHQIIK

SEQ ID NO: 1233 - protein, 373 aa, Unknown
  Description of Unknown: uncultivated organism sequence
  Category: MG61 effectors
  Description: MG61-69 effector
MNETYLTLRLPFNACDVEAGMLLSTAHLFRQVVLHLHNLILKENPRITSLIALKRMYRKRLQEILPNRRYVDGAITLVYSIYESAQALGVPFTDIEFKDWLLFQQSEKEYPCRNVTLQRDYSFRITTINYQGESKKILLKPTISRSYRQVLDKIIEEEQPYVARIVLRGFGERKGILWVHGEIHLSIPYKFYLENYRRYERNYGKLFGGVDVNVDRVNLAIVDRYGRLRDIKTFWFEEASWKGCPRQRAWSIIGMAIHDMLRYAYHHRVKVLFLENPETLGYLKTLWIKKGERRSNNYNYRVQIFRNRIIERITMKAPLYAINIEYVDPKGTTLSKEHDEVMRKYGLDRHTASAYIIALRGIERNTMIQKATV

SEQ ID NO: 1234 - protein, 363 aa, Unknown
  Description of Unknown: uncultivated organism sequence
  Category: MG61 effectors
  Description: MG61-70 effector
MSFITLRFPFNANGGVARELLSTAWWFKVATHRVLSLAKRQQVLPGTKIGWINTFRGIAYGIVPNRRYADGVVTLVMGVYESCRALGVDFRSVELSGRLMFQQSELEYPNRSITLKPNHEFHITAIRFNGLIGRVVIKPTIPKIYKALLDATITEHVGYMGRVVIDGVGVRNNQLWVHGEIHMTVPLDIYYEHMARHKKNSGKLFGGVDVNTDRVNLAIVDENGELIDHKTFWFSEVIARGFPKHSAWSLIGMRIHELLNYAYHHGVKTLFLENPEVLGRLKLVWIKRGDRGRENYNHKVATFRSSIIERIAIKAPLYSIRLGYVNPRGTTNSIEHDELMRKYGLDRHTTSAHLIALRGLKHQ

SEQ ID NO: 1235 - protein, 363 aa, Unknown
  Description of Unknown: uncultivated organism sequence
  Category: MG61 effectors
  Description: MG61-71 effector
MTYITLVFPFNVCCDVAERLLSTAWLFKIATHRLLNVVKHFPVLPATDIGWKNTFREIAYEIIPNRRYADGVVTLVRSIYESCRQFRIDLKSVELSNWLMFQQSELEYPARNITLKSGLEFHITTVDYNKNTYRDVVEPIIPKSYEPLLDKMLEERQKYTGRVAVKSYGIRKYNLWVRGEIQITIPTDFYYNHMTRYRESKGSLIGGIDVNVDRLNLAIIDEKGNLRDCKTFWFSEAVARGFSRRNTRSIIGAKIREMLSYAYHHNVKILFLENPEVLSKLKLLWVRNSDRKHENYNYKVSVFRSSVIEMIALKAPLYGIEAKYVNPKGTTNSEEHDEAMKRYGIDRHTASAYLIALRGLRNQ

SEQ ID NO: 1236 - protein, 379 aa, Unknown
  Description of Unknown: uncultivated organism sequence
  Category: MG61 effectors
  Description: MG61-72 effector
MVKQVSSPRYITVSLDFHSDVGQAKVLLSTAWLSKVVAHRVLALVKENPVLSDLSEYSFLKVLRSKCYDLLPNRRYVDGVLKLIYSTLKSGKALGVDIGNIELKQWLLFQSDAERGYAKGNMNIRLSDLHHVRVLTVDYSGNTRYVELEVSTPKGWGKLVENLIDKASRGVVGYPARVVVEDYGIGKSGLHVHGKVQVMVPYDLYLDVMKKYNKPRGNNIAGVDVNVERLDAVVIDEHGNLISYKTFWLKNATFMGVKRKRAWSLIGEQVHALLKWLYSQGVSVIGLENPEIIGYLKYYWIRSGERKGNKWNWKVSMFRNSIIERISWKSALYSLKVVYVNPRNTSREGEKVGEKLGLDKHLGSAYTIAKRALKNLQKP

SEQ ID NO: 1237 - protein, 393 aa, Unknown
  Description of Unknown: uncultivated organism sequence
  Category: MG61 effectors
  Description: MG61-73 effector
MQDQPLYTVKLTFNVNGEKAKKILSTARLFKMACHRVLRKSKELRNTLIPSKVAWIKMFKNHAYELIPNKRYSYGAVYLIYGIWESARKLNVDYNNIELSDWLLFQHYEREVNGNVIRVYEDDSALITVYYYGGSKDRILVKAKPNKCQVELLRKIIESGEKYMPKLIIRDYGVRNAKLYVRGEIHVAVSYDFYLKYMKRCNEPKGGLIGGVDVNSDRINLAIIDEDGKLRDKKTFWFTEVTARGYPRSRAWSIIGMKVHKLLKYAYHHGVLSIALENPEVIGRLRLAWIRNGKRLHENYNWKVSTFRNRIIEMIAMKAPLYSIKTIYVDPKGTTHSKEHNKVMKKYGLDRHTASAYMMAQKYLEVIRNHLKHQHLGNSLHPLLKLLQQLILS

SEQ ID NO: 1238 - protein, 374 aa, Unknown
  Description of Unknown: uncultivated organism sequence
  Category: MG61 effectors
  Description: MG61-74 effector
MKQIEYITLRLPFHVTGGNAKLIYWTAWLCKICAHRLLNIIKENPLLADLSQYDFIKFSRRLCYDIIPNRRYIDGISTLLHASLQSAKALKVDITKLELKPWLLFQSEAEPWAKGNLNIQFIDYNKVRVLVFDKDKSSRKITMKPVIPKGYAKLTRSLVEKALRKEIGYPARIYITDYGGGLEHLYGEIQVMVKYDFYLEAMKRYDKPPGNNIAGIDVNVDRLNLVVINRSGDIVWRYTARFPQVTSRGYKRKRAWSIIGERIHEILRNAYSHGASVIAVENPEIIGYLRYYWIRNGERKTKNYNYKVSIFRNSIIERIMWKAALYGLQVITVNPKGTTHSNNHEYVMRKCGLDEHTASAYLIALRARRNLQRP

SEQ ID NO: 1239 - protein, 381 aa, Unknown
  Description of Unknown: uncultivated organism sequence
  Category: MG61 effectors
  Description: MG61-75 effector
MSLPEYLTVSVPFTAKDEDAKFIWITAWLSKLCAHRLLDDVKSNDVLIDLSQANFLKYARKRCYDILPNRRYVDGVATLIHSTLKSARKLGVNIKSIELKQWLMFQSEAEKEKKGNLNIRLVSIDKAEVLVFDHRKEPRKIVVELKTPKGYEKTLKTLIEKALSKEIGYPARVVIKEYNFYPNNLHLYCSLQVMIPYNLYLKTMRKYDKPLGSHVAGVDVNVDRLNLAIVDRYGRLRDVRTFWFREITSRGYKKKPAWTKIHQAIHDMLDYAYHHGVSVIALENPEVIGYLRYYWIRNGDRKSKNYNYKKSIFRNKIIETVTCKAPLYSLKTIYVNPRGTTHSKEHDEIMKRYGLDRHTASAYLIALRGIERHTMIQKATV

SEQ ID NO: 1240 - protein, 342 aa, Unknown
  Description of Unknown: uncultivated organism sequence
  Category: MG61 effectors
  Description: MG61-76 effector
MVAHRVLRIVRENPLYLQLSEARFLKNLRSACYDILPNKRYVDGVLKLVYSTLRSVQALKIDVKQIELKQWLLFQSDGEPYARGNLNIRLLEPWRVRVLTFGYDHSSEYVELEVVVPKGWRKLIEVLIEKASRKEVGYPARIYISDYGMGKNGLHIAGELQVMVPYRLYCEVMKRFDSPLSDLVAGIDVNVERLDVAVVSPNGKLKLVKTFWLDGAIHMGVRKKRAWSIIGEIIHKMLRWLYHSGVSTIYLENPEIIGYLRYYWVRNGERKGRKWNWKVSMFRNSIIERITWKAPLYALNVKYVDPRGTTRSREHDEIMKKFGLDRHLASAYLIALKGLELP

SEQ ID NO: 1241 - protein, 363 aa, Unknown
  Description of Unknown: uncultivated organism sequence
  Category: MG61 effectors
  Description: MG61-77 effector
MSYVTVTAGFNASSGEAELLLSTAWLFKLATHRVLSYAKPMPALPASKIAWKNTFRRIAYEVISNRRYADSATVLVMGIYESCRQLGVDFREVELGDWLMFQQSEKEYPPRNITLKYIDEAWVTVLGYDGRRERIKLKISVSGAFRRLLEAILGEKQPYNPRIVLKSWNTRGGKLYVKGELHLAIPLDFYYRHMKRFEGNYGKLYGGVDVNADRVNLAIVDERGRLRDSYTFWFREATARGYPKRRARSVIGMRVHEMLRYAYHHGVKTLFIENSDVLGKLKLLWIRNGRRLHKNYNWKVSIFRSSIIEMIALKSPLYSIRVGYVNPGGTTHSKEHDEIMRKYRLDRHTASAYLIALKGLKQP

SEQ ID NO: 1242 - protein, 365 aa, Unknown
  Description of Unknown: uncultivated organism sequence
  Category: MG61 effectors
  Description: MG61-78 effector
MDYITIKLPFNANDGVAGELLSTAWLFKTVAHRVLAVAKQMQVLPGTKVGWVNMFRQIAYGIIPNRRYADSAVTLVMGVYESCRSLGVDFRSVELSNWLMFQQSELEYPNRNITLKPNYEFHVTTIRYNGTTSRVVVKPTIPRNHKELLDAILTEHIKYMGRVVVRDYGVRGSQLWVHGEIQVTVPMDVYYEHMARHRRNAGKLIGGADVNTDRINLAIIDEDGELIDHKTFWFSETSRKGFSRHSAWSIIGMRIHELLDYAYRHGVKTLFLENPEILGRLKLMWAKSGDRGHENYNHKVMTFRSSIIEKIAMKAPLYGIEVKYVNPRGTTNSTEHDETMKKHGLDRHTASAYLTALRGLKHQQK

SEQ ID NO: 1243 - protein, 371 aa, Unknown
  Description of Unknown: uncultivated organism sequence
  Category: MG61 effectors
  Description: MG61-79 effector
MSYITLCLPFNIESSEAERLFSTAWLFKIASHRMLSLTKQFPILPATDIGWKNTFRKIIYEVIPNRRYTDGVIVLVRGVYESCRQLGVDFKEVELGDWLMFQQAEKEYPVRNITLKQGYEFYVTTIDYNGSSERIVIKPTIPKNYKLLLDRILEYRQKHTARVVIKDFGIRKDKLWIHGEAQLTIPLDFYYKYTVRFKRNYGKLYGGVDVNTDRINLTIVDKYGRLRDTKTFWFEDVSRKGYSKRKARVLIGMAVHEMLKYAYHHGVKTLFLENPEVLGKLKLLWIRNGRRLYKNYNWKVTTFRSSIVEMIAIKAPLYAIKVDYVSPRGTTNSKEHDKLMRKYSLDKHTVSAYLIALKGIKRYTMIQKATD

SEQ ID NO: 1244 - protein, 363 aa, Unknown
  Description of Unknown: uncultivated organism sequence
  Category: MG61 effectors
  Description: MG61-80 effector
MSSLKLSNVDKLMPHVTIIGKLVPGTSDDYMKLVRLAWSFRRAVELMIREVMNGASMKDVTKKLYQILPNYIYLESAYKHAKLIVEGCKFNNGVPGHIHIRKLFIVSRGNKYDKGNRNVKIIPNTKFFRVLIKYPWDSSWIECRALFDEKYIPLLRELLELAYQRKEGYSARIVFREGRIELHISEPLYLYLKHFSLPKRRGYGLVAGLDLNSDRINMVVIDSDGRIAAMKTAWFPELTLHGFPREKARDTRLKKLKELLSYARRIGVDYVAFENLFVVKKRSKVSSPSGNRKITRFAKKQILQHGLLMTLKLCLTPVLVDPKGTTHSREHKEVMKKRGLDRHMASAYLIAIKGLKVIRNHEK

SEQ ID NO: 1245 - protein, 381 aa, Unknown
  Description of Unknown: uncultivated organism sequence
  Category: MG61 effectors
  Description: MG61-81 effector
MSLPEYITIDIPFTATGEEAKLIWCTAWFSKLCAHRLLSDVKRNEVVIDLSQISFLKYARKRCYDILPNRRYIDGVATLIHSTLRSARKLGVNIKSIELRQWLLFQSEAEKEKKGNLNIRLTTINKAELLVINHKKEPKKIVIDLRIPKGYRKTLETLIKKALNREIGYPARVVIKEYNFYPNNLHLYCSLQVMIPYNLYLETMRRYDKPLGDHIAGIDVNVDRLNLAIVDKYGRLKDVKTFWFREITNRGYRRKPAWTKVHQAIHDMLDYAYNHGVSLVALENPKVIGYLRYYWIKNGDRKSRNYNYRKSIFRNKIIEAVTYKAPLYSLKTIYVNPRGTTKSREHDKVMRRYGLDRHTASAYLIALRGIKRHTMIQKAIT

SEQ ID NO: 1246 - protein, 312 aa, Unknown
  Description of Unknown: uncultivated organism sequence
  Category: MG61 effectors
  Description: MG61-82 effector
MVENPLYTIKLSFNASGDRAKKILSTAWLFKLACHRVLSRSKELLNALIPSKIAWVKMFYSNARDLIPNKRYAYGAVYLVYGIWESSRRLKVDYRCVELSDWLMFQHYDREVDGNVIKVLEDGSALVTTYSYDSSKDRVLVKTKPNKGYGELLKLVVESKEKYMPRVVVRGYNIRNGKPYVSGEIQVTIGYDFYLKHMTRYREPKGGLIGGVDVNTDRINLAVIDEKGNLRDCKTFWFSEAVTRGYPRRKAWSVIGMKIHEMLKYAYNRGVSIIALENPEVLSYLKLAWIRNGDRIHENYNYKKTIFRNSIT

SEQ ID NO: 1247 - protein, 371 aa, Unknown
  Description of Unknown: uncultivated organism sequence
  Category: MG61 effectors
  Description: MG61-83 effector
MSYITITAGFNASDNEAKMLLSTAWLFKLATHRVFSYAKATPILPASKVGWKNMFRKVAYKIIPNRRYADSIVILVMGIYESCRRLGIDFQVVELGYWLIFQQSEKEYPPRSITLKSVNEAWVTVFDYHGDTNRLRFRVSTSKKYKELLKALLAERQPYNPRIVLKQQNVRGGKLYVKGELHVSIPLDFYYRHMVRFKGSGGSLCGGVDVNADRINLAIVDRYGRLRDVRTFWFEEVSRKGCPGRRARAITGMRVHEMLKYAYHHGVKTLFLENPNDLGKLRLLWIRSGKRLHRNYNWKVSVFRSSVIEAIAVKAPLYSIRVIYVNPRGTTCSREHDKIMRIHGLDRHSASAYLIALKGIKRHTMIQKDII

SEQ ID NO: 1248 - protein, 363 aa, Unknown
  Description of Unknown: uncultivated organism sequence
  Category: MG61 effectors
  Description: MG61-84 effector
MSYVTLSLPFNIGGAEARRLLSTAWLFKIAAHRMLDMAKQTAALPATDIGWKNTFRKTVYGVIPNRRYTDGVIALVRGIYESCRRLGVDFRTVDLGDWLMFQQVEKEFPARNITLKRGYESWVTTIGYGGDSERVAIRPSVPKSYRLLLDRILEERQRYTARVAIRDYGVRKNMLWIRGEVQLTIPIDFYYRHMARFRKNYGRLYGGVDVNADRINLAIVDESGRLRDSYTFWFREVTARGYPRRRARSVIGMRIHEMLRYAYHHGVKTLFLENPDVLGKLKMMWIRNGRRLHRNYNWKVATFRSSVIEMIAMKAPLYAIRVRYVDPRGTTHSEKHDKIMKKHGLDRHTASAYLIALKGLELP

SEQ ID NO: 1249 - protein, 365 aa, Unknown
  Description of Unknown: uncultivated organism sequence
  Category: MG61 effectors
  Description: MG61-85 effector
MNYVTLVLPFNAGGDTTKRLLSTAWLFKTAVHRVLDVAKQSPVLPGTDIGWKSAFRSLAYSVIPNRRYADGAVTLVRSIYESCRQLGVDFKSVELSDRLMFQQSELEYPARNITLKPGYEVHVTTISYDRESYRDVIKLVAPKNYSTLLSKIIEERQEYSGRVVVKGYGVRDNTLWVRGEVQITIPVDFYYKHAARYREPKGDLVGGVDVNADRINLVVVDEKGNLRDYKTFWFEKTTARGYSRRRTWSVIGMRIHEMLEYAYRHGVSTIVLENPEVLSKLKLLWIRRGDRRHENYNYKVSIFRSSIIEMVALKAPLYGLEVEYVNPRGTTNSVEHDMLMKEHGLDKHTASAYLIALRALAHQST

SEQ ID NO: 1250 - protein, 358 aa, Unknown
  Description of Unknown: uncultivated organism sequence
  Category: MG61 effectors
  Description: MG61-86 effector
MYVSQYQTSDIVDASGLVTHVTIIGKLVPLTSVDYMKLVRLAHDFRRAVQVATRMIARGVSVNDILREVRSMLNKAYGDSAYRVAKAIVEGCRFHNCDPRRIEVMKLFIVSVGDASRLGNRNVRLESTDTVRIKYPYDGSWLTFRACFGEEYLPLVRELVELARQRKISYGARVVFRGGRVYLHLSIPTWLYLRHFSRGVARGSLIAGFDLNSDRVNMVIIDGFGRIRDMRTEWFPEVTSHGYPRSKARARRLEALARLLRYAYHHGVGTVVFENLLVIKRRRYTRSGTANRKITRFAKRELLQHGVIIAMKYGFKVLLVDPKGTTNSREHDEVMRKYGLDRHMASAYLIATKALKQQ

SEQ ID NO: 1251 - protein, 376 aa, Unknown
  Description of Unknown: uncultivated organism sequence
  Category: MG61 effectors
  Description: MG61-87 effector
MSKSVAEYITLRLPFHVTGVDAKLIYWTAWLCKLCAHGLLEAIKLNPSLAYLSQYDFIKVGRRLCYDIIPNRRYVDGISTLIHASLQSAKALKVDITKLEPKHWLLFQSEAEPWAKGNLNIQFVDYDKVKVLVFDRDKSSRRIIIEPVIPKGYIRLVKALVDKALKKEIGYPARIYITDYGERLEHLYGEIQVMVKYNFYLEVMKRYDKPLGDNIAGVDVNVDRLNLVVINRDGDIVWKHTVRFPQITSRGCPRKRAWSIIGEAIHSILRNAYSHGASVVAVENPEVLGYLRYYWIKNGDRGTKNYNYRISIFRNSIIERIVWKAPLYGLHVVTVNPKGTTHSKDHEYVMRRYGLDRHTASAYLIALKTRRNLQRP

SEQ ID NO: 1252 - protein, 364 aa, Unknown
  Description of Unknown: uncultivated organism sequence
  Category: MG61 effectors
  Description: MG61-88 effector
MNEQPLYTVKLTFNTSGKKARMLLSTAWLFRIACHRVLSRSKQLKNMLVSSKIAWIKIFKNYAYEVIPNKRYSYGAVYLVYGIWESARELGVDYSSVELSDWLMFQHYEREVDGNVIRALEGGSTLITVYGYDGSKDRILVRAKPNKGQIELLGKVVKLKEKYMPKVVILDYGVRNNKLYVRGEIHITISYDFYLKHARRYDESKGNLIGGVDVNTDRINLAIVDRDGRLKDVKTFWFPEVTARGYPRRRAWSVIGEKVHELLKYAYHHGVSTIVLENPEVIGRLRLAWIKNGERLHRNYNWKVSVFRNKIIKMIAMKAPIYGLCVSYVNPKNTTHSKEHDDIMTKYGLDRHTASAYIIALKSI

SEQ ID NO: 1253 - protein, 363 aa, Unknown
  Description of Unknown: uncultivated organism sequence
  Category: MG61 effectors
  Description: MG61-89 effector
MSYITIRLPFNVNGGVAGELLSTAWLFRIAAHRVLGITKQMQVLPGNKIGWVSMFRKVAYGVIPNERYADGVITLVMSIYESCRALDVDFRGVELSDWLMFQQSSLEYPSRNITLKPNHEFHITTIRYDGSIGRIVVRPTIPRNYKGLLDVVLAGRVRYMGRVVVRDYGVRNSRLWVHGEIHMTVPLDIYYEHMVRHKKNSGKLIGGIDVNTDRLNLAIIDERGDLRDYKTFWFSETSRKGFSRRRAWSIIGMRIHEMLDYAYHHGVKTLFLENPEVLGRLKLMWIRNGNRGHENYNHKVAIFRSSIIERIALKAPLYGIETKYVNPRGTTNSVEHDELMRKHGLDRHTTSAHLIALRGLKHQ

SEQ ID NO: 1254 - protein, 356 aa, Unknown
  Description of Unknown: uncultivated organism sequence
  Category: MG61 effectors
  Description: MG61-90 effector
MELPESVTIVGRIEFPDKKSYLELGKLCYLFKKNLQKAVKMYARGIRRDIIIKVVTKELNLGYADTIYKLARFIVEGCMFNNGEPFKIRIRKVFLASRGFSSNKGNRNIRLISTSEVLVRTPDRKWIKLYVKFGKKYLPLVKELVDLALKKKISYFARIVFRDGKAYLHISIPIQLYLKHFRLGLARGKLIAGFDINSDRINMVVIDENGCIRDVKNKHFPEVVSHGFPSNKARYLRLNAIAELLDYAHHHGVKYICFENLDVIKKKKFTKNKKANRKISKFAKREILTHAVIRALRYGFRILFVNPKGSSKEARKIHKKLGLDIHTASAYIIAIRGLKILKENESVENNEKIKLW

SEQ ID NO: 1255 - protein, 370 aa, Unknown
  Description of Unknown: uncultivated organism sequence
  Category: MG61 effectors
  Description: MG61-91 effector
MSYVTLVLPFNAGGDVAKRLLSTAWFFKIAVHRVFGAAKQSPALPGTDIGWKSTFRSLAYNVIPNRRYADGAVVLVRGIYESCRQLGVDFKSVELSDWLMFQQSELEYPARNITLKPGYEVHVTTISYDRESYRDAIKPSIPKRLAALLSKILEERQEYTSRVVVKGYGVRGNTLWVHGEVQITIPVDFCYKYMARYKEHKGSLIGGVDVNVDRINLAIVDEEGNLRDHKTLWFAEAVARGYPRRRARSIIGMRVHEMLEYAYHHGVSTIALENPEVLGRLKLLWVWVKRGDRKHENYNYKKSVFKSSVIEMITLKAPLYGIKVKYVNPRGTTNSTEHDKFMKEHGLDRHTASAYLIALRGLAHQIKQMK

SEQ ID NO: 1256 - protein, 371 aa, Unknown
  Description of Unknown: uncultivated organism sequence
  Category: MG61 effectors
  Description: MG61-92 effector
MSYMTLTLPFNVGGVEARKLLSTAWLFKTATHRMLYLARQSPILPATDIGWKNTFRKTIYEAIPNRRYVDGVITIVRGIYESCRQLGVGFKEVELGDWLMFQQSEKEYPVRNITLKDDYSFHITTIGYRGEKDRIIIKPSIPKNYRLLLDRILEEKEKHTARVVVKDYGVRKNKIWVHGEIQLTIPIDFYYMHMSRYKRNYGRLYGGVDVNVDRINLAIVDRYGRLRDVKTFWFEEASRKGYPRRRARSIIGMRIHEMLRYAYHHGVKTVFLENPNVLGRLKLFWINNGKRLHRNYNWKVSIFRSRIIEIIGMKTPLYATKTEYIGPRGTTKSKEHDEITRRYGLDRHSASAYIIALRGIKRPDLIQKATI

SEQ ID NO: 1257 - protein, 377 aa, Unknown
  Description of Unknown: uncultivated organism sequence
  Category: MG61 effectors
  Description: MG61-93 effector
MAGEVREPEVTHVTVTGRITPLNSEDHVKLCYLAYRFRKNLVRAVKMYARGVDKQVIVKEITRELNLGYADTIYKMAKLIVEGARGNGSKPLKIKVRKLFIASRGFSANKGNRNIRLESTNTLYVNIPREGWVKFKVSFGEKYIPLVKELIELAKSRKYSYGARIVFRNGRIYLHLSVPVELYLKYFGKGEARGSLIAGFDLNSDRVNMVIVDKSGVIRDARTEWFPEVTSHGFPRNRAKVARLQALSKLIEYAYHHGVGVAVFEDLDRIKRRRFTCSPVANRKMSWFPKRKLLGHGVVMALKHGFNVYLVDPSYTSVVGGYLSRELGLDKHTASAYMLTAKYLGLDLKSLKVTQITRKPKTKQHTDSPRLLYLAVI

SEQ ID NO: 1258 - protein, 373 aa, Unknown
  Description of Unknown: uncultivated organism sequence
  Category: MG61 effectors
  Description: MG61-94 effector
MNETYLTLRLPFNACDVEAGMLLSTARLFRQVVLHLHNLFLKENLRITSLIALKRMYRKRLQEILPNRRYVDGAITLVYSIYESAQALGVPFSDIEFKNWLLFQQSEKEYPCRNVTLQRDYSFRVTTISYQGESKRTSLKPTVPKNYKQILDKIIEKKQPYVARIVLRGFGERKNMLWIHGEIHLSIPYKFYLEHFSKFKRNYGKHFGGVDVNVDRINLAIVDKYGRLRNVKTFWFEEASWKGCPRQRAWSIIGMAIHNMLRYAYYHGVNTLFLENPKVLGYLKILWIRKGKRKNRNYNYRVQIFRSSVAEKIAMKAPLYTINIEYIDPKGTTHSKEHDEIMRRYGLDKHTVSAYLIALRGIERRIMIQKAIV

SEQ ID NO: 1259 - protein, 365 aa, Unknown
  Description of Unknown: uncultivated organism sequence
  Category: MG61 effectors
  Description: MG61-95 effector
MAGEIREPKLTHVTVVGRVIPLDSESYMHLVLLAYKFRKVLIKATKMYAKGINRITIVKEVTKELNLRYADTIYKLAKLIVEGAKCNNSNPLKVKIRKLFIASRGFTVNKGNRNIRLLSSNELEINILWKGWIRFKVLFGRKYIPLVNELVKKALAKKLSYTAKIAFKNGNVYLHVSVPIELYLKYFSKGKAEGKLIAGFDLNSDRINMVIVDKYGIIRDVKTEWFPEVTSHGFPRNKAHTLRLQALAKLLDYAYHCSVEVVVFEDLERIKKRRFTMSRTANRKITRFPKRKLLKHAVVMAMKYGFKVHLVNPANTSKLGEKIGEKLGLDKHTASAYILTLKYLGVANLISCNPSSQRNQTTINY

SEQ ID NO: 1260 - protein, 387 aa, Unknown
  Description of Unknown: uncultivated organism sequence
  Category: MG61 effectors
  Description: MG61-96 effector
MLSRYISLLGYTPMKLIEYITLRLPFHVINEEARLIYLTAWLCKLCAHRLLNYVKENPLLANLSQYDFIKLGRKLCYDIIPNRRYVDGITTIVQASLQSAKALGADITKLELKPWLLFQSEAEPWAKGNLNIQFTSYNTVRVLVFEKDKSTRKITIKPVISKVYAKLIHALIDRALRKEIGYPARIYITNYGHKLEHLYGEIQIMVKYDFYLEVMRRYEKSLGNNIAGIDVNVDRLNLTVINRDGDIVWKYTVKFPQITSRGYRRKRAWSIIGEAIHSILKNAYSHGASILAVENPKIIGYLRYYWIRNGERGTKNYNYKVAIFRNSIIERIIWKAPLYGLQVATVNPKGTTHSEDHEYVMRRYGLDRHTASAYLIALKARRNLQRP

SEQ ID NO: 1261 - protein, 355 aa, Unknown
  Description of Unknown: uncultivated organism sequence
  Category: MG61 effectors
  Description: MG61-97 effector
MSRCQTSSIIDASSIVNYVTIIGRIYSASSEDYMHLVRLARDFRRAVQVATRMIARGLEENSVLRELRRMLNKAYADSAYKAAKTMVEGCIFNGGNPLHIEVKKPFIVSEGESSRLGNRNVRLEDTCLVKVKYPHDGSWITLRAEFGEKHLPLLRELVDLAKQKKLSYTARIVFKEGDIYLHISIPIQLYLKYFKEGEARGQLIAGFDLNSDRVNLVIIDEHGEIVDARTAWFPETTSHGFPREKAKALRLNALARLLKYCYRHGVSIVVFEDLLSVKRKRFTRSRTANRKITRFAKKQLIQHGVVMALKYGFKVLLVDPKGSTNSREHDELMRKYRLDRHTASAYLIALRGLKH

SEQ ID NO: 1262 - protein, 376 aa, Unknown
  Description of Unknown: uncultivated organism sequence
  Category: MG61 effectors
  Description: MG61-98 effector
MSYVTVVLPFNATGDVAGRLLSTTWLFRIATHRVLSLAKSTPALPGSDIGWKSVFRREAYSVIPNRRYADGVVALVRGIYESCRALGVSFRDAELGDWLMFQQSEREYPARNITLKAGYEFHVTVVGYDGSTGRVTVEPTVPKSYRVLLDGVLREKPKYCARVMVKGFGERKSDLWLNGEIHLTLPLELYHRCMAKDTPATGSNVAGVDVNVDRLNVAIVDTSGRLRDTTTFWFREVTSRGYPRRRARCVIGMSVHRMLKYLASHGVGMVVLENPEVIGYLRYCWVRSGERGSRNYNYKVAVFRSSIIEMIALKATLYGLKSVYVDPRGTSSSQEHRFVMEKHGLDRHTASAYLIALKHLQDEKIMNNRKAHEQHK

SEQ ID NO: 1263 - protein, 372 aa, Unknown
  Description of Unknown: uncultivated organism sequence
  Category: MG61 effectors
  Description: MG61-99 effector
MNYITITTGFNASDEEARLLLSTAWLFKIATHRVLSYAKSMPLLPTSKIAWKNTFRGVTYEVIPNRRYADSATILVMVVYESCRQLGVSFRDVELGDWLMFQQSEKEYPARNITIKNIDEAWVTVLGYGDRSRRIKLGIKSSKKACRKLIEAMLREKQEYNPRVYIRSWNVRGGKLFVRGELQVAIPIDFYYKHMVRFRENRGRLYGGVDVNIDRINLAIVDEGGRLRDVKTFWFEEASRKRCSRHRARSAIGMAIHSMLGYAYHHGVKTLFLENPDVLGKLKLLWIRGGKRKHENYNWKVMIFRSSVIEMIAMKVPLYTINVAYVDPKGTTHSEEHSEFMRRYGLDKHLASAYLIALRGIKRFNLIQKATE

SEQ ID NO: 1264 - protein, 363 aa, Unknown
  Description of Unknown: uncultivated organism sequence
  Category: MG61 effectors
  Description: MG61-100 effector
MSTLRLSSVEELIPHVTVIGKLLPETPEDYMKLVRLAWSFRKAVELMIREVVNGASMKDATKKLYQMLPNYIYLESAYKHAKFIVEGCKFNNGNPRHIHVKKLFIISRGNKYDKGNRNIKMIPSTKFFQVFIKYPWDSSWIKCRAFFGERYISLLRELLELANQKKEGYGTRIVLREGRIELHVSVPLFLYLKHFSLPERRGYGLVAGLDLNSDRINMVIIDPSGRIVAMKTAWFPEVTLHGFPRDKARDIRLKKLKELLSYARRIGVDYIVFENLFEVKKRSRVRSPSGNRKITRFAKKQLLQHGLLMSLKLGLTPILVDPKGTTHSQEHEEVMKKRGLDRHMASAYIIACKGLKVIKNHEK

SEQ ID NO: 1265 - protein, 379 aa, Unknown
  Description of Unknown: uncultivated organism sequence
  Category: MG61 effectors
  Description: MG61-101 effector
MSAVEYATVRLPFHATGDNARLIYWTAWLCKLCAHKLLDKVKENPQLADLSQYYFIKIGKELCYDIIPNRRYVYGISILIHASLQSAKALRVDITKLELKPWLLFQSEAEPLAKGNLNIQFTDHDRVKVLVFDKDGASKKITIKPVIPKSYAKLIKTLVDRAHRKEIGYPARVYIMNYGDGLEHLYGEVQVMVKYNFYLEVMKKYDKPLGNNIAGVDVNVDRLNLVVINRDGDIVWKYTARFPQVTARGYPRKKAWSVIGEAIHAVLRNAYSHGASVIAVENPEIMGYLKYYWIRSGDRRSRNYNYKVSIFRNSVIERIIWKASLYGLKAVPVSPKGTTHSEDHDYLMRKYGLDCHTTSAYLIALKARRNLRTSFSARL

SEQ ID NO: 1266 - protein, 363 aa, Unknown
  Description of Unknown: uncultivated organism sequence
  Category: MG61 effectors
  Description: MG61-102 effector
MTYITIALPFNVCCNVAKRFLSTAWLFKIATHRLLSIAKQSPVLPGTDIGWKSTFRRIAYEVIPNRRYADGVVVLVRSIYESCRQLKVDFKSVELSDWLMFQQSELEYPARNITLKPGYEFHVTTIDYHKNTYRDVVKLTVPKSYRLLLDKVLKERQVYAGRTVIKSYGTEGGNLWVQGEVQTTIPIDFYYKHMPRVRANNGKLYAGVDVNVDRVNLAIVDGEGRLRDTYTFWFEEASRKGCKRRRARSIIGMGVHEMLKYAYSHGVKVLFLENPEVLGKLKLLWVRSNDRRHENYNYKVSVFRSSIIEMIALKAPLYSIEVKYIDPRGTTSSREHDEIMKKHRLDRHVASAYLITLKGLKHQ

SEQ ID NO: 1267 - protein, 361 aa, Unknown
  Description of Unknown: uncultivated organism sequence
  Category: MG61 effectors
  Description: MG61-103 effector
MLQSQTSNVVDAFTVVNYVTITGKLHPVSGEDYMRLVRLAWDFKNAVRITTRMIAKGVRRNNILKELRGMLNKAYADSAYKLAKAMVEGCLFNGCNPLHIEVRKPFIISEGESSRLGNRNVRLEDTNIVKVKYPYDGSWITLRAEFGERYLPLLRELVELARQRKVSYGARIVFREGNIYLHLSIPIELYLKYFKRGEAKGGLVAGFDLNSDRVNLVIIDRYGRIVDTRTAWFTEVNSHGFSRNRTRALRLRALAKLLKYCYTHNVGVVVFENLLLIKRRRYTRSKTGNRKITLFAKRQLIQYGVVMALKYGFKTLFTNPRGTTNSKEHGEIMKKLGLDRHTASAYLIALRGLETLNENYK

SEQ ID NO: 1268 - protein, 388 aa, Unknown
  Description of Unknown: uncultivated organism sequence
  Category: MG61 effectors
  Description: MG61-104 effector
MNPTPKIIADKETIEQFMYITINGRLTPKSNEDYMKLCLLAYRFRQAVKHGINLVLRGVQQKEAYKELAKLLPSSIYGETAYKYAKLLVESAKEQVDDEIVVNKITIMRKWIASRGGVSWRGNLNVRLTSPDTAEILVFNHRKESRKITVNLRTPKRYKKLLERLIEKASNREVGYPARVVIKEYNFYQGNLHLYCGLQVVVPYYLYLETMRRYDKPLGNHVGGVDVNVDRINLAIVDKYGRLRDTRTFWFRETISRGYKKRRAWTKIYQAIHELLQYAYHHGTSTIALENPKIIGYLRYYWIRDGDRKTKNYNYKKSIFRNKIIDTITCKAPLYSLKTIYVNPKGTTHSKAHGEVMKRYGLDRHTASAYLIALKAIKRHATTQKAII

SEQ ID NO: 1269 - protein, 364 aa, Unknown
  Description of Unknown: uncultivated organism sequence
  Category: MG61 effectors
  Description: MG61-105 effector
MNGQPLYTVKLSFNISSEKAKKILSTVWLFKIACHRILSKSKEIKDMLVSSKVAWIKMFKNHAYEIIPNKRYSYGVVYLVYGIWESARRLRINYDDVELSDWLFIQHYEREVNGNVIRVYEDGSVLVTTYGYDGSKDRILVKAKPNKGQAELLNSIVESKEKYMPKLIIRDYGVRDDKLYVRGEVHISISYDFYLKHVKRYNEPKGSLIGGVDVNTDRINLAIIDEDGKLRDVKTFWFREVTARGYPRRRAWSIIGMRVHELLKYAYHHGVSTIVLENPEVIGRMRLAWIRNGKRLHRNYNWRVTIFRNRIIEMITMKAPIYGLRVNYVNPKGTTHSREHDDIMMRYGLDRHTASAYLIALKSI

SEQ ID NO: 1270 - protein, 373 aa, Unknown
  Description of Unknown: uncultivated organism sequence
  Category: MG61 effectors
  Description: MG61-106 effector
MNETYLTLRLPFNACDAEARMLLSTARLFRHVVLHLHSLILGENPRITSLIALKKMYRRRLQEILPNRRYVDGAITLVYSIYESAQALGVPFNDIEFKNWLLFQQAEKEYPCRNVTLQRDYSFRITTISYQGESRRIPLKPTISRSYRRVLGKIIEERQPYVARVVLRGYGERGNVLWVHGEIHLSIPYKFYLEHFKRYRGNHGALYGGVDVNVDRANLAVVDRYGRLRDVRTFWFEEASWKGCPRQRAWSIIGMAIHDMLRYAYHHGVKVLFLENPETLGYLKTLWVRKGERRSNNYNYRVQVFRNRVVERIALKASLYSIGVKYVDPRGTTRSEEHDELMRRHGLDRHTASAYLIALRGMERYTTIQKATV

SEQ ID NO: 1271 - protein, 356 aa, Unknown
  Description of Unknown: uncultivated organism sequence
  Category: MG61 effectors
  Description: MG61-107 effector
MAREVREPEITHVTITGRILPLDNDSYMELILLAYRFRKALIRAIKMYAKGLDRNTIVKEITKELNLGYADTIYKLAKLIAEGAKHNGSNPLRVRIGKLFIVSRGFSSNKGNRNIRLLSTNELQVNIPWKGLLRFKVAFGERYISLVSELVKKALSRKLSYTAKIVFRNGMVYLHVSVPIKLYLKHFSKGRAKGSLVAGFDLNSDRINMVIVDKLGIIRDVKTEWFPEVTSHGFPRNKAHTLRLQSLAKLLNYAYHHGVGVVLFEDLDRIKKRRYTRSRTANRKITRFPKRKLLEHSIVTALKNGFKVYLVNPAYTSKLGEKLGTELGLDKHIASAYVLVLKYLGVSEIPLSISSS

SEQ ID NO: 1272 - protein, 286 aa, Unknown
  Description of Unknown: uncultivated organism sequence
  Category: MG61 effectors
  Description: MG61-108 effector
MAREVRKPEITHVTITGRVIPLNNDSYMELVLLAYRFRRTLIKAIKMTTKGLGKNTIVKEVTKELNLGYADTIYKLAKLIVEGAKSNGSNPLRVKLRRLFIASGGFTANKGNRNIRLLSSSELQVNIPWKGWVKFKVVSGKRCIPLVNELVEKALSKKLSYTAKIVFRNGKVYLHISIPIELYLKYFSKGRAKGKLIAGFDLNSDRVNMVVVNRQGIIRGTKTEWFPEVTSHGFPRNKANTIRLQALAKLLDYAYHHGVGVALFEDLDRIKKRRYTRSKTANRKIT

SEQ ID NO: 1273 - protein, 374 aa, Unknown
  Description of Unknown: uncultivated organism sequence
  Category: MG61 effectors
  Description: MG61-109 effector
MKKVKYITLRLPFHITGVYARLVYWTAWLCKLCAHRLLYHVKQNPLLADLSQYDFIKLGRKLCYDIIPNRRYVDGISTIIHASLQSAKVLGVDVAKLELKPWLLFQSEAEPWAKGNLNIQFTSYNTVRVLVFEKDKSTRKITIKPVIPKGYARLIRTLVDKALRKQIGYPTRIYITDYGDKLEHLYGEIQVMVKYDFYLEVMKRYEKPLGNNIAGVDVNVDRLNLVVINRNGDIVWRYTARFPQASSRGYPRKSAWSVIGEAIHSNLNNAYSHGASVIAVENPKIIGYLRYYWIKNGNRKSENYNYKVTIFRSSIIERIIWKAPLYGLQVVTINPRGTTHSEDHEYVMRRYGLDKHTASAYLIALRARRNLQRP

SEQ ID NO: 1274 - protein, 363 aa, Unknown
  Description of Unknown: uncultivated organism sequence
  Category: MG61 effectors
  Description: MG61-110 effector
MSYITMCLSFNVSDNVARRLISTAWLFKTASHRMLSIAKQTSALPTTDIGWKDAFRKVIYEVMPNRSYVDGVIVLVRGIYESCRQLGVNFKEVELGNWLMFQQTEKEYPVRNITLKRGYEFYITTLDYDGNSERIVIKPTTLKNYKLLLDKILEESQKHTARVVVKDYGIRKGKLWVHGEIQLTIPLNFYYKYMTRYKRNYGKLYGGVDVNSDRINLAIVDKEGNLRDTYTFWFREVTARSYPRRKARTIIGMRIHEMLKYAYHHGVKTLFLENSEVLGRLKLMWMRNGKRLNRNYNWRVTTFRSSIIEMIAMKASLYAIRVMYVNPKGTTSSEKHDGIMRKYRLDKHTASAYLITLKGLDLL

SEQ ID NO: 1275 - protein, 366 aa, Unknown
  Description of Unknown: uncultivated organism sequence
  Category: MG61 effectors
  Description: MG61-111 effector
MSYVTITAGFNAFGENAKLLLSTAWLFKLASHRVLSYAKSMPILPASKIGWKNMFRKVAYDVIPNRRYADSTIVLVMGVYESCRQLGVNFKDVELGDWLMFQQSEKEYPPRNITLRDVSEAWVTVFGYDGESRRISLKVSTSGIFRKLLEAVLREKQPYNPRIVLRTWNVRGGKLYVRGELHVSIPIDFYYRHMTRFKRNNGRLYGGVDVNTDRINLAIVDRYGRLRDAKTFWFEDTARKGYPRRKARALIGMAVHEMLRYAYHHGVKTLFLENPEVLGKLRLLWIRNGKRLHRNHNWKVAVFRSSIIEMVAMKAPLYSINTEYIDPKGTTHSKEHDEVMRKHGLDRHTTSAYLIALKGIKRYRMI

SEQ ID NO: 1276 - protein, 355 aa, Unknown
  Description of Unknown: uncultivated organism sequence
  Category: MG61 effectors
  Description: MG61-112 effector
MSRYQTSSIVDASSIVNYVTIIGRVYPVSSEDYMRLVRLAWDFRRAVQVTTRMIARGLEENSVLRELRRVLNKAYADSAYKAAKAMVEGCVFNDGNSLNIEVKKPFIVSEGESSRLGNRNVRLEDTCLVKVKYPYNGSWITLQAEFGEKYLSLLRELVDLAKQKKLSYTARIVFREGDIYLHLSILIQLYLKYFKEREARGRLIAGFDLNSDRVNLVIIDEHGEIVDVRTAWFPEATSHGFPREKAKVLRLDALARLLKYCHRHGVSVVVFENLLSVKRKRFTRSKKANRKINRFAKKQLIQHGVVMALKYGLRALLVDPKGTTNSREHGELMKKYGLDRHTASAYLIALRGLRH

SEQ ID NO: 1277 - protein, 356 aa, Unknown
  Description of Unknown: uncultivated organism sequence
  Category: MG61 effectors
  Description: MG61-113 effector
MSQSRTSSVVDATTLIEYATIVGRLIPASGEDHMKLARLAWEFRRAVQVATKMIAKGEEANIILKELRKILNKAYADSAFKQAKAIVKGCLATGGDPRRIEVTKLFIISEGETSRNGNRNVRLEDTSLVKVKYPYDGSWIQLEAKFGEKYLPLLRELVELAKQRKVSYNARIVFRRGRIYIHVSVPIYLYLKHFEKGEARGELIAGFDLNSDRINLAIIDRYGGLVDAKTAWFTEVVSHGFPRNKAKALRLRALAKLLKYCYTHGVGIVVFENLYVVKKHRYTKSRNGNRRISKFAKRELLEHAIVMSLKYGFKVLLVDPKGTTNSKEHDEAMKRHGLDRHTASAYLIALRGLNPS

SEQ ID NO: 1278 - protein, 374 aa, Unknown
  Description of Unknown: uncultivated organism sequence
  Category: MG61 effectors
  Description: MG61-114 effector
MDRVEYITLRLPFHATGEDARLVYWTAWLCKQCAHRLLERVRQNPLLADLSQYDFIKIGRKLCYDIVPNRRYIDGISTLIHASLQSAKALKIDITKLELKPWLLFQSEAEPWAKGNLNIQFTKDKTARILVFDRDKSSRKIIVKPLISKCYTKLVHALIGKAFRKEIGYPARVYVKDYGDRLEHLYGEVQVMVKYDFYLEVMRRYDNPLGNNIGGIDVNVDRINLVVINRDGDIVWKYTARFPQVTSRGYPRKRVWSIIGEAIHRVLENAYSHGASVIAVENPRVIGYLRYYWIRNGERKNKNYNYKVAIFRNNIIERIMWKTPLYGLQAIPVSPRGTTHSETHEYVMRRYGLDKHTASAYLIALKARRNLQRP

SEQ ID NO: 1279 - protein, 376 aa, Unknown
  Description of Unknown: uncultivated organism sequence
  Category: MG61 effectors
  Description: MG61-115 effector
MDLDYVTISLPFHATGDVAKSIYWTAWLSKACAHRVLEHVKANLVLAKLSEYDFIKFTRELCYSLLPNRRYVDGVATLVYSSLQSVRKLKVDVSRVELKPWLLFQSEGEPWAKGNLNIQFTDYETVKVLVFKASGGSERVVVKPVVSKRYNRLLKELVDRAMRKEIGYPARVYIRSYSGDLEHLYGELQINVKHSLYLEIMKRFDKPLGSNVAGIDVNTDRLNLVVVNKDGEVVWMHTVRFPQILARGFPRKRAWSIIGEKIHEVLKHAYHHGASAVALENPGVIGYLRYYWVRNGERGGRNYNYKVAVFRSSIIERILWKAPLYGLKIVYVDPKGTTSSREHAETMKKHRLNKHTASAYLIASRALNILERPTKT

SEQ ID NO: 1280 - protein, 373 aa, Unknown
  Description of Unknown: uncultivated organism sequence
  Category: MG61 effectors
  Description: MG61-116 effector
MTKAYLSMRLPFNACHDGARLLLSTARLFRHCVLYLHQLILSERPHVVSSIALKRMYRHRLQRILPNRRYVDGAIILMYSIYESAQALGVSLNDIEFKSWLMLQQSEKEYPCRSITLQHDHSFEVTTISYQGESRRIVLRPTVPKHYGRVLDKILEEGQPYVARVVLKGYGERRGVLWTHGEIHLLIPYGFYLEHFTRYRENHGKLYGGVDVNVDRINLAIIDGYGRLRDAKTLWFEEAARRACSRRRAWSIISMAIHDMLKYAYHHGVKRLFLESPEVLGRLKTLWMKKGERGNENYNHRVQIFRSRIVERVALKAPLYAIDAEYVNPRGTTHFEEHDEAMRRYGLDRHAASAYLIALRGIERYATTQKAIV

SEQ ID NO: 1281 - protein, 379 aa, Unknown
  Description of Unknown: uncultivated organism sequence
  Category: MG61 effectors
  Description: MG61-117 effector
MGYTPMKLVEYITLRLPFHVINEEARLIYWTAWLCKLCAHRLLNYVKENPLLANLSQYDFIKLGRKLCYDIIPNRRYVDGISTIVQASLQSAKALGADISKLELKPWLLFQSEAEPWAKGNLNIQFTSYNTVRVLIFEKDKSTRKITIKLVIPKVYAKLIHALMDRALKKEIGYPARIYITNYGHKLEHLYGEIQIMVKYDFYLEVMRRYEKSLGNNIAGIDVNVDRLNLVVINRSGDIIWKHTVRFPQITSRGCRRKRAWSIIGEAIHKTLKNAYSHGASVIAVENPEVIGYLRYYWIKNGDRRSRNYNYKVSIFRNNIIERIIWKAPLYGLQATTVNPKGTTHSEDREYVMRRYGLDRHTASAYLIALKARRNLQRP

SEQ ID NO: 1282 - protein, 375 aa, Unknown
  Description of Unknown: uncultivated organism sequence
  Category: MG61 effectors
  Description: MG61-118 effector
MSYMTLCLSFNVDSIKAKQLLSTAWLFKTASHRMLSLAKQFPVLPASDIGWKNTFRKIIYEIIPNRRCTDGVIVLVRGIYESCRQLGIDFKEVELGDWLMFQQAEKEYPVRNITLRQDNEFHVTTIDYNGSVERIVIKPTIPKNYKLLLDKILEDKQKHTARIVVKDYGVRKNTLWVRGEIQLTIPLNFYCKYMVRFKKNYGRLYGGVDVNADRINLAIVDSEGKLRDTYTFRFPEVTARGYLRHRARTVIGMKIHEMLKYAYYHGVKKLFLENPEELDKLRLLWIRNGRRLHRNYNWKVSVFRSRVIEMIAMKSSLYSIGVKYVNPKGTSNSKEHSEIMKRFRLDKHTASAYLTALRGLNQQFISFNYQNIFRP

SEQ ID NO: 1283 - protein, 323 aa, Unknown
  Description of Unknown: uncultivated organism sequence
  Category: MG61 effectors
  Description: MG61-119 effector
MRLVRLAWDFRRAVQVVTRMIARGLEENSVLRELRRKLNKAYVDSAYKVAKTMVEGCIFNGGNPLNIEVKKLFIISEGESSRLGNRNVRLEDTCLVKVKYPHDGSWITLRAEFGERYLPLLRELVDLARQKKVSYTARVVFKGSNIYLHLSIPIQLYLKYFKKGEARGKLVAGFDLNSDRVNLVIIDEHGEIVDVRTAWFPEATSHGFPREKAKVLRLNALARLLEYCYRHGVSVVVFENLLLIKRRRFTRGKTANRKITQFAKKQLIQYGVVMALKYGFRVLLVDPKGATNSREHGEVTKRYRLDRHTASAYLIALRGLRHQ

SEQ ID NO: 1284 - protein, 371 aa, Unknown
  Description of Unknown: uncultivated organism sequence
  Category: MG61 effectors
  Description: MG61-120 effector
MTYITLCLPFNISDNEAGRMLSTAWLFKIASHKMLSLAKQFPILPATDIGWKNVFRKIIYEIIPNRRYTDGIIVLVRGIYEFCRQLGIDFKEVELGDWLMFQQTEKEYPVRNITLKQGYKFHVTTIDYNGNSERITVKPTIPKNYKLLLDKILEEKQKHTARVVIKDYGVRKNKLWVHGEIQLTIPLNFYYKYMVRYRRNYGRLYGGADVNVDRINLAIIDKYGRLRDVKTFWFEDVARRGYPRRKARILIGMAVHEMLRYAYHHGVKIMFLENPEVLGKLKLLWIRNGRRLHRNYNWKITVFRSSVIETISIKAPLYSINTEYIDPRGTTHSKEHDIVMKRYGLDRHTASAYLIALRGIEKYTKIQKAII

SEQ ID NO: 1285 - protein, 364 aa, Unknown
  Description of Unknown: uncultivated organism sequence
  Category: MG61 effectors
  Description: MG61-121 effector
MDGTPLYTLKLSFNVSGGKARRILSTTWLFKLACHRVLGRSKELQKSLIPSKIAWVRMFYGDARSFIPNKRYAFGAVYLVYGVWESSRKLGLDYGDVELSNWLMFQHYEREVDGNVIRIYDDGSTLITTYDYDGSKERILVKAKPNRGHVDILKLIVESREKYMPRVVVRGYNVRNGEFYVRGEIHVSVSYDFYLKHATRYREPRGSLVGGVDVNVDRINLAIVDKRGELRDYKTFWFPEVTARGYPERRAWSVIGMRVHEMLEYAYHHGVSTIALENPSVLGYLKLAWIRGNDRGHENYDYKKSIFRNSIIERIAIKTPLYGFNVKLVEPQGTTSSREHDEVMRRYGLDKHTASAYIIALRSI

SEQ ID NO: 1286 - protein, 357 aa, Unknown
  Description of Unknown: uncultivated organism sequence
  Category: MG61 effectors
  Description: MG61-122 effector
MDVPKYVTVCGRVIFDNNETYLELGKLCYLFRKNLQKAVKMYAKGLSKNIIVKTITKEMNLGYADTIYKLAKFIVKGCRANGGNPLRIRIKRMFLVSRGFSSNKGNRNIRLVSTREVLVRTLDKRWLKLGVKFGKKYLTLIEELVKLALQKRASYSARIIFRNGKAYLSVSVPIQLYLKYFKLGKAKGKLIAGLDINSDRINMVIIDDDGNIRDVKNEHFHEVTSQGFPRNKAKYIRLNAIARLLDYAYHHGVRYVCFENLDVIKKKKFTKSKKANRKITKFAKRQILSHAVIRAMRYGFKILFVNPKNSTKEAKKIHRKLGFDVHTASAYIIALRGLKILKNNGNFQNILTTQTSE

SEQ ID NO: 1287 - protein, 358 aa, Unknown
  Description of Unknown: uncultivated organism sequence
  Category: MG61 effectors
  Description: MG61-123 effector
MLRYQTSSAVDASSIVNYVAIVGRVYPASNEDYMRLVVLAWDFRRAVQVATRMIARGLEENSVLRELRRVLNKAYADSAFKVAKAMVEGCLFNGGNPLRIEVRRLFIASEGESSRLGNRNVRLEDTHLVKVRYPHDGSWITLRAEFGERYLPLLRELVDLARQKKLSYKAIVVFREGGIYLHLSVPIQLYLKYLKKGEARGQFIAGFDLNSDRVDLVIIDEHGRIVDTRTAWFPEATSHGFPREKAKVLRLNALARLLECCYRHGVGTVVFENLLLVKRRRFTGDRTGNRKIARFAKRQLIQHGVVMALKYGFRVLLVDPRGTSGSKEHDEIMKRFGLDKHVASAYLIALRGLRYQQI

SEQ ID NO: 1288 - protein, 373 aa, Unknown
  Description of Unknown: uncultivated organism sequence
  Category: MG61 effectors
  Description: MG61-124 effector
MSETYLTMRLPFNTCGYEAGLLLSTARLFRFTVLKLHSIILDENPRITSLIALKRMYRRRLQEILPNRRYVDGAITLLYSVYESAQALGVPFNNIEFRDWLMFQQGEKEYPCRNITLQHDHTFRVTTISYQGESNRITLKPTIPRSYEEVLNSILEKKHPYVARIVLRGFGERKNMLWVHGEIHLSIPYKFYLENFRKHKRNYGKLLGGVDVNVDRINLAIVDRYGKLRDTKTFWFEEASWKGCPRQRAWSVIGMAIHDMFKYAYHHGVKTFYLENPETLGYLKTLWIKKGERRNNNYNYRVQIFRNRIVERIAMKAPLYAINIEYVDPRGTTHSKELDEMMRKYGLDKHTASAYMIALRGIERHKMIQKAIN

SEQ ID NO: 1289 - protein, 375 aa, Unknown
  Description of Unknown: uncultivated organism sequence
  Category: MG61 effectors
  Description: MG61-125 effector
MELPKYITVSLDFHADGGYARSILSTAWLSKLVAHRVLKLVKESKTLANFSEYMFLKMLRSECYDTLPNRRYVDGILKLVYSTLKSAKALKINIRDIEMKQWLLFQSDGERGYARGNMNIRLIDTHHVRVLTVGYDKKTSYIELKLTVPKRWKKFIEVLINRAFTGQVGYPARVVVKDYGVGKYGLHVHGEVQVMVPYSLYLEVMKRYDKPRGSNTAGVDVNVERLDAVVIDRYGNLLSHRTFWLKNATFMGVRRKRSWSLIGEQIHTLLKWLYSQGVSVIGLENPEIIGYLRYYWIRNGERRGNKWNWKVSMFRNSIIEGIMWKAPLYSMKTVYVNPKNTSREGERIGKKQGLDRHLGSAYIIAKRALKNLQRP

SEQ ID NO: 1290 - protein, 382 aa, Unknown
  Description of Unknown: uncultivated organism sequence
  Category: MG61 effectors
  Description: MG61-126 effector
MSYITIVLPFNVVGDPSKRLLSTTWLFKIASHRLLNLVKQSPVLPVTDIGWKRTFRGVVYDVIPYRRYVDGVITLIMGIYESCRQLGVDFRDVELSDWLMFQQAEMEYPVRGITFKDGYEFHITTIGYDGESERVIVKPTIPRVYKLLLDKILEEKQRHTARVVIKDYGVREGKLWVHGEVQLTLPMDFYYKHMVRYVRNYGDLYGGVDVNSDRINLVIVDVEGRLRDTYTFWFREITTRGYPKRRARSVIGMRVHEMLRYAYHNGVKTLFLENPDILGKLRLLWVRNGRRLHENYNWKVATFRSSVIEMIAMKTPLYDIGVKFVNPRGTTHSKEHEEAMRRYRLDRHAASAYTIALKGLKNLDQNSYPHSFKDETFKCKRL

SEQ ID NO: 1291 - protein, 359 aa, Unknown
  Description of Unknown: uncultivated organism sequence
  Category: MG61 effectors
  Description: MG61-127 effector
MSQYQTSSTVVDASTLVEYATITGRLIPASSEDYMKLTRLAWSFKRAVQVATRMIAKGVDSNDVLKELRKMLNKAYADSAFKIAKAIVRGCITNGGDPLHVEVRKLFIVSEGESSRLGNRNVRFEDTNLVKVKYPYDGSWTQFRAKFGEKYLPLLRELVKLAKQKKASYNAKIVFRNTKIYLHLSVPIQLYLKYFKRGDALGEFIAGFDLNSDRVNLVIIDKYERIVDVKTEWFPEVTSPGFSREKARALRLRALAKLLKYCYTHGVGAVVFENLLDVKKRRFAKSKTANRKISRFAKRELLHYVIVMSLKYGFKVLLADPKGTTSSAEHGRFMMKHGLDRHTASAYLVALRGLTHQIT

SEQ ID NO: 1292 - protein, 364 aa, Unknown
  Description of Unknown: uncultivated organism sequence
  Category: MG61 effectors
  Description: MG61-128 effector
MFENPLYTIKLSFNASGDSAGKVLSTAWLFKLACHRVLSRSKELLNALIPSKIAWVKMFYNDARDLIPNKRYAYGAIYLVYGIWEGARELGIDYRSVELSGWLMFQHYDREVDGNVIRILEDGSALVTTYSYDGSKDRVLIKSKPNRGHGELLKLVVESKEKYMPRVVVRGYNVRSGKLYVSGEIHVTIDYSFYLKHAARYGEPKGSLIGGVDVNSDRINLAIVDEKGNLRDCKTFWFPEAVARGYPRRRAWSVIGMKIHEMLRYAYSHGVATIALENPEALGYLKLAWVRNGDRKHENYNYKKSVFRNSIIERVAMKAPLYGLNTKFVDPKGTTSSREHDEIMKRFGLDRHIASAYMIASRSI

SEQ ID NO: 1293 - protein, 360 aa, Unknown
  Description of Unknown: uncultivated organism sequence
  Category: MG61 effectors
  Description: MG61-129 effector
MSYITIQLPFNVSGKMAGELLSTAWLFRMAVHRVLDTARQQALPRSRIGWERAFHKVAYDVIPQSDYADGAVVLVMGAYKSCRVLGLDFKSVELSDWLLFQPSKLTRKVGSIALKPNYEFHVTTIGYDGSYDRVVLRPVVSGALGLILDSVLDYGVEYMGRIVVRDYGVRDGKLWVRGGVHLTVPLLAYYKIMARYLENNGGLQGGVDVNVDRINLAIIGEDGELIDHKTFWYREVTSRGFPRGRAWSIIGMRIHELLNYARNNGVRVLYLENPGIIGKLRLMWVRNGNRGHENYNYRVAVFRSTIVEKIAMKAPLYSISVGYVNPRGTSSSKAHDELMRKHGLDRHTASAYLIALMGTR

SEQ ID NO: 1294 - protein, 380 aa, Unknown
  Description of Unknown: uncultivated organism sequence
  Category: MG61 effectors
  Description: MG61-130 effector
MSYITICLPFNVSGDVARRLFSTAWLFKAASHRMLDLAKHFPILPATDIGWKNTFRKIIYEIIPNRRYTDGVIVLVRGIYESCRQLGVAFKDVELGDWLMFQQVEKEYPVRNITLKQGYEFHITTVDYNGNSDRVVIKPSIPKNYKLLLDGVLEEKQKHIARVVIKDYGVRKNRLWIHGEIQLTIPLDFYYKHMTRYRVINGKLYGGVDVNVDRINLAIVDSEGKLRDTYTFWFREITARSYPRRRARTVIGMKVHEMLNYAYHHGVKTLFLERPDVLGRLRLLWIRNGRRLHRNYNWKVATFRSSIIEMITMKASLYSIKVDYVDPRGTTSSKEHDEIMKKYRLDRHTASAYLIALKGLNPKDPHIGFCPTATARSRSP

SEQ ID NO: 1295 - protein, 363 aa, Unknown
  Description of Unknown: uncultivated organism sequence
  Category: MG61 effectors
  Description: MG61-131 effector
MLQYRISDVIATRLVTYTTIIGKLIPTSPENHMKLVRLAYDFRRAVLYATRMIGKDMKTNDILKELRNMLNKAYGDSAYKVAKAIVEGCRFNGGEPRHIKIKRLFIVSEGEASRFGNRNVRLETTDIVKVRYPYDKSWIILRTCFGRKYLSLVREVSELAKQRRISYGARIVFKDGRIYLHLSIPINLYLKYFSKGKAHGELVVGFDINSDRMNMVIIDRYGKIRDIKTKWFSEVTSHGYPKSKAKARRLEALAKLLKYTYHHNVGIVVFENLFTIKKREYSRNPTANRKITRFAKKELLRYGILMAMKYGFKVLLVNPRGTTRSKEHDEVMKKLGLDRHVASAYLIALRGIRRYTMIQKAMI

SEQ ID NO: 1296 - protein, 368 aa, Unknown
  Description of Unknown: uncultivated organism sequence
  Category: MG61 effectors
  Description: MG61-132 effector
MGYVTVSLSFNVGGDAAKGLLSTAWLFKVATHRVLDLVRQSPVLPATDIGWKNTFRSVAYEVVPNRRYADGVVVLVRGIYESCRQLGVDFRSVELGNWLMFQQSEIEYPVRNITLREGYEFYVTTINYLGKSDRVVIKPTIPRDYKPLLDKVIEERVEHTGRVVIKDYGVRRGMLWIHGEVQVTLPLDFYYRHMIRYRQNDGRLYGGVDVNTDRINLAIVSENGELRDVRTYWFREVTARGYPRRRAWSVIGMRVHEMLRYAYHHGVKTLFLEKPDILGRLKLMWIRNGRRLHENYNYKIAVFRSSVIEVIAMKAPLYSIEAKYVNPKGTTNSREHDEAMRKYGLDKHTASAYLIALKALKQPKKSQP

SEQ ID NO: 1297 - protein, 365 aa, Unknown
  Description of Unknown: uncultivated organism sequence
  Category: MG61 effectors
  Description: MG61-133 effector
MSYVTLRLPFNVNGDMAKELLSTAWWFKTAAHRVLSLAKQMQFLPGTKIGWVSMFRSITYEIIPNRRYADGAVTLVMGIYESCRALGVDFRSVELGDWLMFQQSGLEYPAKSITLRPGYEFHVTTIKYDGLISRVVVKPTVSEDYRELIDAIYRERIKYMGRVVIRDYGARNNQLWVHGEIHITVPLDIYYEHMAKHRRNSGRLFGGVDVNTDRINLAIVDESGDLRDYKTFWFSETTARGFPKHKAWSIIGMRIHELLNYAYNHGVKTLFLENPEVLGRLRLMWVWNGGRNHENYNYKVMIFRSTIIEKIALKAPLYSIRVNYVNPRGTTNSKEHEEAMRRYRLDRHTTSAYLIALKGLTHQQK

SEQ ID NO: 1298 - protein, 363 aa, Unknown
  Description of Unknown: uncultivated organism sequence
  Category: MG61 effectors
  Description: MG61-134 effector
MSYVTITVSFNVSDEPAELILSTAWLFKIATHRVLEYAKNTPTLPASKIGWKNMFRSIAYDIISNRRYADSAVILVMGIYESCRQLGVNFKSVELSDWLMFQQSEKEYPPRNITIKSPEEAWVTIYSYDGRSERITLRISTSGAYKELLEAILEEKQPYNPRIVVKSWNVREGRLYVRGELQVSIPIDFYYKHMARYREPKSNLTGGVDVNVDRVNLAIIDEKGNLRDTYTFWFREVTARGYPRKRAWSVIGMRIHEMLRYAYHHGVSILALEDPDVLGRLRLMWIRNSRRLHEDYNWKVATFRSRVIEMIALKAPLYSIRVVYVDPKGTTSSKKHDEAMKEHRLDKHTASAYLIALKGLKQP

SEQ ID NO: 1299 - protein, 366 aa, Unknown
  Description of Unknown: uncultivated organism sequence
  Category: MG61 effectors
  Description: MG61-135 effector
MSYITLTLPFNICDGEARRLLSTAWLFKIASHKMLSIAKQFPALPATDIGWRNTFRKIIYEVIPNRRYTDGVIVLVRGIYESCRQLGVDFKDVELGDWLMFQQAEKEYPVRNITLKQDYEFWITTVDYNGNPERIVIKPSIPKNYKLLLDKILEEKQKHTARVVIKDYGVRKNKLWIHGEIQLTIPSDFYYKYMTRYKRNNGKLYAGVDVNADRLNLAIVDRYGRLRDVKTLWFENACRKGYPRRKARVLIGMAVHHMFHYAYHHGVKTLFLENPEVLGKLRLLWIRNGKKLHKNYNWKVSIFRTSIIEMITMKAPLYSIRISHVDPKGTTSSKEHDDVMGEYGLDRHAASAYLIALKGIERHKMI

SEQ ID NO: 1300 - protein, 363 aa, Unknown
  Description of Unknown: uncultivated organism sequence
  Category: MG61 effectors
  Description: MG61-136 effector
MTYVTLAFPFNVCCDVAKRLLSTAWLFKTATHRLLSIAKQLPALPGTDIGWKSAFREVVYEVIPNRRYADGVVVLIRGIYESCRQLKVDFKSVELSDWLMFQQSELEHPARNITLKPGYEFHITTVDYNRNTYRDVVKPTMPESYKLLLNKVLEERQKYAGRVVVKDYGVRKNALRVRGEVQITIPIDFYYRHMTRVKANKGKLCGGVDVNVDRINLAIVDDSGELRDVYTFWFREVTARGFPKRSARSIIGMRIHEMLSYAYHQGVKTLFLENPEVLGKLKLLWVRSGDRGHENYNYRVSVFRSSVIEMVALKAPLYGIEVRYVDPKGTTSSRKHDEITEKHRLDRHTASAYLIALKGLKQP

SEQ ID NO: 1301 - protein, 363 aa, Unknown
  Description of Unknown: uncultivated organism sequence
  Category: MG61 effectors
  Description: MG61-137 effector
MTYITLVFPFNVCCDVAKRFLSTAWLFKIATHRLLNVVKHFPVLPATDIGWKNTFRGIAYEIIPNRRYADGVVTLIRSIYESCRQLRIDFKSVELSNWLMFQQSELEYPARNITLRSGYEFHITTVDYNKNTYRDVVKPIIPKNYKPLLDKMLEERHKYTGRVVVKSYGIRKGNLWVRGEIQITIPTDFYYKHMTRCGESKGSLIGGIDVNVDRLNLAIIDEKGNLRDCKTFWFSEATTREFSRRSARSIIGAKIREMLSYAYHHNVKTLFLESPEVLGKLKLLWVRNGDRKHENYNYKKAVFRSSVIEMIELKTPLYGIEAKYVDPKGTTNSEEHDEAMKRYGLDRHTASAYLIALRGLRNQ

SEQ ID NO: 1302 - protein, 363 aa, Unknown
  Description of Unknown: uncultivated organism sequence
  Category: MG61 effectors
  Description: MG61-138 effector
MSYVTVTAGFNASGKPAELILSTAWLFKIATRRVLEYAKSTPTPPASKISWKNAFRSVAYDVIPNRRYADSTVVLVMGIYESCRQLGVDFREVELGDWLMFQQSEKEYPPRNITIKSPEEAWVTVYSYDGWSERIALKISTSGAYKELLETILGERQPYNPRIVVKSWNAREGRLYVRGELQVSIPIDFYYKHMARYRENRGRLYGGVDVNTDRVNLAIVDEHGDLRDTYTFWFRGVVARGYPGKRAWTVISMRIHEMLKYAYHHGVKTLYLEDPGVLGGLRLMWIRSGRRLHEGYNWKVATFRSRVIEIIALKAPLYSIRVVYVDPKGTTNSKAHGEAMKKHRLDKHTASAYLIALKGLKQP

SEQ ID NO: 1303 - protein, 373 aa, Unknown
  Description of Unknown: uncultivated organism sequence
  Category: MG61 effectors
  Description: MG61-139 effector
MSIRRLARNIILENDYPLITHVTVIGKLIPNNSQDYMKLVRLAWSFRKAVEQMAREIVNGASMKDATKKLYNALPNYVYLESAYKHAKLIVEGSRFNNGNPRHIHVRKFFIVSRGNKYDYGNRNIRLVPSEKYFEVQVKYPWDGSWIKARTFFGRRYIPLLNELMELCRRRLEGYGARIVFKDGRMELHLSIPLYLYLKYFSYPKCKGYELVAGLDLNSDRINMVVIDGDKRIVAMRAAWFPEVTLPGFPRNKARDIRLKKLKELLVFARRIGVDYVVFENLFAVKKSSRVSSPSGNRKITRFAKRQLLQHGLLMAMKQGLTPILVDPRGTTHSHEHEEVMNRRGLDRHMASAYIIACKGLKIIKTHEKYHKT

SEQ ID NO: 1304 - protein, 376 aa, Unknown
  Description of Unknown: uncultivated organism sequence
  Category: MG61 effectors
  Description: MG61-140 effector
MKLPKYITSSLDFHVDDDYAKNILATAWLSKLVAHRVLGLVKENPLLADLLEYRFLKMLRGKCYNILPNRRYVDGVLKLIHSTLKSAKALKVSIEDIELKQWLLFQSDGERGYARGNMNIRFIDTCHVRVLTLNYDRRTRYVELEVTTPKGWRKLIEVLVDRASRGVIGYPARVIIKDYGMGKNGLHVHGEVQVMIPYSLYLEVMRRNTTPKGGNIGGIDINVERLDAVVIDEYGNILSYRTFWIKNATFMGVRKKRAWSLIGEQIHALLKWLYSQGVHVIGLENPEIIGYLRYYWIRNGERRETKWNWKLSMFRNSIVERITWKAPLYSMKAIYIDPRNTSKEGEKIGEKLGLGRHLGSAYIIARRVLKTVLQRP

SEQ ID NO: 1305 - protein, 292 aa, Unknown
  Description of Unknown: uncultivated organism sequence
  Category: MG61 effectors
  Description: MG61-141 effector
MNLSDGWGIDFREVELGDWLMFQQSEKEFPPRNITLKSEDEAWVTAFGYDGESRRLRLRISASGSFRRLLEAILREKQPYNPRITLKSWNVRGGKLYGRGELQVSVPTDFYYRHLARYKTNSGRLYGGVDVNSDRINLAVVDGSGILRDAHTIWFREVTARGYLRHRARTVIGMGVHEMLSYAYHHGVKTLFLENPKVLGRLRLLWIRNGKRLHKNYNWRVSTFRASIIEAIAVKAPLYSIRVEYIDPKGTTRSKEHDELMRRYGLDRHMASAYLIALRGMERYTTIQKATV

SEQ ID NO: 1306 - protein, 363 aa, Unknown
  Description of Unknown: uncultivated organism sequence
  Category: MG61 effectors
  Description: MG61-142 effector
MTYVTLTFSFNVCCVVAERVLSTAWLFKIATHRLLSIAKQAPILPGTDIGWKNTFRGIVYEVIPNRRYADGVVAFVRGVYESCRQLGADFRVVELSDWLMFQQSELEYPAKNITLKPGYEFHITTIDYNENSYRDVVKPVVPKSYRLLLDKVLEGRQRYMGRVVLKSYGIRKDDLWVRGEVQITIPIDFYYKHMARARASNGMFYGGVDVNTDRINLAIIDKEENLRDCKTFWFSEVIARGFLRRSARSIMGAKIHEMLRYAYSHGVSTIALENPDVLGKLKLLWVRSGDRKHENYNYRVSIFRSSVIEMIALKAPLYGIEVKYVDPKGTTNSREHDDAMMKYRLDRHTASAYLIALRGLRHQ

SEQ ID NO: 1307 - protein, 365 aa, Unknown
  Description of Unknown: uncultivated organism sequence
  Category: MG61 effectors
  Description: MG61-143 effector
MSYVTLRFPFNVNGGVAGELLSTAWWFKVATHRVLSLAKQQQVLPGTPVGWRGMFRGVAYRVVPNARYADGVVTLVMSIYESCRELGIDFRSVELSDWLVFQQSWLEYPAKSITLKPGYEFHVTTIRYNGSTSRVVIRPTVPENYKGLLDVVLAGRVEYMGRVVVRDYGVRNNQLWVRGEVQITVPLDLYYRHMARHKRNAGRLFGGVDVNADRINLAIIDDGGVLKDYKTFWFSEVAVRGFPRYKAWRIIGMRVHELLNYAYHHGVKTLFLENPEVLGRLRLMWIRAGDRKHENYNHKVSIFRSSIIERITMKAPLYSIEVKYVSPSGTTNSVEHDELMRRYGLDRHTASAYLIALRGLTHQQK

SEQ ID NO: 1308 - protein, 356 aa, Unknown
  Description of Unknown: uncultivated organism sequence
  Category: MG61 effectors
  Description: MG61-144 effector
MSRCQTSSIIDASSIVNYVTIIGRIYSASSEDYMHLVRLARDFRRAVQVATRMIARGLEENSVLRELRRMLNKAYADSAYKAAKTMVEGCIFNGGNPLHIEVKKPFIVSEGESSRLGNRNVRLEDTCLVKVKYPHDGSWITLRAEFGEKHLPLLRELVDLAKQKKLSYTARIVFKEGDIYLHISIPIQLYLKYFKEGEARGQLIAGFDLNSDRVNLVIIDEHGEIVDARTAWFPETTSHGFPREKAKALRLNALARLLKYCYRHGVSVVVFEDLLSVKRKRFTRSRTANRKITRFAKKQLIQHGVVTALKYGFKALLVDPKGSTNSREHDELMKKFGLDRHTASAYLIALRGLRNQ

SEQ ID NO: 1309 - protein, 323 aa, Unknown
  Description of Unknown: uncultivated organism sequence
  Category: MG61 effectors
  Description: MG61-145 effector
MFRREAYSVIPSRRYADGVVALVRGIYESCRALGVSFRDAELGDWLMFQQSEREYPARNITLKAGYEFHVTVVGYDGSTGRVTVEPTVPKSYRVLLDGVLREKPKYCARVMVKGFGERKSDLWLNGEIHLTLPLELYHRCMAKDTPATGSNVAGVDVNVDRLNVAIVDTSGRLRDTTTFWFREVTSRGYPRRRARCVIGMSVHRMLKYLASHGVGMVVLENPEVIGYLRYCWVRSGERGSRNYNYKVAVFRSSIIEMIALKATLYGLKSVYVDPRGTSSSQEHRFVMEKHGLDRHTASAYLIALKHLQDEKIMNNRKAHEQHK

SEQ ID NO: 1310 - protein, 374 aa, Unknown
  Description of Unknown: uncultivated organism sequence
  Category: MG61 effectors
  Description: MG61-146 effector
MSGVEYVTLRLPFHATGEDARLIYWTAWVCKLCAHRLLETVKHNLLLADLSQYDFIKLGRKLCYDILPNRRYVDGISTLIHASLQSAKALKVDISKLELRPWLLFQSEAEPWAKGNLNIQFTSYDTVKVLVFDKDKSSTKITLEPVIPKGYSRLVRVLVDKALRKEVGYPARLYVTDYGDSLEHLYGEIQVMVKYDLYLEVMKRHEKPPGENIAGIDVNIDRINLVVIDRNGDIVWKYTARFPQVTARGFKRKSAWSIIGEAIHGVLKNAYSHGASVVAVENPGVIGYLRYYWIRNGDRKTRNYNYRVSIFRNSIIERIMWKAPLYSLHVVTVKPRGTTSSKEHEYVVKQHGLDRHTASAYLIALRARRNLQRH

SEQ ID NO: 1311 - protein, 327 aa, Unknown
  Description of Unknown: uncultivated organism sequence
  Category: MG61 effectors
  Description: MG61-147 effector
MGSSRPPSGKLREQGSPHPPDRRYVDGAITLTYSIYESAQALGVSFNDIEFKSWLLFQQSEKEHPCRNITLRNDYSFRITTINYRGEGKRISLKPTIPKNYKRILGKIIEGKRPYVARVVLKGFGERKNALWIHGEVHLSVSYRFYLGHFKEFKRNYGKHFGGVDVNVDRINLAIVDKYGRLRDVKAFWFEEASWKGCPRQRAWSVIGVAIHEMLKYAYRHGVKTLFLENPEVLGYLKTLWVRKGERRSNNYNYRVQIFRNGIVERITVKAPLYSIGVEYVNPKGTTNSGEHEEIMREYGLDRHSASAYLIALRGIKSHNLIRKATI

SEQ ID NO: 1312 - protein, 305 aa, Unknown
  Description of Unknown: uncultivated organism sequence
  Category: MG61 effectors
  Description: MG61-148 effector
MESRHLSTPLQSAKALKVDVSRLELRQWLLFQSEAEPWAKGNLNIRFVDYSRVGVLVFDRDKSSKKIIVEPVISKGYAKLVKALVDKALRKEIGYPARIYITDYGERLKHLYGELQVMVKYKLYLEVMRRCDEPLGNNIAGVDVNADRLNLVVINRDGEIVWKYTARFPQVIARGCPGKRAWSIIGEAIHSVLRNAYSHGAFVVAVENPKIVGYLRCYWIKSGDRGHESYNYKKSIFRSSLIERIALKAPLYGLSVKFVNPKGTTSSKEYDKAMKRYGLDRHAASAYLIALKARKTYKNLERPTS

SEQ ID NO: 1313 - protein, 365 aa, Unknown
  Description of Unknown: uncultivated organism sequence
  Category: MG61 effectors
  Description: MG61-149 effector
MNYITITAGFNASGEKAKLLLSTAWLFKIASHRVLSNAKSMPILPIFKIGWKNTFRRTAYEFIPNRRYADSVVVLVMGIYESCRQLGIDFKKVELSNWLMFQQSEKEYPPRNITLKDINEVWITVFKYNRESKRISLKISTSRDFRKLLEAILREKQPYNPRIILKSWNTRDGKLYVRGELQISIPIDFHYKHMTRYRKNYGRLYGGVDVNCDRINLAIVDGEGNLRDTYTFWFREVTARGYPRRRARTIIGMKVHEMLKYAYHHGVKTLFLENPNVLGKLRIIWIRNGRRLHRNYNWRVSVFRNSIIEMIALKAPLYSIKTKYVDPRGTTHSREHDMVMKKYRLDKHTASAYLIALKGLNHKFI

SEQ ID NO: 1314 - protein, 361 aa, Unknown
  Description of Unknown: uncultivated organism sequence
  Category: MG61 effectors
  Description: MG61-150 effector
MSLFRMSDVVDASTVVDYVTIIGKLHPVSSEDYMRLVRLAWDFKNAVRITTRMIAKGVDKNSILRELRGMLNKAYADSAYKVARAIVEGCLFNGCNPLHIEVRRPFIVSEGESSRLGNRNVRLENTGLVKVKYPYDGSWITLRTEFGQKYLPLLRELVDLARQREVSYGARIVFRGGSIYLHLSIPIKLYLKHFRKGEAEGGFVGGFDLNSDRVNLVIIDEHGRIVDTRTAWFTETTSHGFPRNRARALRLRALAKLLKYCYTHNVGVVVFENLPLIKRRRFTRSRVGNRKITRFAKRQLIQYGIVMALKYGFKTLLTNPRGTTNSKEHEELMRRYGLDRHTASAYLTALRGLKALNENHK

SEQ ID NO: 1315 - protein, 365 aa, Unknown
  Description of Unknown: uncultivated organism sequence
  Category: MG61 effectors
  Description: MG61-151 effector
MSYTTICLPFNVDGEEARGLLGTAWLFKIASHRMLSFAKQFPVLPATDIGWKNTFRKTIYEIIPNRRYTDGVIVLVRGIYESCRQLRVNFREVELGDWLMFQQVEKEYPVRNITLKQRCEFRISTVDFNGNSERIVIKPSIPKSYKFLLDRILEEKQKHTARVVIKDYGIRKSKLWIHGEIQLTIPLNFYHKYMIKYRRNYGKLYGGVDVNTDRINLAIVDKYGRLRDTYTFWFREVTARGYSRRKARSVIGMRVHEMLKYAYHHGVKTLFLENPEVLGKLKLLWIRNGKRLHKNYNWKLSTFRSRIIEMIAMKAPLYSIKVGYVDPKGTTNSKEHDEVMRKHRLDRHTASAYIIALRGLNHKFI

SEQ ID NO: 1316 - protein, 289 aa, Unknown
  Description of Unknown: uncultivated organism sequence
  Category: MG61 effectors
  Description: MG61-152 effector
MVRSIYESCRQLGVDFRGVELSDWLMFQQGELEYPARNITLKPGYEFHITTIDYSKNSYRDVVKPIIPKSYRLLLDKVLDDRQRYTGRVVLKSYGIKECNLWVQGEVQITIPIDFYYKHMARAKAGNGKLYGGVDVNVDRINLAIVNGGGELRDVYTFWFEEASRKGCSRQRARSIVGMRVREMLEYAHRHGVKVLFLENLEVLGKLKLLWIRSNDRRHENYNYKVSVFRSSVIEMIALKAPLYSIEVKYVDPKGTTNSEEHDEIMKRFGLDRHIASAYLIALRGLRHR

SEQ ID NO: 1317 - protein, 368 aa, Unknown
  Description of Unknown: uncultivated organism sequence
  Category: MG61 effectors
  Description: MG61-153 effector
MSYITIALSFNVGGEVAGRILSTAWLFKAATHRVLHLAKSSPALPGSDIGWKAAFRKDAYAVIPNRRYADGAVVLVRGIYESCRELGVDFRGVELGDWLMFQQAEKEYPARNITLRPGGEVYVTTISYSGAVERVVLKPTVPKSYATLLEKILEERQEHAARVVIKGYGVRKGVVWISGEVQLTIPLTFYYRHMARYRANKGSLYGGVDVNVDRVNLAIIDNSGELRDTYTFWFREVVARGYPRRSARSVIGMRVHEMLEYAYHHGVKVLFLENPAVLGRLRLLWARSTERRSENYNWKVSAFRSSIIEMIALKAPLYGIEVAYVNPKGTSNSREHSEAMKKLRLDRHATSAYLIALRGVAKQSKRAQ

SEQ ID NO: 1318 - protein, 363 aa, Unknown
  Description of Unknown: uncultivated organism sequence
  Category: MG61 effectors
  Description: MG61-154 effector
MSTLKLSNVDKLMPHVTIIGKLVPGTSDDYMKLVRLAWSFRRAVELMIREVMNGTSMKDVTKKLYQILPNYIYLESAYKHAKLIVEGCKFNNGVPGHIHIRKLFIVSRGNKYDKGNRNVKIIPNTKFFRVLIKYPWDSSWIECRALFDEKYIPLLRELLELAYQRKEGYSARIVFREGRIELHISEPLYLYLKHFSLPKRRGYGLVAGLDLNSDRINMVVIDSDSRIVAMKTAWFPELTLHGFPREKARDTRLKKLKELLSYARRIGVDYVAFENLFVVKKRSKVSSPSGNRKITRFAKKQFLQHGLLMTLKLCLTPVLVDPKGTTHSREHKEVMKKRGLDRHMASAYLIAIKGLKVIRNHEK

SEQ ID NO: 1319 - protein, 363 aa, Unknown
  Description of Unknown: uncultivated organism sequence
  Category: MG61 effectors
  Description: MG61-155 effector
MSFITIRFPFDANGSVAGELLSTAWWFKVATHRVLSLAKRQQVLPGTKIGWINTFRESAYGIVPNRRYADGAVILMMGIYESCRALGVDFRSIELSSWLMFQQVELEYPARNITLKPGYEFHVTTVDYGGNTHRVVVKPTVPGNYGLLLDKVLRERQRYTGRVVLRSYGIGGSNLWVQGEVQVTIPMGFYYRHMARYRRNDGKLYGGVDVNTDRINLAIIDEDGELIDHKTFWFSEASRKGCSGRRAWSIIGMRIHELLDYAYNNGVNTLFLENPEVLGRLKLMWAKSGDRGHGNYNHKVMTFRSTIIERVALKAPLYSIEVKYVNPKGTTNSVEHDEAMRKHGLDRHNASAYLIALRGLKHQ

SEQ ID NO: 1320 - protein, 364 aa, Unknown
  Description of Unknown: uncultivated organism sequence
  Category: MG61 effectors
  Description: MG61-156 effector
MSQYQISDVVNASNIVNYVTIVGRLVPISTEDYMKLVRLAHEFRKAVLYTTRMIVAGMNVNAILKELRRMLNKAYGDSAYKVAKAIVEGCKFNGGNPRHVKVRKLFIVSEGEASRFGNRNIRLESTSMVKVKYPYDGSWLTFKARFGEKYLPLIEELVKLTKHKEISYSARIVFRDGKIHLHLSIPITLYLRYFSKGRTKGSLVAGFDLNSDRINMVIIDRYSRIRDVKTEWFSEVTSHGYPRGKARAKRLEALARLLRYAYHHNVGTVIFENLLVIKKKRHTKSKRANRKIARFAKRELLQHGIVMAMKYGFKVLLVNPKGTTNSEEHSKIMRRYGLDRHTASAYLIALRGIEKYTKMQKAII

SEQ ID NO: 1321 - protein, 358 aa, Unknown
  Description of Unknown: uncultivated organism sequence
  Category: MG61 effectors
  Description: MG61-157 effector
MVGEVREPEITHVTVTGRVIQLDSDSYMELVLLAYRFRKALAKAVKMYAEGVGKDTIVKEVTKELNLGYADTIYKLAKLIVEGVRHNNSNPLRIRLRKLFIASRGFSSNKGNRNIRLLSSSELEVNIPWKGWVKFKVLFGKQYIPLIHELVEKSLCKEMSYTAKILFKNGKIYLHVSVPVELYLKHFKKGEVHGKLIATFDLNSDRINMVILDELSIIRDVKTEWFPEITSHGFPRNKANTLRLQALARLLSYAHHHGVGVVMFEDLERIKKQRCTKSRSANRKIAKFPKRILLKHAIVMAMKYGFKVYLVNPSYTSRVGEELGKLLGLDKHTASAYVLTLKTGKNFASLTNLLKFSK

SEQ ID NO: 1322 - protein, 380 aa, Unknown
  Description of Unknown: uncultivated organism sequence
  Category: MG61 effectors
  Description: MG61-158 effector
MDYINLRLPFNVDGDVARELLSTAWWFKVATHRVLAIAKQQVLPGNRIGWKNAFRQFAYEIIPNRRYADGVVTLVMGIYESCRALGVDFRGVELGDWLVFQQSELEYPAKSITLRQGYEFHITTIKYDGSIGRVVVKPTMSEDYRELIDAIYRERVRYMGRVVIRDYGVRNNQLWLHGEVHVTVPLDVYYEHMTRHKRNGGKLFGGIDVNADRINLAIIDEEGGLRDYKTFWFSEASRKGFGRHSAWSIIGMRIHEMLDYAYHHGVKTLFLENPEVLGRLKLMWVRGGDRKHENYNYKVSVFRSSIIERIALKAPLYSIKVGYISPRGTTNSEEHDELMKKYGLDRHTASAYLIALRGLRHQQKMSATNNHENRNSPLTD

SEQ ID NO: 1323 - protein, 363 aa, Unknown
  Description of Unknown: uncultivated organism sequence
  Category: MG61 effectors
  Description: MG61-159 effector
MGYITVSLSFNVGGDVAKGLLSTAWLFKVATHRVLDLARQAPVLPATDIGWRNTFRSVAYEVIPNRRYADGAITLVRSIYESCRVLGVDFRGVELDDWLMFQQSEMEYPVRNVTLREDYEFHITVIDYGGSASRVIIKPTIPKNYRLLLDKILEERQEHTGRVVINGYGVRGNTMWVHGEIQLTIPIEFYYKHMTRYRQNNGKLFGGVDVNADRINLVIVDKDGRLRDIKTFWFEEASRKGVTRHRARSIIGMAVHEMLGYAYHHGVKTLFLENPDILGRLKLMWIRSGDRRHENYNWKKAIFRNSVIEMIAMKAPLYGINVEYVNPKGTTSSEEHDEVMRRYGLDRHAASAYLIALKGLKQP

SEQ ID NO: 1324 - protein, 364 aa, Unknown
  Description of Unknown: uncultivated organism sequence
  Category: MG61 effectors
  Description: MG61-160 effector
MDYFTIRFPFNVNNSVAKELLSTAWLFKIATHRVLAVAKQQEVLPGTKIGWVNAFRSIAYGVVRNRRYADGAVTLVMGIYESCRSLGVDFRGVELGDWLMFQQSELEYPNRNVTLKPNYEFHVTTVRYNGATGRVVLKPTIPKTYKALLDAILTERVGYMGRVVIRDYGIRNNQLWVHGEVQVTVPLDLYYEHMARHKRNSGRFIGGIDVNSDRINLTIIDSIGRLIDHKTFWFSEATARGFPKHSAWGIIGMRIHEMLNYAYNNGVKTLFLENPEVLGRLKLVWIKNGDRGRENYNHKVATFRSTIIERITMKAPLYSIEVKHVNPRGTTNSKEHDELMKRYELDRHTASAYLIALRGLGMMN

SEQ ID NO: 1325 - protein, 351 aa, Unknown
  Description of Unknown: uncultivated organism sequence
  Category: MG61 effectors
  Description: MG61-161 effector
MAGEVREPEVAHITITGRIIPLDNDNYMELVLLAHRFRKSLAKAIKMYAKGINRNTIVKEVTKELNLGYADTIYKLAKLIVAGARHNNSNPLKIRIRKLFIASRGFAANKGNRNIRLLSTSGLQVNIPWKGWVPFKVLFGEQYVPLVKELVEKALAKKLSYSAKIVFRNGEVYLHVSIPVELYLKYFSKGRANGSLVASFDLNSDRINMVIVDRQGIIRDTRTEWFPEVTSHGFPRNKAETIRLQALAKLLDYAYDHGVGIVLFEDLEMIKKRKHTRSRTANRKISRFSKRKLLEHGIIMAMKYGFKVYLVNPAYTSKLGEKLGKEVGLDKHTASAYLTALKGLKKLQQLL

SEQ ID NO: 1326 - protein, 363 aa, Unknown
  Description of Unknown: uncultivated organism sequence
  Category: MG61 effectors
  Description: MG61-162 effector
MLQYQTSDVIATRLITYTTIIGKLIPTSPENHMKLVRLAYDFRRAVLYATRMIGKDMKTNDILKELRNMLNKAYGDSAYKVAKAIVEGCRFNGGEPRHIKIKRLFIVSEGEASRFGNRNVRLETTDIVKVRYPYDKSWIILRTCFGRKYLSLVREVSELAKQRRISYGARIVFKDGRIYLHLSIPINLYLKYFSKGKAHGELVVGFDINSDRMNMVIIDRYGKIRDIKTKWFSEVTSHGYPKSKAKARRLEALAKLLKYTYHHNVGIVVFENLFTIKKREYSRNPTANRKITRFAKKELLRYGILMAMKYGFKVLLVNPRGTTRSKEHDEVMKKLGLDRHVASAYLIALRGIRRYTMIQKAMI

SEQ ID NO: 1327 - protein, 356 aa, Unknown
  Description of Unknown: uncultivated organism sequence
  Category: MG61 effectors
  Description: MG61-163 effector
MSQSRTSSVVDATTLIEYATIVGRLIPASGEDHMKLARLAWEFRRAVQVATKMIAKGEEANIILKELRRMLNKAYADSAFKQAKAIVKGCLATGGDPRRIEVTKLFIISEGETSRNGNRNVRLEDTSLVKVKYPYDGSWIQLEAKFGEKYLPLLRELVELAKQRKVSYNARIVFRRGRIYIHVSVPIYLYLKHFEKGEARGELIAGFDLNSDRINLAIIDRYGGLVDAKTAWFTEVVSHGFPRNKAKALRLRALAKLLKYCYTHGVGIVVFENLYVVKKHRYTKSRNGNRRISKFAKRELLEHAIVMSLKYGFKVLLVDPKGTTNSKEHDEAMKRHGLDRHTASAYLIALRGLNPS

SEQ ID NO: 1328 - protein, 369 aa, Unknown
  Description of Unknown: uncultivated organism sequence
  Category: MG61 effectors
  Description: MG61-164 effector
MVESPLYTIKLAFNVDGDRAKKILSNAWLFKLACHRVLSRSKELLNALISSKIAWIKMFYSDARDLIPNKRYAYGAIYLIYGIWESSRSLKIDYTNVELSDWLMFQHYDREVDGNVVRVYSDGSALVTTYSYDGSKDRVLVKAKPNRGHEKLLKLVVESREKYMPRVLVRGYNVRDRELYISGEIHVTISYDFYLKHVKRYGNPKGDLIGGVDVNADRINLAIIDEKGNLRDYKAFWFSETTARGYPRRGVWSVVGMKIHEMLRYAYNHGVATITLENPEVLSYLKLAWVRNGDRKHENYNYKVSVFRNSIIERIATKAPFYGLNTKFVDPKGTTNSREHDEIMKRFGLDRHTTSAYLIALRGLRNQRT

SEQ ID NO: 1329 - protein, 351 aa, Unknown
  Description of Unknown: uncultivated organism sequence
  Category: MG61 effectors
  Description: MG61-165 effector
MCKLCAHRLLEHIKQTPLLADLSQYDFIEIGRKLCYDIVPNRRYIDGISTLIHASLQSAKALKVDVSRLELRQWLLFQSEAEPWAKGNLNIRFVDYSRVGVLVFDRDKSSKKIIVEPVISKGYAKLVKALVDKALRKEIGYPARIYITDYGERLKHLYGELQVMVKYKLYLEVMRRCDEPLGNNIAGVDVNADRLNLVVINRDGEIVWKYTARFPQVIARGCPGKRAWSIIGEAIHSVLRNAYSHGAFVVAVENPKIVGYLRCYWIKSGDRGHESYNYKKSIFRSSLIERIALKAPLYGLSVKFVNPKGTTSSKEYDKAMKRYGLDRHTASAYLIALKARKTYKNLERPTS

SEQ ID NO: 1330 - protein, 356 aa, Unknown
  Description of Unknown: uncultivated organism sequence
  Category: MG61 effectors
  Description: MG61-166 effector
MSRCQTSSAVRAEKLIPYATVVGRLTANTCDDYMKLVRLVYEFRKAVTYAARMVVRGVNVNEALKELRGMLNKAYGDSAYKVARAIVKGCRLNGGDPRHIKVRGLFIVSEGEASRSGNRNVRVEATDVVRIKYPFDGSWLTFKARFGERYLPLVQELVELAKDCKVSYGARITFRGGRVYLHLSVPVELYLKHFRKGDAKGGLVAGLDLNSDRINMAIVDRCGRIRDIKAEWFPEVVCHGYPRGKARARRLEALARLLNYAYHHGVGRVVFEDLLAIKHRTRTGSPSANRRITRFAKKQLLRHGILMAMKYGFEVLLVNPRGTTRSKQHDEVARKYGLDRHTASAYMVALKGLNLP

SEQ ID NO: 1331 - protein, 374 aa, Unknown
  Description of Unknown: uncultivated organism sequence
  Category: MG61 effectors
  Description: MG61-167 effector
MNEVKYVTLRLPFHAVGEGAKPIYWTAWLSKLCAHRLLDQVKQNPLLASLSQYEFVKMGRSLCYGVLPNRRYVDGVSTIIHASLQSAKALKIDVTKLELKPWLLFQSEAEPRAKGNLNIQFADYSTVKVLVFDKDGTSRKIAIRPVVPKGYAKLVKVLVDKALRREIGYPARIYVRDYGDGLAHLYGELQVMVKYDLYLEVMKRHGKPLGENIAGVDVNVDRLNLVVVNRDGDIVWTHTVRFPQVTARGFPRKKAWSIIGEAVHSVLKNAYSHGASVLAVESPEVIGYLKYYWIRNGNRGSRSYNYRVSIFRNAIIERLVWKAPLYGLKVVPISPRGTTRSKDHDYVMRRYGLDRHTASAYLIALKTRNIVRTY

SEQ ID NO: 1332 - protein, 364 aa, Unknown
  Description of Unknown: uncultivated organism sequence
  Category: MG61 effectors
  Description: MG61-168 effector
MNDTPLYTLKLSFNVSGEVARKILSTAWLFKLACHRVLSKSKELEKHLIPSKVAWIKMFYDDARSFIPNKRYAYGAIYLVYSVWESARGLKVDYKSVELSDWLLFQHYEREVDGNVIRVSEDGSALITTCSYNGSKDRVLVRAKPNRGYAKLLRFAVESREKYMPRVVVRGYNVRGGALYVHGEIHIVISYDFYLKHTTRFREPRGGLVGGVDVNADRINLAIVDEKGNLRDYKTFWFRETTARGYPRRSAWSTVGEKIHEMLRYAYYHGVSTIAMENPETLGYLKLAWIRGNDRRHENYNYKKSIFRSSVIERIAMKAPLYGLSVKFINPKGTTSSRDHAEAMKRYGLDKHTASAYLIALRCI

SEQ ID NO: 1333 - protein, 373 aa, Unknown
  Description of Unknown: uncultivated organism sequence
  Category: MG61 effectors
  Description: MG61-169 effector
MNGPYLTLRLPFNVYRDEARLLLSTARLFRFIVLHLHSLLLEENPHITSLIALKRVYRRRLQEMLPNRRYVDGAITLVYSIYESAQALGVSFSDIEFRNWLLFQQSEKEYPCRNITLQKDYSFRITTINYQGESIRIALKPTIPKNYKQVLDKIIEKKQPYVARVVLKGFGERKKILRVHGEIHLSILYKFYLEHFRRYKRNYGKLYGSVDVNVDRINLAIVDRYGRLRDTKTFWFEEASWKGCPRHRAWSIIGLAIHSMLKYAYHHGVKTLFLENPEALGYLKTLWIKKGERRNSNYNYRVQIFRNRVIERIAMKALLYSINIEYVGPKGTSHSKEHDEIMRKYGLDKHTASAYLIAFKGIERHTTIQKAII

SEQ ID NO: 1334 - protein, 379 aa, Unknown
  Description of Unknown: uncultivated organism sequence
  Category: MG61 effectors
  Description: MG61-170 effector
MSKSVVEYVTLRLPFHVTGENARLIYWTAWLCKICAHRLLELIKQNPILAGLSQYDFIKISRKMCYDIVPNRRYIDGVSTLIHASLQSAKALKVDVSKLELKSWLLFQSEAEPWAKGNLNIQFTDYDTVRVLVFDKDKSTRKITIKPIIPKGYAGLIKTLVDKALKKEIGYPARVYITDYGKRLEHLYGELQVMVRYSLYLEVMKRYDEPRGDNIAGVDVNVDRINLVVINRDGDIVWKYTARFPQVTARGYPRKRAWSIVGEAIHGILKNAYSHGASVIAVENPEVIGYLKYYWVRNGDRKSENYNYKVSIFRNSIIERIVWKAPLYGLHVVTVDPKGTTHSKDHEYVMRRYGLDRHTASAYLIALKARRNLQKPIET

SEQ ID NO: 1335 - protein, 378 aa, Unknown
  Description of Unknown: uncultivated organism sequence
  Category: MG61 effectors
  Description: MG61-171 effector
MKDTGLPDYIAINIPFTVNGEEAKLVWYTAWFSKLCAHRLLNDVKGNDALLGFSQASFLKYARERCYELLPNRRYIDGVATLVHSTLRSARKLGVNIRDIELGQWLLFQSEAESEKRGNLNIRLLSVNRAEVLVLNYDGASKRIDIGLKTPKGYVELLKVLIERAGKYEVGYPARVMVRGYNFRPGNMHLYCGLQVMVPYSLYLNVMRRYSEPRGNLIGGVDVNVNRLNLAIVDRYGRLRDVKTFWFREVTARGFKGVVAWTKIHQAIHELLNYAYHHGVSAISLENPRTIGYLRYYWVRNGDRGSRNYNYRVSIFRSRTIEVISYKAPLYAMRTIYVNPKGTTNSQQHDEVMRRLGLDRHAASAYLIALRGLNKQGR

SEQ ID NO: 1336 - protein, 365 aa, Unknown
  Description of Unknown: uncultivated organism sequence
  Category: MG61 effectors
  Description: MG61-172 effector
MTYITLTFPFNACCDVARRLLSTAWLFRVATHRLLSIARKFPVLPGTDIGWKSTFRGMVHEVIPNRRYADGVVVLVRSIYESCRQLRVDFRSVELSSWLMFQQVELEHPARNITLKPGYEFHVTTVDYGENTHRVVVKPTVPGNYGLLLDKVLRERQRYTGRVVLRSYGIGGGNLWVQGEVQMTIPMDFYYRHMARYRRNDGKLYGGVDVNTDRINLAIIDEDGELIDHKTFWFSEASRKGCSGRRAWSIIGMRIHELLDYAYNNGVKTLFLENPEVLGRLKLMWAKSGDRGHGNYNHKVMTFRSTIIERIALKAPLYGIEVSYVNPKGTTNSKEHDETMKKHGLDRHTASAYLTALKGLTHQRK

SEQ ID NO: 1337 - protein, 376 aa, Unknown
  Description of Unknown: uncultivated organism sequence
  Category: MG61 effectors
  Description: MG61-173 effector
MSKSVAEYITLRLPFHVTGVDAKLIYWTAWLCKLCAHRLLEAIKLNPSLAYLSQYDFIKVGRRLCYDIVPNRRYVDGISTLIHASLQSAKALKVDITKLEPKHWLLFQSEAEPWAKGNLNIQFVDYDKVKVLVFDRDKSSRRIIIEPVIPKGYIRLVKALVDKALKKEIGYPARIYITDYGERLEHLYGEIQVMVKYNFYLEVMKRYDKPLGDNIAGVDVNVDRLNLVVINRDGDMVWKHTVRFPQITSRGCPRKRAWSIIGEAIHSILRNAYSHGASVVAVENPEVLGYLRYYWIKNGDRGTKNYNYRISIFRNSIIERIVWKAPLYGLHVVTVNPKGTTHSKDHEYVMRRYGLDRHTASAYLIALKTRRNLQRP

SEQ ID NO: 1338 - protein, 371 aa, Unknown
  Description of Unknown: uncultivated organism sequence
  Category: MG61 effectors
  Description: MG61-174 effector
MSYITICLPFNVDGVEARRLLSTAWLFRVASHRMLSLAKQFPVLPATDIGWKNTFRKVIYEIIPNRRYTDGVIVLVRGIYESCRQLGIDFKEVKLGGWLMFQQSEKEYPVRNITLKQGYEFHITTISYGGEAERVVIKPTIPKNYKLLLDKILEEKQKHTARVVIKDYGVRRNKVWIHGEIQLTILINFYYKYMTRFKRNYGRLYGGVDVNIDRINLAIVDRYSRLRDAKTFWFEDTARKGYPRRKARALIGMVVHEMLRYAYHHGVKTLFLENPEVLGKLKLLWIRNGRRLHRNYNWRVSVFRSSVIEMVAMKTPLYSIKVDYVDPKGTTHSKEHNEIMRKYGLDSHTTSAYLIALKGIKRHTMIQRAII

SEQ ID NO: 1339 - protein, 364 aa, Unknown
  Description of Unknown: uncultivated organism sequence
  Category: MG61 effectors
  Description: MG61-175 effector
MDETLLYTLKLSFNASGGVARRILSTAWLFRLACYRVLSRSRELKERLVPSKVAWVKMFYEDARSYIPNKRYAYGAIYLVYGIWESARKLKLNYADVELSNWLLFQHYEREVDGNVIRVAEDGSALVTTYNYDGSKDRVLVRAKPNRGYAKLLESVVESKEKYMPRVVIKGYNIRNGTLYIHGEIHVIVSYDFYLKHSARYREPTGDLIGGVDVNVNRINLAIVDKKGNLRDYKTFWFAEATARGYPRQCAWSFIGARIREMLEYAYHHGVSTIALESPEVLGYLKLAWIRGNDRKHEDYNYKKSIFRGSIIERIAVKAPLYGLSVKFVDPKGTTSSIEHDNAMRKYGLDRHTASAYLIALKCI

SEQ ID NO: 1340 - protein, 363 aa, Unknown
  Description of Unknown: uncultivated organism sequence
  Category: MG61 effectors
  Description: MG61-176 effector
MSYVTVALPFNVCGREASLVLSTAWRFKIAAHRVLGVAKEMRMLPGSDIGWRNTFRSLVYEVMPNRRYADGVITLVRGIYESCRQLGVDFREVELGDWLMFQQTEKEYPPRNITLKPGYEVHVTVIDWHGERHRISLKPTVSGRWSKLLDTILEKRIKYTGQIVVEDYGVRDGVLWLHGKVHLIVPYDVYLECMARYKMNMGRLYGGVDVNTDRINLAIVDGSGRLRDIKTFWFEEASRKNCPRQRARSVVGMAVHEMLRYAYHHGVKTLFLEDPGVLGRLRLAWIRNGRRGSRNYNWKVSIFRSSVIEMIARKAPLYAIKTVYVDPRGTTHSQEHDEIMKRYGLDRHAASAYLIALKGLERP

SEQ ID NO: 1341 - protein, 1509 aa, Unknown
  Description of Unknown: uncultivated organism sequence
  Category: MG61 effectors
  Description: MG61-177 effector
MSKRILGLDLGTNSIGWAVVDEAKEEIVNAGVRIFPEGVVSKTIGSGDKEETKNAARRRARQTRRQFYRKRLRKAKLLEVLIEQNMCPLSLDELNKWRHWDKKEKSQAKVFPNSDEFMNWIRMNPYELRARAIIGTVTAMELGRIFYHLIQRRGFLSSRKGDVKESKTLFEKGKPELNILPINRTEKEIAESGCQTMGEYLNRVVPKEGESYKPILDSDGNEIRARGRYATRKMYVEEFEAIWNAQADHLGLDKRSVLFKKVRMLKGNENSERNKKRISTLKKFYGAENVFVENRGNNLHITTTRTLPFKIFLAGDDVELKRNESVLFWQRPLRSQKGTLGNCSFEDTLPVINMDGTQRKNEKGKPVTYSKKPCPISHPLFELFRTHQFINTIEFGEKQRLSKDQKKQVLELINRKDNAFSFKEIVKKLELFSETFNYENDFKVSGNYTISKLSKLLGKKVWDEHPLAYWEAFYFYDDSTKLQKKLNKAYGLNLKVEEVDKIRLKEGYSRVSIKAIQNILPFLEKGYFYSTAVILGGVKNAFGSRWDSYLQDETKEKIEDDILKMLKDKNKEGELIEKIKAYLSDSSNRYGFSENSPAFKKLYHHSQSVEKKELKNKLPPVENIRNPIVQQSLYEMRKVVNALLEKYKEEDPTFSFSSIRVEMGRDLKNGKKQRQKINQVIRKNRENNDEARERLAEFGLQPSRNNIQKYLLFKEMERRAGHVQSPYTGRTISLTDLLGKDNLIQIEHIMPFSKSLNDSFANKTLCESSVNGLKGDKTPYAFYHQNPDPKIWGVSSWDEVKHRAFKLLPYAKAKRFVSDKSVDAEDFISRQLNDTRYIAKKATEILSEICSDVQVMPGQLTAELRHLWGLNNVLESSFGVTKQFSDIPLKPGEYYLVLNEQRESIQLIPKHNPKPKTNPNELLVAGEINNAIFESKKLVLELGAPDQANGKYWAKLTLKPIQKFSPKYISKPITDENRIVFKGLVKNQRFSSDSIPKNPIAEHKDGIYWGSFAVKNKRIERSTVAPITNRKEIKLFGEVKDGIFKSYIYECSTTAENGKYWLVLEPDFETPEFIQASNPEPQHSENEHIITGTIDDNGVFVSDLDPSYSVKTDHSAGKYYAVIELASKENDFYLMENPAPKVEKEHRLIEGTVWVDKYSSELKFDPKKNREDQRHHAIDAITIALTKRGYLNALSHYRAKELPEDYKPSFPEPWDGFEHDVKNAAEKILISYRKNDRIISKGKKGFSVRGQLHKENVFGKHKGKEDEKKSFYHRRKYLNDLKTNKHVSKIVDERIKQLVLDHLKNSCGVNISSEKGFKIPPNAFFTKDGKPRLFLPPNPRKKKNSQPVPIKKVRIKEEIGNARQLKNGINQYVNPRNNHHVMVYKTHSGDVKESIISFWDAVNRMKKNQSVYQLPEDGVEILAVLEQNDMYLIGITDEELEKRKNDQKFLSNHLYRVQKLSSMYYTFRHHLASTVTNPDEEERIVSFDRFQLRNPKKVKISELGEISLC

SEQ ID NO: 1342 - protein, 365 aa, Unknown
  Description of Unknown: uncultivated organism sequence
  Category: MG61 effectors
  Description: MG61-178 effector
MTYVTLVLPFNAGGDTTKRLLSTAWLFKTAVHRVLDVAKRSPVLPGTDIGWKSAFRSLAYSVIPNRRYADGAVTLVRSIYESCRQLGVDFKSVELSDRLMFQQSELEYPARNITLKPGYEVHVTTISYDRESYRDVIKLVAPKNYSTLLSKIIEERQEYSGRVVVKGCGVRDNTLWVRGEVQITIPVDFYYKHADRYREPKGDLVGGVDVNADRINLVVVDEKGNLRDYKTFWFEKTTARGYSRRRTWSVIGMRIHEMLEYAYRHGASTIVLENPEVLSKLKLLWIRRGDRRHENYNYKVSIFRSSIIEMVALKAPLYGLEVEYVNPRGTTNSVEHDMLMKEHGLDKHTASAYLIALRALAHQST

SEQ ID NO: 1343 - protein, 363 aa, Unknown
  Description of Unknown: uncultivated organism sequence
  Category: MG61 effectors
  Description: MG61-179 effector
MNYITITLPFNAHGKTARLLLSTARLFRITVLKVYEKLLEDKVKYISPIMLKKYYRSLAYEIIPNRRYADGALTLIWSIYESCEALGVPFNEIEWKNWLMFQQTEKEFPCRSITLRRNYTVGVSVIGFNGEKEKIELSPTVSRNYMKLIDYVIEERIPYTGRVVLKGYGERRGVLWVNGRIDVTVPYSAYFEVMRKFKRNYGKLYGGVDVNSDRLNLAIVDGNGRLRDTYTFWFREVTARGYSRHSAWSIIGMRIHEMLKYAYHNGVKTLFLEDPEVLGRLRLYWVRNGERLHENYNWKVSTFRCSIIERITMKAPLYSIKVKYVNPRGTTNSRKHREIMKKHRLDQHNTSAYLIALRGLNLF

SEQ ID NO: 1344 - protein, 364 aa, Unknown
  Description of Unknown: uncultivated organism sequence
  Category: MG61 effectors
  Description: MG61-180 effector
MTYITLVLPFNASGDVAKRLLSTVWLFKIASHRLLDIAKQTLVLPRTDTGWKITFRRVTYDVIPNRRYADGVVTLIRGIYESCRHLGVGFKSVELSDWLMFQQSEKEYPPRNITLKPGYEVHVTTISYSGESYRDVVKPSIPKSFSTLVDKIIEESQEYTGRVVVKDSSVRDCTTWVRGEVQVTVPVDFYYKHMARHREPKGNLIGGVDVNVDRVNLAIIDENGNLRGYKTFWFREATARGYPRRSARRVIGARIHEMLDYAHHQGVSILTLENPEVLGKLRLLWVKHGERGHENYNYRVSAFRCRVIEMIALKAPLYALEIKYVNPAGTTNSKDHDEAMRRYGLDKHASSAYLIATRSLNQKR

SEQ ID NO: 1345 - protein, 365 aa, Unknown
  Description of Unknown: uncultivated organism sequence
  Category: MG61 effectors
  Description: MG61-181 effector
MSYVTLCLPFNVGDDVAGKLLSTSWLFKAASHRMLDLAKQMPILPATDIGWKNTFRKIIYEITPNRRYTDGVIVLVRGIYESCRQLGVGFKDVELRDWLMFQQVEKEYPVRNITLKQGYEFHITTIDYNDGVERIVVEPTIPKNYKLLLDKILEEKQKHTARVVIKDYGVRKNKLWIHGEIQLTIPLDFYRKHMTRYRRNYGKLYGGVDVNSDRINLAIIDSEGNLRDTYTFWFREVTARGYPRRKARSVIGMRVHEMLKYAYHHGVKTLFLENPEVLGKLRLLWVRNGKRLHKNYNWKVATFRSSIIEIIAMKAPLYSIKIGYIDPKGTSNSGEHDKYMRKYRLDKHTASAHLIALKGLNHEFK

SEQ ID NO: 1346 - protein, 364 aa, Unknown
  Description of Unknown: uncultivated organism sequence
  Category: MG61 effectors
  Description: MG61-182 effector
MVENAFYTIKLAFNVGGDRARKVLSTAWLFKLACHRVLSRSKELLNALIPSKIAWVKMFYSDARDLIPNKRYAYGAVYLVYGIWESSRSLKIDYRNVELSNWLMFQHYDREVDGNVVKVLEDGSALVTTYSYDSSKDRVLIKAKPNRGHGELLKLVVESKEKYMPRVVVRGYNVRNGKPYVNGEIHVTIGYDFYLKHMTRHREPKGSLIGGVDVNADRINLAIIDEKGNLRDSKTFWFTEAVTRGYPRRKAWSVIGMKIHEMLRYAYNHGVSTIALEAPEVLGYLRLAWVRDGGRKHENYNYKKAIFRSSVIERIAMKTPLYGLNTKFVDPKRTTSSREHNEIMKRFGLDRHTASAYIIALRSI

SEQ ID NO: 1347 - protein, 353 aa, Unknown
  Description of Unknown: uncultivated organism sequence
  Category: MG61 effectors
  Description: MG61-183 effector
MLLSTARLFRQVVLHLHNLFLKENLRITSLIALKRMYRKRLQEILPNRRYVDGAITLVYSIYESAQALGVPFSDIEFKNWLLFQQSEKEYPCRNVTLQRDYSFRVTTISYQGESKRTSLKPTVPKNYKQILDKIIEKKQPYVARIVLRGFGERKNMLWIHGEIHLSIPYKFYLEHFSKFKRNYGKHFGGVDVNVDRINLAIVDKYGRLRDVKTFWFEEASWKGCPRQRAWSIIGMAIHNMLRYAYYHEVNTLFLENPKVLGYLKILWIRKGKRKNRNYNYRVQIFRSSVAEKIAMKAPLYTINIEYIDPKGTTHSKEHDEIMRRYGLDKHTVSAYLIALRGIERRIMIQKAIV

SEQ ID NO: 1348 - protein, 369 aa, Unknown
  Description of Unknown: uncultivated organism sequence
  Category: MG61 effectors
  Description: MG61-184 effector
MSQYQMHRVRDASKLVEYVTIVGRLEPLTEEDYVKLVRLAHEFRKAATYATRMIAKGIDPNTVLRELRSMLNKAYGDSAFKLAKAIVESARSNNGNPLKIEIRRLFIVSEGEAGRLGNRNVRLDDSSTVRIRYPYERSWLSFRARFGENHVPLVKELSELAKSRKCSYGAKIVFRKGRVYLHLSVPVELYLKYFGRGEAIGSLIAGFDLNSDRVNMVIVDKYGRVVDVRTAWFPEVTSPGYPGSKAMVVRLRALAELLNYAYHHGVGVVVFEDLDKIKQRRFTSSPTANRKITRFAKKQLLTHAVVMALKYGLKPVLVDPRGTTSSPVHSTVMKKHGLDRHTASAYLIALRYLQDEKTVNGHKAHKQYK

SEQ ID NO: 1349 - protein, 381 aa, Unknown
  Description of Unknown: uncultivated organism sequence
  Category: MG61 effectors
  Description: MG61-185 effector
MSLPEYITIDIPFTATGEEAKLIWCTAWFSKLCAHRLLSDVKRNEVVIDLSQISFLKYARKRCYDILPNRRYIDGVATLIHSTLRSARKLGVNIKSIELRQWLLFQSEAEKEKKGNLNIRLTTINKAELLVINHKKEPKKIVIDLRIPKGYRKTLETLIKKALNREIGYPARVVIKEYNFYPNNLHLYCSLQVMIPYDLYLETMRRYDKPLGDHIAGIDVNVDRLNLAIVDKYGRLKDVKTFWFREITNRGYRRKPAWTKVHQAIHDMLDYAYNHGVSLVALENPKVIGYLRYYWIKNGDRKSRNYNYRKSIFRNKIIEAVTYKAPLYSLKTIYVNPRGTTKSREHDKVMRRYGLDRHTASAYLIALRGIKRHTMIQKAIT

SEQ ID NO: 1350 - protein, 363 aa, Unknown
  Description of Unknown: uncultivated organism sequence
  Category: MG61 effectors
  Description: MG61-186 effector
MTYITLTFPFNACCDVARRLLSTAWLFRVATHRLLSIARKFPVLPGTDIGWKSTFRGMVHEVIPNRRYADGVVVLVRSIYESCRQLRVDFRSVELSSWLMFQQVELEYPARNITLKPGYEFHVTTVDYGGNTHRVVVKPTVPGNYGLLLDKVLRERQRYTGRVVLRSYGIGGGNLWVQGEVQMTIPMDFYYRHMARYRRNDGKLYGGVDVNTDRINLAIIDEDSELIDHKTFWFSEASRKGCSGRRAWSIIGMRIHELLDYAYNNGVKTLFLENPEVLGRLKLMWAKSGDRGHGNYNHKVMTFRSTIIERVALKAPLYGIEVKYVNPKGTTNSVEHDEAMRKHGLDRHNASAYLIALRGLKHQ

SEQ ID NO: 1351 - protein, 368 aa, Unknown
  Description of Unknown: uncultivated organism sequence
  Category: MG61 effectors
  Description: MG61-187 effector
MNYVTLVLPFNIGGDTAKRLLSTAWLFKAAVHRVLGVAKQSPALPGTDIGWKSAFRSIAYSVIPNRRYADGAVTLVRSIYESCRQLGVDFRSVELSSWLMFQQSEKEYPARNITLKHGYEVHVTTISYSKESHRDVIKPSIPKSYSALLSRIIEERQEYSGRVVVKGYGVRGNTLWVRGEVQITIPADFYCKHMAKYREPKGSLIGGVDVNVDRVNLAIIDEKGSLRDYKTFWFTEATVRRYPRKRARSVIGMRVHELLKYAYHHGVSTIALESPEVLGRLKLLWARRGDRKHEDYNYRKSVFRSSVIEMIALKAPLYGMKVEYVDPRGTTNSTEHDRLMKVCGLDRHTASAYMIALRGLAHQVKQMK

SEQ ID NO: 1352 - protein, 369 aa, Unknown
  Description of Unknown: uncultivated organism sequence
  Category: MG61 effectors
  Description: MG61-188 effector
MDYITIKLPFNVDGDVAKGLLSTAWLFRVAAHRVLALARQQESLPGSRIGWKNMFRQFAYGIIPNRRYADGAVILVMSIYESCRELGVDFKGVELSDWLMFQQSELEYPAKSITLKPNYEFHVTTVRYDGSTGRVVVKPTIPRSYGELLNAVLAERVKYMGRVVVKDYGVRGNQLWVRGEVHMTVPLDVYYERMARHKRNGGKLFGGVDVNTDRVNLAIVDEGGDLRDYKTFWFSEVTARGFPRHSALSIIGMRIHEMLNYAYHHGVKTLFLENPEVLGRLKLVWIRNGDRGRENYNHKVATFRSTIIERTALKAPLYSIEVGYVSPRGTTNSEEHDELMRKYRLDRHTASAYLIALKGLITNGNKHYD

SEQ ID NO: 1353 - protein, 363 aa, Unknown
  Description of Unknown: uncultivated organism sequence
  Category: MG61 effectors
  Description: MG61-189 effector
MTYVTLTFPFNICCDVAKRFLSTAWLFKIATHKLLGVAKQSPVLPGTDIGWKNTFRGIVYEVIPNRRYADGVITLVRSVYESCRQLGVDFRSVELSDWLMFQQGELEYPARNITLKPGYEFHITTIDYSKNSYRDVVKPIIPKSYRLLLDKVLDERERYTGKVVLKSYGIKECNLWVQGEVQITIPIDFYYKHMARAKAGNGKLYGGVDVNVDRINLAIVNGGGELRDVYTFWFEEASRKGCSRQRVRSIVGMRVHEMLEYAHRHGVKVLFLENLEVLGKLKLLWIRSNDRRHENYNYKVSVFRSSVIEMIALKAPLYSIEVKYINPKGTTNSEEHDEIMKRFGLDRHIASAYLIALRGLRHR

SEQ ID NO: 1354 - protein, 365 aa, Unknown
  Description of Unknown: uncultivated organism sequence
  Category: MG61 effectors
  Description: MG61-190 effector
MSYVILRLPFNINGGVAKELLSTAWWFKTAAHRVLSLAKRMQFLPGAKIGWVNMFRGIAYEIVPNRRYADGAVTLVMGVYESCRALGIDFRGVELGDWLMFQQSELEYPAKSITLRPGYEFHVTTIKYDGLIGRVVVKPTVSEDYRELIDAIYRERIKYMGRVVIRDYGARNNQLWVHGEIHITVPLDIYYEHMAKHRRNSGRLFGGVDVNTDRINLAIVDEGGDLRDYKTFWFSETMARGFLKHRAWSIIGMRIHELLDYAYNHGVKTLFLENSEVLGRLRLMWVWNGGRNHENYNYKVMIFRSTIIEKIALKAPLYSIRAGYVNPRGTTNSKEHEEAMRRYRLDRHTTSAYLIALKGLTHQQK

SEQ ID NO: 1355 - protein, 364 aa, Unknown
  Description of Unknown: uncultivated organism sequence
  Category: MG61 effectors
  Description: MG61-191 effector
MSQYQTHRVINASKLVEYVTIVGRLEPLTEEGYVKLVRLAHEFRKAVTYATRMITKGIDSKAVLRELRSILNKAYGDSAFKLAKAIVESAGVNDGNPLKVEIRKLFIVSEGETSRQGNRNVRLDDSGIVRIKYPYDRSWLIFKARFREEYVPLVKELSELARSKKLSYGARVVFRSGRVYLHLSVPVELYLKYFRRGEARGSLIAGFDLNSDRVNMVIVDEYGRIVDMRTAWFPEVTSHGFPRNRAKVARLQALSKLIEYAYHHGVGVTVFEDLGRIKRREFTGSPTANRKISRFAKRQLLAHVVVMSLKYGLKPALVDPRGTSSSHEHYFIMEKYGLDRHTASAYLIALKYLRDENHEPSQST

SEQ ID NO: 1356 - protein, 302 aa, Unknown
  Description of Unknown: uncultivated organism sequence
  Category: MG61 effectors
  Description: MG61-192 effector
MRLCLIADMLVIVLVRGIYESCRQLGVNFKEVELGNWLMFQQTEKEYPVRNITLKQGYELHITTLDYDGNSERIVIKPTTPKNYKLLLDKILEERQKHTARVVVKDYGIRKGKLWVHGEIQLTIPLNFYYKYTTRYKRNYGKLYGGADVNSDRINLAIVDKEGNLRNTYTFWFREVTARSYPRRKARTIIGMRIHEMLKYAYHHGVKTLFLENPEVLGRLKLMWMRNGKRLNRNYNWRVTTFRSSIIEMIAMKASLYAIRVMYVNPKGTTSSEKHDGIMRKYRLDKHTASAYLITLKGLDLL

SEQ ID NO: 1357 - protein, 356 aa, Unknown
  Description of Unknown: uncultivated organism sequence
  Category: MG61 effectors
  Description: MG61-193 effector
MAGEIREPGVTHVTVTGRVVPLDSNSYMELVLLAHRFRKALTKAVKMRARGVDKNAIVKEITRELNLGYADTIYKLAKLVVEGARRNNSNLLKVEIRKLFVASRGFSSNKGNRNIRLLSTSELEVNIPWRGWVKFRVLFGGQYIPLVSELIEKALRRELSYTAKIVFRNGRPYLQVSTPIELYLKHFKKEVARGDLIAGFDLNSDRINMVIVDKLGVIRDVKTEWFPEVTSPGFPREKANTLRLQALAKLLGYAYHHGVGVVVFEDLERIRGRRYTKSRSANRKIGRFPKRKLLQYAIVMALKYGFKVYLANPAYTSKIGEKLGKELGFDKHTASAYVLALKALQPENYKLLTELR

SEQ ID NO: 1358 - protein, 369 aa, Unknown
  Description of Unknown: uncultivated organism sequence
  Category: MG61 effectors
  Description: MG61-194 effector
MDYLTIKFPFNANGDVAKELLSTAWLFKIATHRVLSLVKQQQVLPGTRVGWKGMFRGIAYGVVPNERYADGAITLVMGIYESCRALGIDFRSAELGDWLMFQQSSLEYPSRNITLKPNYEFHITTIRFNGSIDRVVVKPTIPRSYEKLLGAVITKRVGYMGRVVVRDYGVRGNQLWVRGEVQVTIPLDIYYEHMSKHKRNAGKLVGGVDVNTDRINLAIIDEDGELIDHKTFWFSEVTARGFPKHSAWSIIGMRIHELLNYAYHHGVRILFLENPEVLGRLRLMWIRSGDRGHENYNHKVTTFRSTIIEKIALKAPLYSIEVKYVNPKGTTNSTKHDELMKKHGLDRHTTSAYLIALRGLGINKYVHYK

SEQ ID NO: 1359 - protein, 286 aa, Unknown
  Description of Unknown: uncultivated organism sequence
  Category: MG61 effectors
  Description: MG61-195 effector
MAREVRKPEITHVTITGRVIPLNNDSYMELVLLAYRLRITLIKAIKMTTKGLGKNTIVKEVTKELNLGYADTIYKLAKLIVEGAKSNGSNPLRVKLRRLFIASRGFTANKGNRNIRLLSSSELQVNIPWKGWVKFKVVSGKRCIPLVYELVEKALSKKLSYTAKIVFRNGKVYLHISIPIELYLKYFSKGRAKGKLIAGFDLNSDRVNMVVVNRQGIIRGTKTEWFPEVTSHGFPRNKANTIRLQALAKLLDYAYHHGVGVALFEDLDRIKKRRYTRSKTANRKIT

SEQ ID NO: 1360 - protein, 363 aa, Unknown
  Description of Unknown: uncultivated organism sequence
  Category: MG61 effectors
  Description: MG61-196 effector
MGYVTLCLPFNVDGVEARELLSTAWLFKAATHRVLYLARRAQALPATDIGWKDAFREAVYEVVPNRRYADGVVVLVRGIYEACRQLGVDFKDVELGDWLMFQQVEKEYPVRNITLRRGFELHITAIGYDGEVERIAVKPTVSKAYRALLDKVIEEKQKHTARVVIKGYGVRRDKLWVHGEVQLTLPLDFYYKHMTRYRGNYGKLYGGVDVNADRINLAIVDENGGLRDTYTFWFREVTARGYPRRRARSVIGMKVHDMLRYAYHHGVKAIFLESPEALGRLRLLWIRNGKRLHENYNWKVAAFRSSIIEMIAMKAPLYSIKVGYVGPRGTTHSKEHDEVMKKHRLDKHTASAYLIALKGLKQP

SEQ ID NO: 1361 - protein, 373 aa, Unknown
  Description of Unknown: uncultivated organism sequence
  Category: MG61 effectors
  Description: MG61-197 effector
MNETYLTLRLPFNACDVEAGMLLSTARLFRQVVLHLHNLFLKENLRITSLIALKRMYRKRLQEILPNRRYVDGAITLVYSIYESAQALGVPFSDIEFKNWLLFQQSEKEYPCRNVTLQRDYSFRVTTISYQGESKRTSLKPTVPKNYKQILDKIIEKKQPYVARIVLRGFGERKNMLWIHGEIHLSIPYKFYLEHFSKFKRNYGKHFGGVDVNVDRINLAIVDKYGRLRNVKTFWFEEASWKGCPRQRAWSIIGMAIHNMLRYAYYHGVNTLFLENPKVLGYLKILWIRKGKRKNRNYNYRVQIFRSSVAEKIAMKAPLYTINIEYIDPKGTTHSKEHDEIMRRYGLDKHTVSAYLIALRGIERCIMIQKAIV

SEQ ID NO: 1362 - protein, 371 aa, Unknown
  Description of Unknown: uncultivated organism sequence
  Category: MG61 effectors
  Description: MG61-198 effector
MSYITLTLPFNIDGGEARKLLSTAWLFKIASHRMLSLVKQFPILPATDIGWKNTFRKIIYEIIPNRRYTDGVIVLVRGIYESCRQLGIDFKEVGLGDWLMFQQTEKEYPVRNITLKQGYEFHITTINYNGNSERITIKPTIPKNYKLLLDKILEEKQKHTARIVIKDYGVRKNKLWIHGEIQLTIPLNFYYKCMVRYRRNYSRLYGGVDVNVDRINLAIIDRYGRLRDVKTFWFEDATRRGYPRRKARILIGMAVHGMLQYAYHHGVKMLFLENPSILSRLRLIWIRNGRRLHRNYNWKISVFRSSVIETISMKAPVYSINTEYIDPKGTTHSKKHDEVMKKYGLDRHTASAYLIALKGIKGYRMIQKATD

SEQ ID NO: 1363 - protein, 363 aa, Unknown
  Description of Unknown: uncultivated organism sequence
  Category: MG61 effectors
  Description: MG61-199 effector
MSFITLRFPFNVDGDAAKGLLSTAWLFKIAAHRVLDVAKQQEVLPGTKIGWVNVFRGIAYGVVPNRRYADGAVTLVMGVYESCRALGVDFRSVELGDWLMFQQSELEYPSRSITLKPNYEFHVTTVGFDGTVGRVILKPTIPRNYKELLDTVITEHVKHMGRVVITDYGVRNNRLWVHGEVQVTIPLDVYYEHMSKHKRNSGRFIGGVDVNTDRINLAIIDSVGRLIDHKTFWFSEASRKGFSRHSAWSIIGMRIHETLNYAYHHGVRALFLENPEVLSRLRLMWVRGGDRKHENYNHKVSIFRSTIIEKIAMKAPLYSIRAGYVSPRGTTNSKEHDEAMKRYELDKHTASAYLIALKGLTHQ

SEQ ID NO: 1364 - protein, 293 aa, Unknown
  Description of Unknown: uncultivated organism sequence
  Category: MG61 effectors
  Description: MG61-200 effector
MTYIMLVFPFNVCGDVAKRFLSTAWLFKIATHRLLNVVKHFPVLPATDIGWKNTFRGITYEIIPNRRYADGVVTLVRSIYESCRQFRIDLKSVELSNWLMFQQSELEYPARNITLRSGYEFHITTVDYNKNTYRDVVKPIIPKNYKPLLDKMLEERHKYTGRVAVKSYGIRKYNLWVRGEIQITIPTDFYYNHMTRYRESKGSLIGGIDVNVDRLNLAIIDEKGNLRDCKTFWFSEAVARGFSRRGARSIIGAKIREMLSYAYHHNVKILFLENPEVLSKLKLLWVRNGDRKT

SEQ ID NO: 1365 - protein, 305 aa, Unknown
  Description of Unknown: uncultivated organism sequence
  Category: MG61 effectors
  Description: MG61-201 effector
MGLLSERYADGAVTLVMSIYESCRELGVDFKGVELSNWFMFQQSELEYPAKSITLKQNHGFHVTTVRFDGVIGRVVVKPTIPRSYKELLDAILTERIKYVGKVLIDGVGARGSQLWVHGEVQVTIPMDVYYEHMARHRRNAGKLIGGVNVNSDRINLAIIDEDSEPIDHKTFWFSEASRKGFSRHKAWSIIGMRIHETLNYAYRHGVKTLFLENPEVLGRLKLVWIRSGDRKHENYNYKVMTFRSSIIERITMKAPLYGIETKYVNPRGTTNSEEHDEAMRKHRLDKHTASAYLTALRGLKHQQK

SEQ ID NO: 1366 - protein, 364 aa, Unknown
  Description of Unknown: uncultivated organism sequence
  Category: MG61 effectors
  Description: MG61-202 effector
MVENPLYTIKLSFNASGDRAKKILSTAWLFKLACHRVLSRSKELLNALIPSKIAWVKMFYSDARDLIPNKRYAYGGIYLVYGIWEGTRELGIDYRSIELSDWLMFQHYDREVDGNVIRILEDGSALVTTYSYDGSKDRVLIKSKPNRGHGELLKLVVESKEKYMPRVVVRGYNVRSGKLYVSGEIHVTIGYDFYLKHATRYGEPRGSLIGGVDVNSDRINLAIVDEKGNLRDCKTFWFSETTARGCPRRKAWSIIGMKIHEMLRYAYEHGVSTIALENPEALGYLKFAWVREGDRKHENYNYKIAVFRNSIIERIAMKAPLYWLDVKFVDPRGTTSSREHDEIMKRLGLDRHTASAYIIALRNI

SEQ ID NO: 1367 - protein, 363 aa, Unknown
  Description of Unknown: uncultivated organism sequence
  Category: MG61 effectors
  Description: MG61-203 effector
MSYVTVVAGFNASGEEAKLLFSTAWLFKLATYRVLSVAQNMPILPVSRIAWKNVFRRVAYEVIPNRRYADSTVILVMGIYESCRQLGIDFRRVELGDWLMFQQTEKEYPPRNITLKSVDEAWVTVFGYDLEARRVKLRVSTSGSFKELLGKVLEEKQPYNPRIVIRSWNARDGILYVRGELHISIPLGFYYKHMTRYGRNCGKLYGGVDVNVDRVNLAIVDEYGRLRDTKTFWFEEASWKGCPRQRAWSIIGMAIHNMLRYAYHHGVKTLYLENPETLGHLKTLWIRKSDRGNSNYNFRVQVFRTRIVEKISLKAPLYSIDTRYVDPRGTTSSRKHGEIMRKYGLDRHTASAYLIALKGLKQP

SEQ ID NO: 1368 - protein, 373 aa, Unknown
  Description of Unknown: uncultivated organism sequence
  Category: MG61 effectors
  Description: MG61-204 effector
MGIYPSSGLKVSYVTIVTGFNASDEKARLLLTTAWLFKVATHRLFNIVKQMPVLPASDIGWKSAFYKAVYDVIPNRRYSYGVITLVRSVYESCRQLGIDFRSVKLSDWLMFQQSEKEYPPRSITLKSPSEVEVTVFSYSKESKRVALRVSTSGVYRKLLDVILREKQLYMPRIYVKSWNVRDGKLFVRGELQIAIPVDFYYKHMPRASANNGKLYAGVDVNVDRVNLAIVDGDGRLRDVYTFWFEEASRKGCSRHRARSIIGMRVHEMLEYAYSHGVKVLLLENPEVLGKLKLLWVRSSDRRHENYNYRKAIFRSSVIEMIALKAPLYSIEAKYIDPKGTTNSREHDDVMRKYRLDRHTASAYLIALKGLKQP

SEQ ID NO: 1369 - protein, 356 aa, Unknown
  Description of Unknown: uncultivated organism sequence
  Category: MG61 effectors
  Description: MG61-205 effector
MSRYQTSSVVDTSSIVNYVTIIGRAYPASSEDYMRLVRLAWNFRRAVQVATRMTVKGLEEDSILRELRRMLNKAYADSAYNAAKAMVEGCIFNGGNPLHIEVRKLFIISEGESSRLGNRNVRLEDTCLVKVKYPYDSSWITLRAEFGEKYLPLLRELVDLAKQKKLSYTARIVFREGSIYLHLSIPIQLYLKYFKKGEARGELIAGFDLNSDRVNLVIIDEHGRILDTRTAWFPEATSHGFPRGKAKALRLNALARLLEYCYRHSVSIVVFENLLSVKRKRFTRSKIANRKITRFAKKQLIQYSVVMALKYGFRVFLVDPKGTTNSREHYDVMRKYRLDRHAASAYLIALRGLRHQ

SEQ ID NO: 1370 - protein, 321 aa, Unknown
  Description of Unknown: uncultivated organism sequence
  Category: MG61 effectors
  Description: MG61-206 effector
MLPATDIGWKSAFREALYEVIPNRRYADGAIVLIRGIYEACRQLGVDFKEVELGDWLMFQQAEKEYPVRNITLRRGFEFHITTIGYDGEVERAVVKPTIPKTYRTLLDKVIEEKQKHTAKVVIKGYGVRRSELWVHGGIQLTIPLDFYYKHMTRYRGNYGKLYGGVDANTDRINLAIVDENGGLRDTYTFWFREVTARGYPRRRARSIIGMKIHEMLKYAYHHGVKTISLENPEMLGRLRLLWIRNGRKLHKNFNWKVSTFRSSIIEMIAVKAPLYSITVKYVDPKGTTHSKEHDEIMKKRRLDKHTASAYIIALKGLKLP

SEQ ID NO: 1371 - protein, 340 aa, Unknown
  Description of Unknown: uncultivated organism sequence
  Category: MG61 effectors
  Description: MG61-207 effector
MCVSRYQMLKPGGASRLIEYVTVTGRLEPLTEEDYMKLVRLAHEFRKAVVYATRMIAKGLDSNAVLGELRLMLNKAYGNSAFKLARTLIEGARAKGEDPLRIEVERLFIVSEGEASRQGNGNVRLGDPGTVRIRYPYDGSWLSFRSRFGEEYVPLVKELSELAKSKRCSYGARVVFRSGRIYLHLSVPVELYLKYFRKGKAGGDLIAGFDLNSDRINMVVMDEHGRIVDTRTAWFLKVTSPGFPRNKARVARLQAFSKLIEYAYYHGVGVAVFEGLDKVKRREFTSSPTTNRKMSRFAKRQLLTHAVIMSLRYGLKPVLVDPRGTTSSPIHLVIMKIWFR

SEQ ID NO: 1372 - protein, 370 aa, Unknown
  Description of Unknown: uncultivated organism sequence
  Category: MG61 effectors
  Description: MG61-208 effector
MSQCQTSSAGGVEADVVDASKLVKYVTVTGRLAPISSEDHMKLARLAHDFKRAVLMATRMVAKGVREAEVLRELRKRLNKAYADSAFKTAKAIVEGCLFNGGNPLHIEVRKLFIVSEGEASRLGNRNVKFEGTDIIKVKYPYDGSWLSLRAEFGGEQLPLVKELVDLAERRRISYRTEIVFRSGKVYLHLSIPIELYLKHLGRGRGRRGRGGLVAGIDLNSDRVCMVVVDSLGRVRDLKTKWFSELTSHGFSRGRARARRLEALSKIFEYARDHNVGVVVFEDLFKVKRRRFVKSRKANRKISKFAKRKLLQHGVVMALRRGFEVLLVEPRGTTSSEEHAKVMRELGLDKHVASAYLIALRGLHEAGARK

SEQ ID NO: 1373 - protein, 362 aa, Unknown
  Description of Unknown: uncultivated organism sequence
  Category: MG61 effectors
  Description: MG61-209 effector
MLYLQKPSSVEELVTHVTVIGKLVPETSEDYMKVARLAWSFRRAVELMVREIANGTSMKEATKRLYHVLPNYVYLESAYKHAKLIAEGCKFNNSNPKHIHIKKLFIISRGNKYDVGNRNVKLVSEGSFFRALIKYPWDGSWITCRAFFGEKYIPLLLELVELTKQRKDGYGSHIVFREGKVELHVSVPLNLYLKHFSLQRRRGYGLVAGLDLNSDRINMLVMDSSGRIVTLKTTWFPEVTLHGYPRNKTQDIRLKKLKELLSYARRIGVDYVILENLFMVKRRNRVRSPSGNRKITRFAKKQLLQHGLLTALKLGLTPVLISPKGTTNSREHEEVMKSRGLDRHVASAYVIAQRGLEVIKSH

SEQ ID NO: 1374 - protein, 362 aa, Unknown
  Description of Unknown: uncultivated organism sequence
  Category: MG61 effectors
  Description: MG61-210 effector
MTYITLTLPFNISGGVAGRLLSTAWLFKVASHRLLDVAKQTPVLLGTDVGWKNAFRRIVYDVIPNRRYADGVATLVRGIYESCRQLNVDFKSVELSDWLMFQQSELEYPARSVTLKPEYEVHVTTISYSGESYRDVIRPSIPKGLSALVGKIIEERQEYAGRVVIKDFGVRDGTIWVRGEAQVTVPVDFYYKHMARYKEPRGSLIGGVDVNVDRVNLAIVDKNGDLRDYKTFWFGEATARGYPRRSARSVIGMRIHEMLDYAYHHGVSTIALENPEVLGKLRLLWVKHGKRGHENYNYRVSVFRCRVIEMITIKTSLYAVKVKYVNPASTTNSKEHAETMERYGIDRHTSSAYLIALKAQNQ

SEQ ID NO: 1375 - protein, 366 aa, Unknown
  Description of Unknown: uncultivated organism sequence
  Category: MG61 effectors
  Description: MG61-211 effector
MSRCLTSSVVNGADVVRYVTVTGRLVPHTPEDFMKLIRLARDFRRAVVYATRMIVKKLDRNEVLRELRSMLNKAYGDSAYKVAKALVKGAKFNGGDPRRIEVKRLFIVNGGEASRLGNRNVRLESTDTVKVKYPHDGSWLTFRACFGEEYLPLVSELVELARARKASYGARMIFRSGRVYLHLSIPVELCLKHFRRGEARGNLAAGFDLNSDRINMVIVDRYGRIRDVKTAWFPEVTSHGFPRNKAKARRLEALAKLFEYAYYHGVGTVVFENLLAIKHRRYVRSPTANRKIAKFAKRELLQHAIVSAMKYGFKVLLIDPRGTTRSREHDETMRKHGLDSHAASAYLIALRGIEGYRKYNLRFQPT

SEQ ID NO: 1376 - protein, 362 aa, Unknown
  Description of Unknown: uncultivated organism sequence
  Category: MG61 effectors
  Description: MG61-212 effector
MSYITLRFPFNAGGDVAKELLSTAWLFKIATHRVLRITKQQQTLPITKIGWKTTLRKVAYDVIPNERYADGSITLVMGIYESCRELGIDFGSVELSDWLMFQQSWLEYPSRSISLKPNYEFHTTTIRYNGTTSRVVVKPTIPRSYKQLLDTIITEHVKYIGRVVIRDYGVRDNQLWVRGEVHMTVPLDVYYERMARHKRNGGKLFGGVDVNVDRINLAIINDDGELIDHRTFWFSEVTARGFPKHRAWSIIGMRIHEMLDYAYRHGVKTLFLENPEVLGRLKLMWIRNGNRKHENYNYKVSVFRSTIIEKIVLKAPLYSIKVGYVNPRGTTNSTEHDELMRKYRLDRHSTSTYLIALRGLRH

SEQ ID NO: 1377 - protein, 363 aa, Unknown
  Description of Unknown: uncultivated organism sequence
  Category: MG61 effectors
  Description: MG61-213 effector
MSYITITLPFNVNGREAGSLLSTAWLFKIASHRMLSLARQTPVLPATDIGWKSVFRKAVYEIIPNRRYADGVIVLVRSIYESCRQLGVDFKNVEFSDWLMFQQAEMEYPVRNITLREGYVFHITTIDYVGNIDRVVVKPTIPRGYRLLLDKVLEERVGHTARVVIKDYGIRENRLWVHGEVQLTVPMDFYYRHMIRYGQNNGRLFGGVDVNVDRINLVIVDEGGELRDVKTFWFREVTTRGYPRHRAWSVIGMRVHEMLDYAYHHGVKTLFLEDPGVLGRLKLMWIRNGRRLHENYNYRVATFRSSVIGMITMKAPLYSIEVKYVNPKGTTSSEEHDEVMRKHGLDRHTASAYIIALKGLKQP

SEQ ID NO: 1378 - protein, 364 aa, Unknown
  Description of Unknown: uncultivated organism sequence
  Category: MG61 effectors
  Description: MG61-214 effector
MQVQPLYTVKLLFNASGENAKKVLSTAWLFKIACHEVLNKSKQVRDVLIPSKIAWIKMFKNYAYELIPNKRYSYGVVYLIYGIWESARSLGIDYDNVELSDWMLLQHYEREVNGNVIRVYEDGSALVTTYDYDGSKDRILVRAKPNKGQAGFLRKIVELREKYMPKLIIRDYGVRKGKLYVRGEIHISISYDFYLKYVKRYNEPKGNLVGGIDVNSDRINLAVIDEEGKLRDVKTFWFQEVTTRGYPRRKAWSVIGMKVHELLKYAYHHGVSTIVLENPEVIGRLRLVWVRNGKRLHRNYNWRVTIFRNRIIEMITMKALIYGLHVNYVNPKGTTHSREHDDIMMRYGLDRHTASAYLIALKSI

SEQ ID NO: 1379 - protein, 369 aa, Unknown
  Description of Unknown: uncultivated organism sequence
  Category: MG61 effectors
  Description: MG61-215 effector
MSQYQTHRVRDASKLVEYVTIVGRLEPLTEEDYVKLVKLAHEFRKAVTYATRMIAKGIDSKVVLRELRSMLNKAYGDSAFKLAKAVVESARANNGNPLKIEIRRLFIVSEGEAGKQGNRNVRLDDSSKVRIRYPYDKSWLSFRARFGENYIPLVRELSELAKSRKCSYGARIVFRSGRIYLHLSVPVELYLKYFRKGEARGSLIAGFDLNSDRINMVIVDKSGVIRDVRTEWFPEATSPGYPRNKARVVRLRALTKLLSYAYHHGAGVAVFEELDKIKWRRFTSSPKANRKIAKFAKKQLLTHAVVMGLKYGLKPVLVDPRGTTSSSVHSAVMKKHGLDKHTASAYLIVLRYLQNRKTVNSYKAYKQHK

SEQ ID NO: 1380 - protein, 367 aa, Unknown
  Description of Unknown: uncultivated organism sequence
  Category: MG61 effectors
  Description: MG61-216 effector
MDREVREPEITHVTVAGRVVPSNSKDYMKLALLAHRFRKCLVKVVRMLAKGIDKNTIVKEITRELNLGYADTIYKMAKLIVEGAKHNKSNPLRIEIRKLFIASRGFSSNKGNRNIRLVSTEQVEVNIPKEEEDWVKFKVVFGERYIPLVRELVDKSLSKQLSYTAKIVFRDGRIYLHLSVPLELYLKHFRKGEARGDLVAGFDLNSDRVNMVIVDKLGIIRDVKTVWFPEVTSHGYPENKAHTTRLQALAKLLDYAYHHGVGVVVFEDLERIKKRRFTNNEKANRKIARFPKRRLLQHAVVMAMKYGFRVYLVNPAHTSKLGAEVGKELGLDRHTASAYIIALKYLGIAEHLRNIVYNYNYNQSIAK

SEQ ID NO: 1381 - protein, 361 aa, Unknown
  Description of Unknown: uncultivated organism sequence
  Category: MG61 effectors
  Description: MG61-217 effector
MDYITIKLPFNVDGDVAKELLSTAWLFRITTHRVLTIAKQQVLPATRIGWKNAFRGIAYRVIPNRRYADGAIILVMGVYESCRALGIDFRSVELSDWLMFQQSELEYPAKSITLKQNHEFHVTTVRYNGSTGRVIVKPTVPRNYRELLDAILTGRVEYMGRVVITDYGVRNNRLWVHGEVHITIPLDVYYEHMARHKKNSGKLIGGVDVNTDRINLAIIDEDGELIDHETFWFSEVTARGFPKHKAWSIIGMRVHEMLNYAYHHGVRILFLENPEVLGRLRLMWVRNGDRKHENYNHKVATFRSTIIEKITMKAPLYGIEVKYVNPRGTTNSKEHDKLMRKYGLDKHTTSAYLTALKGLKH

SEQ ID NO: 1382 - protein, 368 aa, Unknown
  Description of Unknown: uncultivated organism sequence
  Category: MG61 effectors
  Description: MG61-218 effector
MGDGWLSVLQSQTGNVVDAFTVVNYVTIIGKLHPASGEDYMRLVRLAWDFKNTVRITIRMIAKGVGRSNILKELRGVLNKAYADSAYKLAKAMVEGCLFNGCNPLHIEVRRPFIVSEGESSRLGNRNVRLEDTNIVKVKYPYDGSWITLRAEFGERYLPLLRELAELARRKKVSYGARIVFREGNIYLHLSIPIKLYLKYFKRGEAKGGLVGGFDLNSDRVNLVIIDVHGRIVDTRTAWFTEAVSHGFSRNRARALRLGALAKLLKYCYTHNVGVVVFENLPLIKRRRYTRSRVGNRKITLFAKRQLIQYGIVMALKYGFKTLLTNPKGTTNSKEHSEVMKKYGLDRHTASAYLTALRGLETLNENYK

SEQ ID NO: 1383 - protein, 363 aa, Unknown
  Description of Unknown: uncultivated organism sequence
  Category: MG61 effectors
  Description: MG61-219 effector
MTYVTLVLPFNASGDVAKRLLSTAWLFKVASHRLLSIAKQMPVPPGSDIGWKSAFRSVAYEVIPNRRYADGVVTLIRSIYESCRQLGVDFRSVELGDWLMFQQSELEYPARNITLKPGHEVHVTTVSYSGESYRDVVKPLIPRSCGMLVDKVVEERQEYTGRVVVNDFGVRGNTIRVCGEVQIIIPLSFYYKYMAKHREPKGNLIGGVDVNVDRVNLAIIDERGILRDYKTFWFKEVAARGYPRASTRSAIGARVHEMLEYAHHHGVSTIVLENPEVLGKLRLLWIKNGKRGGENYNYKVSIFRCRVIEKIALKAPLYALKVKYASPAGTTNSKEHDEAMKRHGLDRHTASAYLIALRELNPS

SEQ ID NO: 1384 - protein, 372 aa, Unknown
  Description of Unknown: uncultivated organism sequence
  Category: MG61 effectors
  Description: MG61-220 effector
MEPPRYVTIALDFHADSGEAKAVLSTAWLSKLVAHRVLNLVKRNELLVDLLEYRFLKTLRGKCYDILPNRRYVDGILKLIHSTLKSAKALEVNIKEIELKRWLLFQSDRERGYAKGNMNIRLIDLHHIRVLTIGYDGKTTYIELEVSVPKGWRKLIESLVDRANKGLMGYPARVIVKDYGLGKNGLHVHGEVQVMVPYELYLEVMRRYSEPRGINVAGVDVNVERIDAVVIDEYGNLVSNKTFWIKRATHMGIRRKRAWSLIGEQIHALLKWLYSQGVSIIGLENPEIIGYLRYYWIRNGERKGGKWNCKVSMFRNSIIERITWKAPLYSMKTIYVNPRNTSKEGEKIGKKLGLDRHLGSAYIIAKRALKYL

SEQ ID NO: 1385 - protein, 346 aa, Unknown
  Description of Unknown: uncultivated organism sequence
  Category: MG61 effectors
  Description: MG61-221 effector
MCKLCAHRLLNIVKENPLLADLSQYDFIKFGRKLCYGIIPNRRYVDGISTLLHASLQSAKALKVNITKLELKPWLLFQSEAEPWAKGNLNIQFINNDKVRVLVFDKDKSSRKITIEPVIPKGYAKLIRSLVGKALRKEVGYPARVYITDYGGRLEHLYGEIHVMVKYDLYLEVMRRYKKPLGDNIGGVDVNVDRLNLVVINRDGDIVWKHTVRFPQIASRGYRGEKAWSIIGEAIHSILKNAYSHGASVIAVENPEVIGYLRYYWIRNGERRTKNYNYKVAIFRNSIIERIMWKAPLYGLHVVAVNPKGTTHSEDHEHVMRRYGLDRHTASAYLIALKARRNIQRP

SEQ ID NO: 1386 - protein, 363 aa, Unknown
  Description of Unknown: uncultivated organism sequence
  Category: MG61 effectors
  Description: MG61-222 effector
MSYITLTLPFNANGLEAKRLLSTAWLFKIASHRMLSIAKQSPVLPVTDIGWKNTFRRVIYEIVPNRRYTDGVIVLVRGIYESCRQLEVAFRDVELGDWLMFQQVEREYPVRNITLKQGYEFHITTIDYNGEAERVIVKPTVPKSYKLLLNRILDEKQKHIARVVIKDYGVRRDMLWVHGEIQLTIPIDFYYKYMTRYRRNYGRLYGGVDVNVDRVNLAIVDDEGKLRDKKTFWFREVVARGFPKKKARTIIGMKVHKMLRYAYHHGVKVLFLENPSTLGKLKLLWIRNGKRLHGNYNWKVSIFRSSVIEMIVMKAPLYSMKVGYVDPRGTTNSREHDEIMRRCRLDKHTTSAYLIALKGLKQP

SEQ ID NO: 1387 - protein, 371 aa, Unknown
  Description of Unknown: uncultivated organism sequence
  Category: MG61 effectors
  Description: MG61-223 effector
MSYTTLVLPFNVDDVAARWLLSTSWLFKVATHRMLSLAKQFPVLPATDIGWKNTFRKTVYGVVPNRRYTDGVIVLVRDIYESCRQLGVDFREVELGDWLMFQQSEKEFPVRNITLRQNYEFWITTINYNGESKRMTIKPTIPKNCRPLLDRILEEKQKYTARVVIKDYGIRKNKLWIHGEIQVTIPIDFYYKHTARYRGNNGRLYGGVDVNTDRINLAIVDRYCRLRDVKTFWFEDATRRGYPRRKARILVGMAVHKMLRYAYHHGVRMLFLEDPSVVSRLRLLWIRNGRRLHRNYNWRVSVFRSSVMEMITMKAPLYAVKVDYVDPKGTTNSEGHNEIMKRYGVDRHTASAYLIAMKGIKRHAMIQKATT

SEQ ID NO: 1388 - protein, 1513 aa, Unknown
  Description of Unknown: uncultivated organism sequence
  Category: MG61 effectors
  Description: MG61-224 effector
MSKRILGLDLGTNSIGWAVVDEAKEEIVNAGVRIFPEGVVSKTIGSGDKEETKNAARRRARQTRRQFYRKRLRKAKLLEVLIEQNMCPLSLDELNKWRHWDKKEKSQAKVFPNSDEFMNWIRMNPYELRARAIIGTVTAMELGRIFYHLIQRRGFLSSRKGDVKESKTLFEKGKPELNILPINRTEKEIAESGCQTMGEYLNRVVPKEGESYKPILDSDGNEIRARGRYATRKMYVEEFEAIWNAQADHLGLDKRSVLFKKVRMLKGNENSERNKKRISTLKKFYGAENVFVENRGNNLHITTTRTLPFKIFLAGDDVELKRNESVLFWQRPLRSQKGTLGNCSFEDTLPVINMDGTQRKNEKGKPVTYSKKPCPISHPLFELFRTHQFINTIEFGEKQRLSKDQKKQVLELINRKDNAFSFKEIVKKLELFSETFNYENDFKVSGNYTISKLSKLLGKKVWDEHPLACWEAFYFYDDSTKLQKKLNKAYGLNLKVEEVDKIRLKEGYSRVSIKAIQNILPFLEKGYFYSTAVILGGVKNAFGSRWDSYLQDETKDKIEDDILKMLKDKNKEGELIEKIKAYLSDSSNRYGFSENSPAFKKLYHHSQSVEKKELKNKLPPVENIRNPIVQQSLYEMRKVVNALLEKYKEEDPTFSFSSIRVEMGRDLKNGKKQRQKINQVIRKNRENNDEARERLAEFGLQPSRNNIQKYLLFKEMERRAGHVQSPYTGRTISLTDLLGKDNLIQIEHIMPFSKSLNDSFANKTLCESSVNALKGDKTPYAFYHQNSDPKIWGVSSWDEVKHRAFKLLPYAKAKRFVSDKSVDAEDFISRQLNDTRYIAKKATEILSEICSDVQVMPGQLTAELRHLWGLNNVLESSFGVTKQFSDIPLKPGEYYLVLNEQRESIQLIPKHNPKPKTNPNELLVAGEINNAIFESKKLVLELGAPDQANGKYWAKLTLKPIQKFSPKYISKPITDENRIVFKGLVKNQRFSSDSIPKNPIAEHKDGIYWGSFAVKNKRIERSTVAPITNRKEIKLFGEVKDGIFKSYIYECSTTAENGKYWLVLEPDFETPEFIQASNPEPQHSENEHIITGTIDDNGVFVSDLDPSYSVKTDHSAGKYYAVIELASKENDFYLMENPAPKVEKEHRLIEGTVWVDKYSSELKFDPKKNREDQRHHAIDAITIALTKRGYLNALSHYRAKELPEDYKPSFPEPWDGFEHDVKNAAEKILISYRKNDRIISKGKKGFSVRGQLHKENVFGKHKGKEDEKKSFYHRRKYLNDLKTNKHVSKIVDERIKQLVLDHLKNSCDVNISSEKGFKIPPNAFFTKNGKPRLFLPPNPRKKKNSQPVPIKKVRVSETIKNAQQKRLGVNQYVNPRNNHHVMIYKTQSGELKEIIVSFWDAVHRLIKGEDLYKLPKDGIEVVLVLEKNDMVLLNLSKEEFDRRKHDICLLSTNLYRVQKIYSGDESFEYVFRHHLASTLNNKNEEVMIKSFDKFRKINPKKVKVSELGEISLC

SEQ ID NO: 1389 - protein, 356 aa, Unknown
  Description of Unknown: uncultivated organism sequence
  Category: MG61 effectors
  Description: MG61-225 effector
MSQYQTSSIVNASTLVKYATIVGRVVPASSEDYMKLTRLAWNFRRAVQVVARIIAKGVEANDVLKELRRMLNKAYADSAFNQAKAVVRACLATGGDPRKIEIGKLFIISEGESSRMGNRNIRFEDTNIVKVKYPYDGSWIQLKARFGEKYLSPLKELVELAKQKKVSYNAKIVFRSSRIYIHVSVPIHLYLKHFKKADARGELVAGFDLNSDRINLAIIDKYGRLADAKTVWFTEITSHGFPHNKAKTTRLRALAKLLKYCYAHGVGTVVFENLYEVKKRRFTKSRNTNRKISRFAKRELLDHAIVMSLKHGFKVLLADPKGTTNSKEHDEAMRTHGLDRHTASAYLIALRGLKPP

SEQ ID NO: 1390 - protein, 365 aa, Unknown
  Description of Unknown: uncultivated organism sequence
  Category: MG61 effectors
  Description: MG61-226 effector
MNYITPSFPFNVNGEVAKKLLSTAWLFKIATHRMLSIAKQTPVLPATDIGWKNVFRKIIYEVIPNRRYADGVITLVRGIYESCRELEIGFREVELSNWLMFQQSEKEYPVRNITLKEGYEFRITTIDYNGNSERVVIKPTTSKNYVLLLDKILEERQKHTAKVVIKDYGVRKSRLWVHGEIQLTIPIDFYYKCMTRYKKNKGKLYGGVDVNTDRINLAIVDSEGNLRDAYTFWFRETTARGYPRRRARTVIGMRVHEMLKYAYHHGVKEVFLENPKVLGRLRLLWIRNGRRLHRNYNWKVMTFRSRIIEMITTKAPLYSISIKYVDPRGTTSSKEHDEIMKKYRLNRHTASAYIIALRGLNRKFI

SEQ ID NO: 1391 - protein, 387 aa, Unknown
  Description of Unknown: uncultivated organism sequence
  Category: MG61 effectors
  Description: MG61-227 effector
MELPKYITVTMDFHVNGDYARNILSTAWLSKLVAHRVLGLIKENELLADLSEYKFLKVLRSKCYDVLPNRRYVDGILKLVHSTLKSAKALKVNIKDIELKQWLLFQSDGERGYARGNMNIRFIDTQHVRALTLGYDKRTRYVELEVTTPKGWKKLIEFLINRAFDGQIGYPARVVVKDYGIGKHGLHAHGEVQVMVPYSLYLEVMRRYDKPRGSNIAGIDVNVERLDAVVVDEYGNLVSYRTFWMKNTTFMGVRRKRSWSLIGEQIHTLLKWLYSQGVSIIGLENPEIIGHLRYYWIRNGERRDRKWNWKVSMFRNSIIERMTWKAPLYSMKVTYVDPKNTSKEGEKIGKKLGLDKHLGSAYIIAKRTLKHLQKLKTYKEKTVAQLS

SEQ ID NO: 1392 - protein, 364 aa, Unknown
  Description of Unknown: uncultivated organism sequence
  Category: MG61 effectors
  Description: MG61-228 effector
MVENPLYTIKLSFNASGDRAKKILSTAWLFKLACHRVLSRSKELLNALIPSKIAWVKMFYSDARDLIPNKRYAYGGIYLVYGIWEGARELGIDYRSIELSDWLMFQHYDREVDGNVIRILEDGSALVTTYSYDGSKDRVLIKSKPNRGHGELLKLVVESKEKYMPRVVVRGYNVRSGKLYVSGEIHVTIGYDFYLKHATRYGEPRGSLIGGVDVNSDRINRAIVDEKGNLRDCKTFWFSETTARGCPRRKAWSIIGMKIHEMLRYAYEHGVSTIALENPEALGYLKFAWVREGDRKHENYNYKIAVFRNSIIERIAMKAPLYWLDVKFVDPRGTTSSREHDEIMKRLGLDRHTASAYIIVLRSI

SEQ ID NO: 1393 - protein, 370 aa, Unknown
  Description of Unknown: uncultivated organism sequence
  Category: MG61 effectors
  Description: MG61-229 effector
MDYLTIKLPFNVDGDVAKGLLSTAWLFRVAAHRVLALARQQESLPGSRIGWKNMFRQFAYGVVPNRRYADGAVTLVMSIYESCRELGVDFKGVELSNWLMFQQSELEYPAKSITLKQNHGFHVTTVRFNGSISRVVIKPTVSRSYRELLNAVLFERVKYMGRVVVRDYGVRNNQLWVHGEVQVTVPMDVYYEHMARHRRNAGRLFGGVDVNTDRINLAIIDEEGELRDTHTFWFSEASARGFPMHKAWGIIGMRIHELLDYAYNHGVKTLFLENPEILGRLKLMWVRGGDRRHENYNHKVSVFRSSIIERIALKAPLYSIETKYVSPRGSTNSEEHDELMRKYRLDRHTASAYLIALRGLITNGNKYYYD

SEQ ID NO: 1394 - protein, 351 aa, Unknown
  Description of Unknown: uncultivated organism sequence
  Category: MG61 effectors
  Description: MG61-230 effector
MRKLAEYATIQGLLLPETPEDHLRLIRLAYEFRRAVTYATRMIARGVGERAALRELRSMLNKAYGDSAYKVAKMLVRSCASNGGDPRRIKIRKLFIISGGEASRKGNRNIRLGCGYVLIKYPFDGSWLKFRCCFGKYSGLIEELAQLATEKKVSYGARIVFRRGRIYLHLSVPVELYLKHFRRGRASGSHVAGFDFNSDRINMVIVDEYGKIRDARTEWFPEVTSHGYPRSKARARRLEALARLLDYAYHHGVGVVAFENLFLVKRGEFTGCARANRKISKFAKRQLIQHAILMARKYGFKVILVDPKGTTKSREHDEAMRRHGLDRHAASAYLVALRGIERCTTKQNAIV

SEQ ID NO: 1395 - protein, 363 aa, Unknown
  Description of Unknown: uncultivated organism sequence
  Category: MG61 effectors
  Description: MG61-231 effector
MSVQRLSSNTVDGVISHVTIIGKLIPETPEDYMKLARLAWSFKRAVELMVREVANGTPMKVATKKLYSLIPNYVYLESAYKHAKLVVEGCRFNNGNPRHVHIKKLFIVSRGNKWDKGNRNIKVIPRHDYFEVLIKYPWGGSWTKCRVFFGEKYIPLLRELVELSEKRIEGYGARIVFRNRRLELHLSVPLSLYLKYFSLPKRRGYELVAGIDLNSDRINMVVIDPNARIITMKTAWFPEVTLHGFPRDRARDIRLKKLKKLLSYARRIGVDYVVFENLFVVKKRGKAPSPSGNRRITRFAKKQLLQHGLLMVLKFGLTPILVDPRGTTHSREHREVMRKRGLDRHMASAYIIAFKGLKIIKNH

SEQ ID NO: 1396 - protein, 379 aa, Unknown
  Description of Unknown: uncultivated organism sequence
  Category: MG61 effectors
  Description: MG61-232 effector
MSLDVTKSLPEYLTVDLPFTVKGDHAKLIWFTSWLSKPCARRLLGDVKDDDLLVDLSQTSFLKYARKRCYGILPNRRYVDGVATLMHSTLKSARKLGINIESIELKQWLLFQSEAEKEKKGNLNIRLISANKAEILVFNHRRETEKIVVRLRIPKGYRKVLETLVEKALNKEIGYPARIVIKEYNFYPSNLHLYCSLQVMIPYSIYLETMKKYDKPLRDHVAGVDVNVDRLNLTIVDKYGRLRDTKTFWLREITSRGYRRKQAWTKIHQAIHAMLDYAYHHGVSVVALENPEIIGYLRYYWIRNSYRKTKNYNYKVAVFRNRIIEVVTYKAPLYSLKTIYVNPKGTSHSKEHDETMRKYGLDRHSASAYLIALKGLNLP

SEQ ID NO: 1397 - protein, 392 aa, Unknown
  Description of Unknown: uncultivated organism sequence
  Category: MG61 effectors
  Description: MG61-233 effector
MDYLTIRLPFDANGDVVKELLSTAWLFKIAAHRVLAVAKQMQVLPGTRIGWKNTFRDIAYGVIPNRRYADGAVTLVMGVYESCRTLGVDFRGVELGDWLMFQQSELEHPSRNITLKPNYEFHITTIRYNGTTSRVVVKPTIPRSYGELLDAGLTGRVGYIGRVVVRDYGVRGVHGEVQVTIPLDFYYEHMSRHKRNSGRFVGGVDVNADRINLAIIDSVGRLIDHKTFWFSETSRKGYSGHSAWSIIGMRIHETLNYAYHHGVKTLFLENPEILGRLKLMWVRSGDMGHGNYNHKVATFRSTIIEKIALKTPLYGIEVSYVNPRGTTNSIEHDKLMRKYRLDKHTASAYLTALKGLNTNENEQPQITMKTETVQRGLRPCIMCLMVTLTTSQ

SEQ ID NO: 1398 - protein, 364 aa, Unknown
  Description of Unknown: uncultivated organism sequence
  Category: MG61 effectors
  Description: MG61-234 effector
MSHYQTNEVIDGKSLVFHVTIIGKLAPQTPNDFMKLVRLAYDFRKAVLYATRMISKGMKANEFLKELRGMLNKGYGDSACKVAESIVEGCKFNGGNPQHIKVKKLFIASEGETSRFGNRNVRLEATDKVKIKYPYDRTWLFFKAQFGKDYLPLVQEIVKLAKEKKMSYGARIVFRDGRIYSHLSIPVDLYLKYFSKGSANGSLTAGFDLNADRINMVVVDKFGRIRDVKTEWFPEVTSHGFPRSKAKIKRLEALARLLDYAYHHNVGVVVFENLFIIKRRKFTKNSSANRKMSRFAKKELLQYGIIMARKYGFKVLLINPKGTTHSKEHGEVMRKYGLDRHTASAYLIALRGIESHNLIRKAII

SEQ ID NO: 1399 - protein, 370 aa, Unknown
  Description of Unknown: uncultivated organism sequence
  Category: MG61 effectors
  Description: MG61-235 effector
MDYITLKLPFNADGDAARELLSTAWLFKIATHRVLGVARQQALPGSRIGWKNMFRKIAYGIIPNERYADGVITLVMGVYESCRELSIDFRGVELSDWLMFQQSSLEYPSRNTTLKPNYEFHVTTVRFDGSTGRVVVKPTIPKIYKALLDAVLFEHVKYMGRVVVTDYGVRSNQLWVRGEVHMTVPMDVYYERMARHKKNSGKLIGGVDVNTDRFNLAIIDKEGRLIDHRTFWFSEATARGFPKHSAWSIIGVRIHEMLNYAYHHGVKTLFLENPEVLGRLRLMWIRSGDRNHENYNHKVSIFRSSIIERIAMKAPLYSIETKYVNPRGTTNSKEHDETMKKHGLDKHTTSAYLTALRGLGINKHVHYKQS

SEQ ID NO: 1400 - protein, 364 aa, Unknown
  Description of Unknown: uncultivated organism sequence
  Category: MG61 effectors
  Description: MG61-236 effector
MVENTLYTIKFTFNVGGDRAKKILSTAWLFKLACHRVLSRSKELLNALIPSKIAWVKMFYSDARDLIPNKRYAYGAIYLIYGIWESSRSLKIDHRNVELSNWLMFQHYDREVDGNVIRVLGDDTILVTTYSYDGSKDRVLIKAKPNRGHGELLKLVVESKEKYMPRVVVRGYNVRNGKPYVSGEIHVTIGYDFYLKHMTRHREPKGSLIGGVDVNADRINLAIVDEKGNLRDSKTFWFTEVVARGYPRRRAWSVIGMRIHEMLRYAYSHGVATIALETPEVLGYLRLAWVRDGGRKHENYNYKKAIFRSSVIERIAMKAPLYGLNAKLVDPKGTTSSREHDEIMKRSGLDRHTASAYLIALRSI

SEQ ID NO: 1401 - protein, 370 aa, Unknown
  Description of Unknown: uncultivated organism sequence
  Category: MG61 effectors
  Description: MG61-237 effector
MAGEVREPEITHATIIGRVVPLDNEGYMELVLLAYRFRKALVKAIKMYTKGIDRNTIVKEITKELNLGYADTIYKLAKLIVKGIRHNESNPLKIKIRKLFIASRGFASNKGNRNIRLLSTNELQVNIPWKGWVKFKVVFGKRYIPLVNELIEKALSKQLSYSGKIVFRDGKPHLHVSVPIELYLKYFSKGRANGKLVAGFDLNSDRINMVIVDIQGIIRDTKTEWFPEATSHGFSKNKAHTMRLQALARLLNYAYRHGVGIVLFEDLARIKKRRYTKSKTANRKITRFPKRKLLQHGIVMAMKYGFRVYLVNPAYTSKIGEKLGKELGLDKHTASAYILALKYLGVANLISGSSSIQKKPEYHYLLNSLV

SEQ ID NO: 1402 - protein, 371 aa, Unknown
  Description of Unknown: uncultivated organism sequence
  Category: MG61 effectors
  Description: MG61-238 effector
MSYITLTLPFNIDGGEARKLLSTAWLFKIASHRMLSLAKQIPVLPVTDIGWKNTFRKVIYEVIPNRRYTDGVIVLVRSIYESCRQLGVNFKDVELGDWLMFQQVEKEYPVRNITLKQGYEFHITTIDFNGNSDRIVVKPSIPENYRLLLDGILEEKQKHTARVVIKDYGVRKNKLWVHGEVQLTIPLDFYYKYMVRYRRNYGRLYGGVDVNVDRINLAIIDRYGRLRDVKTFWFEDVTRRGYSKRKARILIGMAVHGMLQYAYHHGVKTLFLENPSILSRLRLIWIRNGRRLHRNYNWKISVFRSSVIETISMKAPLYSINTEYIDPKGTTHSKKHDEVMKKYGLDRHTASAYLIALKGIKGYRMIQKATD

SEQ ID NO: 1403 - protein, 364 aa, Unknown
  Description of Unknown: uncultivated organism sequence
  Category: MG61 effectors
  Description: MG61-239 effector
MLHYQTNEVINAETLISHVTITGKLIPQTPSDFMKLVRLAYDFRKAVLYATRMISKSMKANELLKELRGMLNKGYGDSAYKVAKSIVEGCRFNGGNPQHIKVKKLFIVGEGEAVRFGNRNVRLEATDRVKIKYPYNRTWLFFKIQYGKDYLPLVQEIVKLAKEKKISYSARIVFRDGRMYLHLSIPVDSYLKYFSKGSANGSLTAGFDLNADRINMVIVDKFGRIRDVKTEWFPEVTSHGYPRSKAKIKRLEALAKLLKYAYHHNVSVVVFENLFIIKRRKFTRNSTANRKISRFAKKELLQYGIIMAMKWGFKVLLIDPKETTSSKQHSIVMKKYGLDKHTASAHLIALKGIERHSLIQKATT

SEQ ID NO: 1404 - protein, 398 aa, Unknown
  Description of Unknown: uncultivated organism sequence
  Category: MG61 effectors
  Description: MG61-240 effector
MPFLSRWQRLGASAIYLSTVSLGPLTVVALGSLTIKLPFNVDGDTAKELLSTAWLFKIATHRVLAVVKQQQILPGSRIGWKNAFRRIAYEIIPNRRYADGAVTLVMGVYESCRALDVDFKSVELGDWLMFQQSELEYPAKSITLKPGYEFNITTIRYNGATGRVVLKPTIPKIYKALLDAIITRRVGYMSRVVVTDYGVRSNQLWVRGEVHVTIPLDLYYERMARHKKNSGKLIGGVDVNADRINLAIIDEDGELIDHKTFWFSEASRKGFSRHKAWSIIGMRIHEMLNYAYHHGVRALFLENPGVLGRLKLVWIKNGDRGRENYNHKVSIFRSTIIEKIALKAPLYSIETKYVNPRGTTNSTEHDETMRKHRLDRHTASAYLIALKGLTPMNTSNRK

SEQ ID NO: 1405 - protein, 363 aa, Unknown
  Description of Unknown: uncultivated organism sequence
  Category: MG61 effectors
  Description: MG61-241 effector
MSYITLCLPFNVDGVEAKKLLSTAWLFKVASHRMLSIVKQSPIPPVTDIGWKNTFRKVIYDVIPNRRYTDGVIVLVRGIYESCRQLGIDFKSVELGDWLMFQQVEKEYPVRNITLKQGYEFHITTIDCNGNSDRIVIKPSIPKKYRVLLDKILEEKQKHTARVAIKDYGVRKGMLWIHGEIQLTIPLNFYHKYMIKYRRNYGKLYSGVDVNSDRINLVIVDGEGNLRDTYTFWFREVTARGYPRRRARSVIGMKIHEMLKYAYHHGVRELFLENPEVLGRLKLLWVRNGKRLHKNYNWKVATFRSSVIEMIAMKAPLYSIDVKYVDPRGTTHSKEHVEIMRKHRLDKHTSSAYMTALKGLKQP

SEQ ID NO: 1406 - protein, 369 aa, Unknown
  Description of Unknown: uncultivated organism sequence
  Category: MG61 effectors
  Description: MG61-242 effector
MPVDYITLRFPFNASGSTAGELLSTAWWFKIATHRLLNVLKQQQTLPITTIGWVNTFKDIVYGIIPNYRYATGVITLMMGIYESCRKLGIDFKRVELSDWLMFQQGYLEYSVKSITLKTNYKFHITTIKYDGSISRVVINPTIPENYEKLLSVIITKQIKHTGRVVIDRFGVRNNQLWIHGEVQVTIPLDIYYEHMARHKRNNGKLIGGVDVNTDRINLAIVDENGGLRNYKTFWFSETIARGFPKDKARIIIGSKIHEMLDYAYNNGVKTLFLEDPEVLGRLKLMWVRSGDRKHENYNYKVMVFRSSIIERIALKAPLYSIEVKYVNPGGTTNSEEHKDIMRRYGLDKHTASAYLIAIRGLGLSPRAV

SEQ ID NO: 1407 - protein, 314 aa, Unknown
  Description of Unknown: uncultivated organism sequence
  Category: MG61 effectors
  Description: MG61-243 effector
MSMFRSIAYGIVPNRRYADGAVTLVMGVYESCRALGVDFRGVGLSGWLMFQQSELEYPAKSITLRRGYEFHITTIRFDGSTSRVVIKPTIPRNYKGLLDAVLTRHVEYMGRVVVRDYGVRNNQLWVHGEVHMTVPLDIYYEHMSRHKRNGGKLFGGVDVNTDRINLAIIDEEGGLRDYKTFWFSEVTARGFPRQKAWRIIGMRIQELLNYAYNNGVKTLFLENPEVLGRLKLMWVRNGDRKHENYNYKVSVFRSSIIERITMKAPLYSIETKYVNPKGTTNSTEHDELMKKYGLDRHTASAYLIALRGLTHQQK

SEQ ID NO: 1408 - protein, 329 aa, Unknown
  Description of Unknown: uncultivated organism sequence
  Category: MG61 effectors
  Description: MG61-244 effector
MAKQQQVLPGDKIGWVSMFREVAYGIVPNRRYADGAVTLVMGVYESCRALGVDFRSVELTDWLMFQQSGLEYPAKSITLRRGYEFHITTIKYDGSIGRVVVKPTVSEGYRELIDAIYRERIKYMGRVVIGDYGVRNNQLWVHGEVQVTVPLDVYYEHMARHRRNAGKLIGGVDVNTDRINLAIVDEEGGLRDYKTFWFSEVTTRGFPKHKAWSIIGMRIHEMLNYAYNNGVKTLFLENPEVLGRLRLVWIRNGDRKHENYNYKVSVFRSSIIEKIVLKAPLYSIETKYVNPKGTTNSTEHDEAMRKYGLDRHTASAYLIAIRGLTHQQK

SEQ ID NO: 1409 - protein, 364 aa, Unknown
  Description of Unknown: uncultivated organism sequence
  Category: MG61 effectors
  Description: MG61-245 effector
MLQYQISDVVDASKLVTHTTVIGKLIPTSPEDYMKLVKLAYDFRRAVLYATRVISKGMKTNDILRELRSMLNKAYGDSAYKVAKTIVEGCRFNGGESHHIKIRRLFIVSEGEASRLGNRNVRLESTDVVKVRYPYDKSWIVLKVHFGRKYLPLAREVSELAKQRRVSYGARIVFKDGRIYLHLSVPINLYLKYFSKGKAHGELVAGFDLNSDRVNMVIIDRYGKIRDVKTERFSEVTSHGYPRSKAKARRLEALAKLLKYAYHHNVGTIDLENLFVIKKREYTRNPTANRKITRFAKKELLRHGILMAMKYGFKVLLVNPKGTTRSKEHDEVMRKYGLDRHTASAYVIALRGIESHNLMRKAII

SEQ ID NO: 1410 - protein, 370 aa, Unknown
  Description of Unknown: uncultivated organism sequence
  Category: MG61 effectors
  Description: MG61-246 effector
MDYLTIKLPFNVDGDVAKGLLSTAWLFRVAAHRVLALARQQESLPGSRIGWKNMFRQFAYGVVPNRRYADGAVTLVMSIYESCRELGVDFKGVELSNWLMFQQSELEYPAKSITLKQNHGFHVTTVRFNGSISRVVIKPTVSRSYRELLNAVLFERVKYMGRVVVRDYGVRNNQLWVHGEVQVTVPMDVYYEHMARHRRNAGRLFGGVDVNTDRINLAIIDEEGELRDTHTFWFSEASARGFPMHKAWGIIGMRIHELLDYAYNHGVKTLFLENPEILGKLRLMWIKNGDRKHENYNHKVSVFRSSIIERIALKAPLYSIETKYVNPKGTTNSKEHDELMRKYRLDRHTASAYLIALRGLITNGNKYYYD

SEQ ID NO: 1411 - protein, 363 aa, Unknown
  Description of Unknown: uncultivated organism sequence
  Category: MG61 effectors
  Description: MG61-247 effector
MSYVTVTAGFNTSGEKAKLLLSTAWRFKIAAHRVFTHAKAMPILPATKIAWKSTFREVARSAIPNRRYADSAIILVMGIYEACRELGIDFRDVELGEWLMFQQSEKEWPPRNITLKRLDEVWVTTFDYDGTSRRIRLTVSTSGIFRKLLKALLDEKQPYNPRIYIKSWNMRQGTLYVRGQLQVAIPYSFYVAHAARYRRNRGSLYAGVDVNTDRINLAIVDSKGWLRNVKTFWFREVTARGYPRHRARSVIGMRVHEMLKHAYHNGVKTLFLEDPGVLGRLKFLWIRGGKRKSRNYNYKVSVFRSSTIEMIAMKAPLYAINTRYVSPRGTTNSEEHDEVMRRYGLDKHTASAYIVALRGLGYA

SEQ ID NO: 1412 - protein, 374 aa, Unknown
  Description of Unknown: uncultivated organism sequence
  Category: MG61 effectors
  Description: MG61-248 effector
MNEIEYVTLRLPFHAVGEGAKLIYWTAWLSKLCAHRLLDQVKQNPLLASLSQYEFVKMGRSLCYGVLPNRRYVDGVSTIIHASLQSAKALKIDVTKLELKPWLLFQSEAEPRAKGNLNMQFADYSTVKVLVFDKDGTSRKIAIRPVVPKGYAKLVKVLVDKALRREIGYPARIYVRDYGDGLAHLYGELQVMVKYDLYLEVMRRHGKPLGENIAGVDVNVDRLNLVVVNRDGDIVWTHTARFPQVTARGFPRKKAWSIIGEAVHSVLENAYSHGASVLAVESPEVIGYLKYYWIRNGNRGSRSYNYRVSIFRNAIIERLVWKAPLYGLKVVPISPRGTTRSKDHDYVMRRYGLDRHTASAYLIALKTRNIVRTY

SEQ ID NO: 1413 - protein, 366 aa, Unknown
  Description of Unknown: uncultivated organism sequence
  Category: MG61 effectors
  Description: MG61-249 effector
MLQYQINSKGVIDATKLVSHVTIVGKLVPISNEDYMKLVRLAHDFRKAVTYATRMIAKKHPTNNILRELRAVLNKAYGDSAYKIAKTLVEGAKFNGSSPRRIKVRKLFIISEGEASRFGNRNVRLEDIDMAKIRYPYNGTWLNFKVLFGTKHIPLVKELVELAKARKVSYGARIVFRNGSIYLHLSIPVHLYLKYFKKRYANGKLVAGFDLNSDRVNMVIVDRYGRIRDMKTAWFPEITSHGFPKNKAKAKRLEALAKLLKYAYYHDVGTVVFENLLMIKHRKYTRSPTANRKISRFAKKELLQHAIISAMKYGFKILLVNPRGTTRSKEHDKAMRKYGLDRHTASAYLIAVKSIEGRTMIQKTIT

SEQ ID NO: 1414 - protein, 364 aa, Unknown
  Description of Unknown: uncultivated organism sequence
  Category: MG61 effectors
  Description: MG61-250 effector
MLQYQTSEIVDASSLVSHATVIGRLIPFSPNDFMKLARLARDFRKAVLYATRMIGKGMEANKVLRELRVMLNKAYGDSAYKVAKAIVEGCKFNRGNPRHIKIRKLFIVSEGETLRFGNRNVRFESTDKVKVKYPYDKSWLLFKAQFGEDYIPLVQEVVKLAREKKLSYGTRIVFKNGRIYLHVSIPIDLYLQYFSKGEADGGLIAGFDINADRINMVIVDRYGRIRDIKTEWFPEVTSHGFPRSKARTRRLEALTKLLRYAYCHNVGIVVFENLLTIKRKKFTRNPTANRKITRFAKRELMQYGILMSMKYGFKVLLIDPRGTTRSKEHDDVMKRYGLDKHIASAYMIALRGMKRHSLLQKATV

SEQ ID NO: 1415 - protein, 381 aa, Unknown
  Description of Unknown: uncultivated organism sequence
  Category: MG61 effectors
  Description: MG61-251 effector
MSLPDYLTIIIPFTVTRGRAKLFWWTAWLSKLCAHRLLSDVKNNSMLIDLSQASFLKYARKRCYDILPNRRYIDGIATLIHSTLKSIRKLGINVKDIELKQWLLFQSEAEREKKGNLNIRLVTIHEAEILVFNHMKEPEKITIKLRTPKGYRKILETLIEKALNKEIGYPARIVVKEHNFYPNNLHLYRSLQVMIPYNLYLETMRKYNKPLGDHVAGVDVNTDRLNLAIVDKYSKLRDIKTFWFREITSRGYRRKPAWTKIHQAIHNMLDYAYNHGASHIALENSEIIGYLRYYWIRNGERKTKNYNYKISIFRNKVIEVITYKAPLYSLKTIHVNPKGTTRSEEHDEVMRRYGLDRHTASAYLIALRGIKRHTMIQKARI

SEQ ID NO: 1416 - protein, 360 aa, Unknown
  Description of Unknown: uncultivated organism sequence
  Category: MG61 effectors
  Description: MG61-252 effector
MSRCLTSSVVDASKLIEYVTVTGKLIPASSEDHVKLARLAWSFRRAVQLAVKMIAKGVKASDALRELRRTLNKAYADSAFKAAKAIVEGCMANGGDPLRVEVRRLFIISGGESSRLGNRNVRLEDVGSVRVKYPYDGSWIALRARFGEEYLSLLRELVELAKQKKASYNAKIVFRGGGIYVHVSVPIQLFLKHFKKGEARGGLIAGLDLNSDRINLAIIDERGRLVDVRTARFPETTSHGFPRSKARAMRLGALAKLLGYCYYHGVGTVAFEDLFEVKGRRFAKSKTANRKMSRFAKRELLQHAITMSLKYGLRVLLVDPKGTTSSREHDEVMKSHGLDRHAASAYLIALKALNQSEQMK

SEQ ID NO: 1417 - protein, 363 aa, Unknown
  Description of Unknown: uncultivated organism sequence
  Category: MG61 effectors
  Description: MG61-253 effector
MSYITITAGFSASGEEAKLLLSTAWLFKVATHRVLSYAKSMPLLPASKISWKNTFRKIAYEVIPNRRYADSAVVLVMGIYESCRELGVDFKDVELGDWLMFQQSEKEYPPRNITLKSVNEAWITVFSYDGRSERIKLRVSTSGTYRRLLEALLQEKQEYNPRIYIKSWNVRNGKLYVNGELQIAIPLDFYYKHVARFKVNNGKLYGGVDVNVDRINLAIIDAKGNLRDTYTFWFREVTSRGYPRHRARSVIGMRIHEMLKYAYHNGVKTLFLESPEVLGKLKLTWIRSGNRKSGNYNWKKTVFRSSVIEMVAMKAPLYAINVKYVNPRGTTNSEEHDEVMKRCGLDRHTASAYLIALKGLKQT

SEQ ID NO: 1418 - protein, 370 aa, Unknown
  Description of Unknown: uncultivated organism sequence
  Category: MG61 effectors
  Description: MG61-254 effector
MNEVEYVTLRLPFHAVGEGAKLIYWTAWLSKLCAHRLLDQVKQNPLLASLSQYEFVKMGRSLCYGVLPNRRYVDGVSTIIHASLQSAKALKIDVTKLELKPWLLFQSEAEPRAKGNLNIQFADYSTVKALVFDKDGTSRKITIRPVVPKGYTKLVKVLVDKALRREIGYPARIYVRDYGDGLAHLYGELQVMVKYDLYLEVMRRHGKPLGENIAGVDVNVDRLNLVVVNRDGDIVWTHTVRFPQVTARGFPRKKAWSIIGEAVHSVLENAYSHGASVLAVESPEVIGYLKYYWIRNGNRGSRSYNYRVSIFRNAIIERLVWKAPLYGLKVVPISPRGTTRSKDHDYVMRRYGLDRHTASAYLIALKTRKL

SEQ ID NO: 1419 - protein, 281 aa, Unknown
  Description of Unknown: uncultivated organism sequence
  Category: MG61 effectors
  Description: MG61-255 effector
MAKEVREPELTHVTITGRVVPLNNESYMELVLLAYRFRKSLTKAIKMYAKGVSRNTIVKEITKELNLGYADTIYKLAKLIVEGVKHNGSNPLKIRVRKLFIASRGFSSNKGNRNIRLLSTNELQVNIPWRGWIKYKAVFGGRYIPLVKELVKRALSKELSYTVKITFRDDKVYLHVSVPMGLYLKYFSKGKADGNLIAGFDLNSDRVNMVIVDRYGIIRDVKTEWFPEVTSHGFLRNKACTLRFQALAKLLKYAYYHGVGVVLFEDLSRIKKRRYTKKQDS

SEQ ID NO: 1420 - protein, 373 aa, Unknown
  Description of Unknown: uncultivated organism sequence
  Category: MG61 effectors
  Description: MG61-256 effector
MSETYLTLRLPFNACESEARLLLATARLFRHVALHLHRVILEEMPQITSLITLKRMYRRRLLEIMPNRRYVDGAITLVYSIYESAQALGVSLSEIEFKSWLLFQQSEKEYPCRNITLQKDFSFRITAISYGGESVRIQVKPTIPKKYVPILDKILEKRQPYVARVVLKGFGERKNILWVHGEIHLSVPYSFILEHFRVHKRNYGKLCGGVDVNVDRINLAIIDKYGRLRDVKTFWFEEASWKGCPKQKAWSIIGTAIHDMLKYAFHHGVETLFLENPEALGYLKTLWIRRGERKSNNYNYRVQVFRTRLVERIAMKAPLYAIDVKYVSPRGTTSSEEHDEVMKRCGLDRHSASACMIALRGREKHILTQKGII

SEQ ID NO: 1421 - protein, 365 aa, Unknown
  Description of Unknown: uncultivated organism sequence
  Category: MG61 effectors
  Description: MG61-257 effector
MSQCQTSEMSKTEVVSASEFVKYVTITGKLVPISIEDHMKLARLAHYFKRAVLMATRMVAKGVREAEVLRELRKRLNKAYADSAFKTAKAIVEGCSFNGGNPLHIEVRKLFIVSEGEASRLGNRNVKFESTDVIKVKYPHDGSWSLLRAEFGEKYLPLVRDLVDLAERRRISYRAKIVFRSGKVYLHLSIPIELYLKHLGKERSKGELVAGVDLNSDRICMVVVDSLGRVRDVKTEWFSELALHGFSRGRARARRLEALSKLLEYARNHNVGIVVFEDLFKIKRRRFVKSRRANRKISKFAKRELLQHGVVMALRRGFEVSLVEPRGTTSSEEHVKVMRELGLDRHVASAYLIALRRLHEASARK

SEQ ID NO: 1422 - protein, 369 aa, Unknown
  Description of Unknown: uncultivated organism sequence
  Category: MG61 effectors
  Description: MG61-258 effector
MSQYQTHRVRDASKLVEYVTIVGRLEPLTEEDYVKLVKLAHEFRKAVTYATRMIAKGIDSKVVLRELRSMLNKAYGDSAFKLAKAVVESARANNGNPLKIEIRRLFIVSEGEAGKQGNRNVRLDDSSKVRIRYPYDKSWLSFRARFGENYIPLVRELSELAKSRKCSYGARIVFRSGRIYLHLSVPVELYLKYFRKGEARGSLIAGFDLNSDRINMVIVDKSGVVRDVRTEWFPEATSPGYPRNKARVVRLRALTKLLSYAYHHGAGVAVFEELDKIKWRRFTSSPKANRKIAKFAKKQLLTHAVVMGLKYGLKPVLVDPRGTTSSSVHSAVMKKHGLDKHTASAYLIVLRYLQNRKTVNSYKAYKQHK

SEQ ID NO: 1423 - protein, 364 aa, Unknown
  Description of Unknown: uncultivated organism sequence
  Category: MG61 effectors
  Description: MG61-259 effector
MQEQLLYTLKMSFNASGEEARKILSTAWLFKIACHRVLNKSKQVRDVLIPSKIAWIKMFKSHAYELIPNKRYSYGAVYLVYGVWESCRRLNIDYNVVELSDWLLFRHYEREINGNVIRVYEDSSALVTTYDYSGSKDRILVRAKPNEGQSELLKKIIGSREKYMPKLIIRDYGVRSGTLYIRGEIHIAVSYNFYLKHMKKYNEPKGNLIGGVDVNTDRINLAIVDRDGKLRDVKTFWFSEETARGYPRRRAWSVIGMKVHELLKYAYHHGVSTIALENPEVIGRLRLAWVKNGKRLHRNYNWKVTIFRNRIIEMISMKTPIYGLNVKYVDPKGTSSSREHEEVMKKYGLDRHKASAYLIALKSI

SEQ ID NO: 1424 - protein, 371 aa, Unknown
  Description of Unknown: uncultivated organism sequence
  Category: MG61 effectors
  Description: MG61-260 effector
MSYTTLVLPFNVDDVAARWLLSTSWLFKVATHRMLSLAKQFPVLPATDIGWKNTFRKTVYGVVPNRRYTDGVIVLVRDIYESCRQLGVDFREVELGDWLMFQQSEKEFPVRNITLRQNYEFWITTINYNGESKRMTIKPTIPKNCRPLLDRILEEKQKYTARVVIKDYGIRKDKLWIHGEIQVTIPIGFYYKHTARYRGNNGRLYGGVDVNTDRINLAIVDRYCRLRDVKTFWFEDATRRGYPRRKARILVGMAVHKMLRYAYHHGVRMLFLEDPSVVSRLRLLWIRNGRRLHRNYNWRVSVFRSSVIEMIAMKAPLYAVKVDYVDPKGTTNSEGHNEIMKRYGVDRHTASAYLIAMKGIKRHAMIQKATT

SEQ ID NO: 1425 - protein, 359 aa, Unknown
  Description of Unknown: uncultivated organism sequence
  Category: MG61 effectors
  Description: MG61-261 effector
MSQYQTSSTVDDASTLVEYATITGRVIPASSEDYMKLAKLAWGFRRAVQVATRMIAKGVVSDDVLKELRRMLNKAYADSAFKIAKAIARGCIASGGDPLHVEVRKLFIVSEGESSRLGNRNVRFEGTNLVKVKYPYDGSWIQLRAKFGEKYLPLLRELVELAKQKKASYNARILFRDAKIYLHLSVPIQLYLKYFKRGDALGEFIAGFDLNSDRVNLVIIDKYGRLVDVKTEWFPEVTSPGFPREKARALRLRALAKLLKYCYTHSVGAVVFENLLDVKKRRFTKSKKANRKISRFAKRKLLQHAILMSLKYGFKVLLVDPKNTTSSREHREVMLKYGLDRHTASAYIVALRGLAYQIT

SEQ ID NO: 1426 - protein, 361 aa, Unknown
  Description of Unknown: uncultivated organism sequence
  Category: MG61 effectors
  Description: MG61-262 effector
MSQSQTSSTVASTPTVEYVSITGRLIPISSEDHMKLARLAWSFRRAVQVATRMIARGMDNNEILRELRKMLNKGYADSAFKIAKAIVKGCIATGGDPLHVEVRKLFIVSEGESSRLGNRNVRFMDTSMVKVKYPYDGSWIQLRAKFGEEYLPLLNELIGLANQKKASYTAKIVFRDGEVYLHVSVPIELYLKHFRNGNANGRLIAGFDLNSDRVNMVILDELGVIRDAKTEWFPEATSPGFPRSKATALRLRALAKLLEYAYHHGVGVVVLEDLERIKKRRRYTKSKSANRKITRFPKRKLLEHAIVMAMKYGFEVLLVDPKGTTSSSEHDEAMKKYGVDKHTASAYLVALRALHQIKQTK

SEQ ID NO: 1427 - protein, 363 aa, Unknown
  Description of Unknown: uncultivated organism sequence
  Category: MG61 effectors
  Description: MG61-263 effector
MTYITLVFPFNVCCDVAERLLSTAWLFKIATHRLLNVAKHFPALPATDIGWMNTFRGIAYEIIPNRRYADGVVALVRSIYESCRQLGIDFKSVELSNWLMFQQSELEYPARNITLKPGLEFHITTVDYSKNTYRDVVEPIIPKSYKPLLDKTLEERQEYTGRVAVKSYGIRKYNLWVRGEIQITIPTDFYYKHMTRYREPKGGLIGGIDVNVDRLNLAVIDERGNLRDCKTFWFSEATTRGFSRRSARSIVGARICEMLSYAYHHNVKTLFLENPGVLGKLKLLWVRNGDRKHENYNYRKAVFRGSVIEMIALKAPLYSINVKYVDPKGTTNSEEHDEAMKRYGLDRHTASAYLIALRGLRNK

SEQ ID NO: 1428 - protein, 408 aa, Unknown
  Description of Unknown: uncultivated organism sequence
  Category: MG61 effectors
  Description: MG61-264 effector
MVAYRGSSRFLPARVFIEDLSTPAGVTENGMWSIGCINPSVLGMSEPRYITVRLPFHADGIYAGLLLSTAWLSKIVAHRVLGIVKGNTILVELPEYRFLGKLRRKCYDILPNRRYVDGVLKLVYSTIRSAMALGVDVSKLELKQWLLFQSDGEASAKGNNNIRLLEPHRARILVFSYDRQPETMEIKLTVPKGYRKLVEELVRKAYSREIGYPARVYISDYGIGKFGLHVAGELQVMVPYQLYCEVMKRYDKPLSDNIAGIDVNVERLDVAIVSPSGRLRRVKTFWLDGTVHMGIRAGRAWSLIGETIHEMLEWLYHSGVSTIVLENPEVLGYLRYYWIRNGKRRGRYWNWKVSMFRTSIIERIAWKTPLYSINVVYIVGAKKFRYFHFSSNSLIFLLRAFQGSKSEA

SEQ ID NO: 1429 - protein, 365 aa, Unknown
  Description of Unknown: uncultivated organism sequence
  Category: MG61 effectors
  Description: MG61-265 effector
MTYITLTFPFNACCDVARRLLSTAWLFRVATHRLLSIAREFPVLPGTDIGWKSTFRGMVHEVIPNRRYADGVVVLVRSIYESCRQLRVDFRSVELSSWLMFQQVELEYPARNITLKPGYEFHVTTVDYGGNTHRVVVKPTVPGNYGLLLDKVLRERQRYTGRVVLRSYGIGGGNLWVQGEVQVTIPMDFYYRHMARYRRNDGKLYGGADVNTDRINLAIIDEDGELIDHKTFWFSEASRKGCSGRRAWSIIGMRIHELLDYAYNNGVKTLFLENPEVLGRLKLMWAKSGDRGHGNYNYKVMTFRSSIIERIALKAPLYGIEVSYVNPRGTTNSKEHDETMKKHGLDRHTASAYLTALKGLTHQRK

SEQ ID NO: 1430 - protein, 374 aa, Unknown
  Description of Unknown: uncultivated organism sequence
  Category: MG61 effectors
  Description: MG61-266 effector
MELPEYITIDVPFTVRGDSARLVWWTAWLSKLCAHRLLNDVKKNEMLTDLSQTSFLKYARERCYEILPNRRYVDGIAVLIYSTLKSARKLGISIKDIELKQWLLFQSEAEKGREGNLNIRLMSLDKAEILVLDREKTLKRIVVGLRTTKGYLRLLKVLVQKAMSGEIGYPARVVIKEYNFYQNDMHLYCGLQVMVPYYLYLDVMKRYGKPLGGNVGGVDVNVDRINLAIVDTNGKLRDVKTFWFREATSRGCRRKQVWTEIHQAIHDMLNYAHHHGVSTIALENPRIIGYLKYYWIRNNNDRGSRNYNYRKTIFRNRIIEVISYKAPLYGMKTVFVNPRGTTHSEEHDEVMKKYGLDRHLASAYIIALKGLKQP

SEQ ID NO: 1431 - protein, 365 aa, Unknown
  Description of Unknown: uncultivated organism sequence
  Category: MG61 effectors
  Description: MG61-267 effector
MGGRWLSVLQSQTGNVVDAFAMVNYVTITGKLHPASGEDYMRLVRLAWDFKNAVRITTRMIAKGVGRSNILKELRGVLNKAYADSAYKLAKAMVEGCLFNGCNPLHIEVRRPFIVSEGESSRLGNRNVRLEDTNIVKVKYPYDGSWITLRAEFGERYLPLLRELAELARRKKVSYGARIVFREGNIYLHLSIPIKLYLKYFKRGEAKGGLVAGFDLNSDRVNLVIIDGHGRIVDTRTAWFTEAVSHGFSRNRARALRLGALAKLLKYCYTHNVSVVVFENLPLIKRRRFTRSRVGNRKITLFAKRQLIQYGIVMALKYGFKTLLTNPKGTTNSKEHSEVMKKYGLDRHTASAYLTALRGLTHQQK

SEQ ID NO: 1432 - protein, 422 aa, Unknown
  Description of Unknown: uncultivated organism sequence
  Category: MG61 effectors
  Description: MG61-268 effector
MGSSRRRLDPLTVALRLRVSGIEAHRKLLVKKTYKAFGGIYPYVIVLNRPVTVDIPFTVTGEKARLVWWTAWFSKFCAHRLLNDAKENEILVDLSQTSFLKYARKRCYDVLPNRRYVDGIAVLIHSTLKSARKLGLKVNEIKLRQWLLFQCEADKKKKGNLNVRLTSTREAEALVFNQEREPRKIKINLRTHKKYEKLLKILVERAIKSEVGYPARIVIKEYNTHLNDLRLYCSLQVIVPYDLYLEVMRKYDAPLGNHVAGIDVNVDRLNIAIVDRYGRLRDVKTFWFREITSRGYRRKRAWTKIYQAIHDMLNYAYHHGVSHVVLENPEIVGYLKYYWIKNGNKKTKNYNYRISIFRNRIIETIAYKTPLYGLKTIYVNPKGTTRSKEHEKIMKKYGLDRHTASAYLIALRSLKKIHYATK

SEQ ID NO: 1433 - protein, 361 aa, Unknown
  Description of Unknown: uncultivated organism sequence
  Category: MG61 effectors
  Description: MG61-269 effector
MDYITIKLPFNVDGDVAKELLSTAWLFRITTHRVLTIAKQQVLPATRIGWKNAFRGIAYRVIPNRRYADGAIILVMGVYESCRALGIDFRSVELSDWLMFQQSELEYPAKSITLKQNHEFHVTTVRYNGSTGRVIVKPTVPRNYRELLDAILTGRVEYMGRVVVTDYGVRNNRLWVHGEVHITIPLDVYYEHMARHKKNSGKLIGGVDVNTDRINLAIIDEDGELIDHETFWFSEVTARGFPKHKAWSIIGMRVHEMLNYAYHHGVRILFLENPEVLGRLRLMWVRNGDRKHENYNHKVATFRSTIIEKITMKAPLYGIEVKYVNPRGTTNSKEHDKLMRKYGLDKHTTSAYLTALKGLKH

SEQ ID NO: 1434 - protein, 363 aa, Unknown
  Description of Unknown: uncultivated organism sequence
  Category: MG61 effectors
  Description: MG61-270 effector
MSYVTLCLPFNVDGVEAKRLLSTAWLFKIATHRMLSIAKQCPVLPATDIGWKNAFRKVIYEVIPNRRYVDGVIVLVQGIYESCRQLGVDFMKVELGDWLMFQQVEKEYPVRNITLKHGYEFHITAIGFDGEPSRVVIKPTIPRNYMKLLDGILVERQKHVARAVIRDYGVRKGRLWVRGEIQVTIPIDFYYRHMARYRVNNGRLYGGVDVNVDRINLAIVDEKGRLRDVKTFWFEEASRKNCPRRRARSIIGMAVHNMLRYAYHHGVKTLFLENPEVLGRLKLLWIRNGSRLHENYNYRVSVFRSSVIEMIAMKAPLYAIKTIYVDPRGTTHSKEHDELMRKYGLDRHTASAYLIALKGLKLP

SEQ ID NO: 1435 - protein, 364 aa, Unknown
  Description of Unknown: uncultivated organism sequence
  Category: MG61 effectors
  Description: MG61-271 effector
MLHYQTNEVINAETLISHVTITGKLIPQTPSDFMKLVRLAYDFRKAVLYATRMISKSMKANELLKELRGMLNKGYGDSAYKVAKSIVEGCRFNGGNPQHIKVKKLFIVGEGEAVRFGNRNVRLEATDRVKIKYPYNRTWLFFKIQYGKDYLPLVQEIVKLAKEKKISYSARIVFRDGRMYLHLSIPVDSYLKYFSKGSANGSLTAGFDLNADRINMVIVDKFGRIRDVKTEWFPEVTSHGYPRSKAKIKRLEALAKLLKYAYHHNVSVVVFENLFIIKRRKFTKNSSANRKMSRFAKKELLQYGIIMAMKYGFKVLLINPRGTTHSKEHDEVMRKYGLDRHTASAYIIALRGIESHNLIRKAII

SEQ ID NO: 1436 - protein, 371 aa, Unknown
  Description of Unknown: uncultivated organism sequence
  Category: MG61 effectors
  Description: MG61-272 effector
MSQYQISSTVVDASTLIEYVTITGKLAPSTGEDYMKLARLAWSFRKAVKVATRMIAKGVKANAVLKELRKTLDKAYADSAFKLAKAIVKGCMTNGGNPLHVNIRKLFIASEGESSKLGNRNIRFEDTSFVKVKYPYDGSWIQLKAEFGEEYLPLLRELTELAKQKRASYNAKIMFRDGKTYLHVSVPAELYLKHFKKGEAHGELIAGFDLNSDRISLAIVDKYGRLVDAKTEWFPEVTSHGFSREKAKALRLRALAKLLTYCYTHGVGTAVFEDLFNVNKRRFTWNRTANRKMSRFAKRELLQHAILMSLKYGFRVLLADPRGTTSSREHDEVMRSHGLDKHVASAYLIALRVLNQDKQTKQTIMKTETAL

SEQ ID NO: 1437 - protein, 328 aa, Unknown
  Description of Unknown: uncultivated organism sequence
  Category: MG61 effectors
  Description: MG61-273 effector
MGYVTVSLSFNVGGDAAKGLLSTAWLFKVATHRVLDLVRQSPVLPATDIGWKNTFRSVAYEVVPNRRYADGVVVLVRGIYESCRQLGVDFRSVELGDWLMFQQSEIEYPVRNITLREGYEFYVTTINYLGKSDRVVIKPTIPRNHKPLLDRLIEEGVEHTGRVMIRDYGVRRGMLWIHGEVQVTLPLDFYYRHMVRYGVNNGRFYGGVDVNADRINLAIVDGDGELRDVRTYWFREVTARGYPRRRAWSVIGMRVHEMLDYAYHHGVRTLLLEDPGVLGRLRLLWVRSGKRKHENYNWRVAIFRSSVIEMIAMKAPLYGIEAKYENPK

SEQ ID NO: 1438 - protein, 371 aa, Unknown
  Description of Unknown: uncultivated organism sequence
  Category: MG61 effectors
  Description: MG61-274 effector
MSYITLCLPFNIDSSEAERLFSTAWLFKIASHRMLSLVKQFPILPATDIGWKNSFRKIIYEVIPNRRYTDGVIVLIRGVYESCRQLGVDFKEVELGDWLMFQQVEKEYPVRNITLKQGYEFHVTTIDHNGSSERIVIKPTISKNYKLLLDRILEDKQKHTARIVIKDYGVRKDKLWVHGEVQLTIPLDFYYKYMVRFKRNYGKLYGGVDVNTDRINLAIVDKYGRLRNVKTFWFEDASRKGYPKRKARVLIGMAVHEMLKYAYHHGVKTLFLENPEVLGKLKLLWIRNGRRLYKNCNWKVMTFRSSIVEMVAIKAPLYAIKVDYVSPRGTTNSKEHVKIMRGYGLDRHTVSAYLIALRGIEGHTMIQKAII

SEQ ID NO: 1439 - protein, 362 aa, Unknown
  Description of Unknown: uncultivated organism sequence
  Category: MG61 effectors
  Description: MG61-275 effector
MAGEAREPEITHVTVTGRIMPLNSEDYVKLRYLAYKFRKNLVRAVKMYTRGVNKLVIVKEITRELNLGYADTIYKMAKLIVEGARKNGSNPVKIEVKKLFIASRGFSANKGNRNIRLESTDTLYVNIPREGWVKFKVSFGERYVPLVKELVELAESRKTSYTARIVFRNGRIYLHLSIPIELYLKYFRRGEANGDLIAGFDLNSDRVNMVIVDKSGVVRDVRTEWYPEVTSPGYPGSKATVARLQALSKLIEYAYHHGVGVAVFEDLGRIKRRRFTGSPVANRKMSRFPKRKLLEHAVVMALKYGFKVYLVDPSYTSVVGDYLSRELGLDKHTASAYMLTARYLGLDLKSVEITQITRKTKN

SEQ ID NO: 1440 - protein, 324 aa, Unknown
  Description of Unknown: uncultivated organism sequence
  Category: MG61 effectors
  Description: MG61-276 effector
MVGEVREPGITHVTITGRIILLNTNDYVKLCYLAYKFRKNLAKAIKMYARGVDKLVMVKEITRELNLGYADTIYKIAKLIVEGARRNGSNPLKIEVKKLFVASRGFSANKGNRNIRLESTDMVYVNILKERWIRFKVSFGEKYVPLVKELVELAKSRKNSYSAKVVFRNGRIYLHLSVPIELYLKYFRRGEAKGDLIAGFDLNSNRINMVIVDRCGVIRDVRIEWFPEVTSPGYPRNKAKVARLQALAKLLNYAYHHGVGVTVFEDLDKVKQRAFTSSPTANSYLSRELGLDKHTASAYMLTARYLGLDLKSVEITQITRKTKN

SEQ ID NO: 1441 - protein, 363 aa, Unknown
  Description of Unknown: uncultivated organism sequence
  Category: MG61 effectors
  Description: MG61-277 effector
MTYITLVLPFNVCCDVAKRFLSTAWLFKIATHRLFNVVKYFPVLPVTDIGWKNTFRGIAYEIIPNRRYADGVVTLVRSIYESCRQLRIDFKSVELSNWLMFQQSELEYPARNITLRSGYELHITTVYYNKNTYRDVVKPTIPKSYKPLLDKMSEERQKYTGRVAVKSYGTRKDNLWIRGGVQIIIPTDFYYKHMTRYREPKGSLIGGIDVNADRLNLAIIDEKGNLWDCKTFWLSEAAARGFSRRNARSIISAKIHEMLSYAYHYNVKTLFLESPVVLGKLKPLWVKNGGRRHENYNYKVSVFRSSVIEMIELKTPLYGIEVKYVDPKGTTNSEEHDEAMKRCGLDRHTASAYLIALRGPRNQ

SEQ ID NO: 1442 - protein, 363 aa, Unknown
  Description of Unknown: uncultivated organism sequence
  Category: MG61 effectors
  Description: MG61-278 effector
MSYVTIVAGFNTSGEDAKLLLSTAWLFKVATHRLFNIVKQMPVLPASDIGWKSMFYKAVYDVIPNRRYSYGVITLVRSIYESCRQLGVDFKSIELSDWLMFQQSEKEYPPRSITLKSLSEVEVTVFSYSKESKRIALRVSTSGVYRKLLNAILREKQPYMPRIYVKSWNARGGKLFVRGELQVAIPTDFYYKHMPRASANNGKLYGGVDVNVDRVNLVIVDGDERLRDAYTFWFEESSRKGCKRRRARSIIGMRVHEMLEYAYSHGVKTLFLENPEVLGKLKLLWVRSNDKRHENYNYGVSVFRSSVIEMIALKASLYSIEVKYVDPKGTTSSRKHDDVMRKYRLDRHTASAYLIALKGLKQL

SEQ ID NO: 1443 - protein, 362 aa, Unknown
  Description of Unknown: uncultivated organism sequence
  Category: MG61 effectors
  Description: MG61-279 effector
MDYLTIRLPFNVDGGVAGELLSTAWLFRVAAHRVLSLAKQMQFLPSTKVGWVNAFRESAYGVIPNRRYADGALTLVMSIYESCRELGVDFKGVELSNWLMFQQSELEYPAKSITLKPGYEFHVTTIKYNGSTGRVVIKPTVPRSYGKLLNAVLTERVKYMGRVVVRDYGVRGSQLWVRGEVQVTVPMDVYYEHMAKHRRNAGRLLGGVDVNSDRINLAIVDEDGELIDHKTFWFSEASRKGFSRHSAWSIIGMRIHEMLNYAYHHGVRALFLENPGVLGRLKLVWIKNGDRGRENYNHKVSIFRSTIIEKIALKAPLYSIEVKYVNPRGTTNSKEHDETMRKHGLDRHTASAYLIALRGLRH

SEQ ID NO: 1444 - protein, 363 aa, Unknown
  Description of Unknown: uncultivated organism sequence
  Category: MG61 effectors
  Description: MG61-280 effector
MSYVTVTAGFNASGEEAKLLLSTAWLFKIATHRVLSIAQNTPALPASKIAWKNTFRRIAYEVIPNRRYADSATVLVMGIYESCRQLGVNFKEVELGDWLMFQQSEKEYPPRNITLKYIDEAWVTVLGYEGRRERIKLKVSISGAFRRLLEAILREKQPYNPRIVLKSWNTRGGKLYVKGELHLAIPLDFYYKHMKRFEGNHGKLYGGVDVNSDRVNLAVVDDNGRLRDTYTFWFREATARGYPKRRARSVIGMRLHEMLRYAYHHGVKMLFLENPDVLGRLKLLWVRNGRRLGRNYSWRVMTFRSSIIEMIALKAPLYSIKIGYVDPRGTTHSEEHDEVMRRHGLDKHTASAYLIALKGLKQP

SEQ ID NO: 1445 - protein, 333 aa, Unknown
  Description of Unknown: uncultivated organism sequence
  Category: MG61 effectors
  Description: MG61-281 effector
MLHLAKNCDVLPASDIGWKSMFRKAIYSIIPNRRYADGVIVLIRGIYESCRQLEVNFKDVELGNWIMFQQSEMEYPVRTITLKQDYSFRITTFDYNGSSERISISPTIPKSYSLLLSKILEDKQKHTARIVIKDYGVRKNKVWVHGEIQLTIPLSFYYRYMVRFKKNKGKLFGGVDVNCDRINLAIVDRFGRLRDVKTFWFRETTARGFPRRKARVIIGMRVHEMLKYAYFHGVSKIFLENPEILGKLKLLWIRNGKRFSRNYNWKVAVFRSNIIEMISMKATLYSIKTRYVNPKGTTSSNEHKEIARKLGLDRHTASAYLIALRGLKQNDTI

SEQ ID NO: 1446 - protein, 371 aa, Unknown
  Description of Unknown: uncultivated organism sequence
  Category: MG61 effectors
  Description: MG61-282 effector
MSYITLCLPFNVDGFKARKLLSTTWLFKTASHRMLSLAKQFPILPATDIGWKNTFRKIIYEIIPNRRYTDGVIVLVRGIYESCRQLGVDFEDVELGDWLMFQQVEKEYPVRNITLKQGYEFHITTIDYNDGVERIAVEPTIPKNYRLLLDKILEEKQKHSARVIIKDYGVRKNKLWVHGEIHVTIPLDFYHKYMTRYRRNYGKLYGGVDVNTDRINLAIVDSEGNLRDTYTFWFREVTARGYPRRKARSVVGMRVHEMLKYAYYHGTKILFLENPEILGKLRLLWVRNGKRLHKNYNWKVATFRSSIIEMITMKAPLYSIKVGYVDPRGTTSSKEHGEIMRKYRLDRHIASAYLIALRGIERRATIQKATA

SEQ ID NO: 1447 - protein, 373 aa, Unknown
  Description of Unknown: uncultivated organism sequence
  Category: MG61 effectors
  Description: MG61-283 effector
MSEPRYITVRLPFHADGIYAGLLLSTAWLSKIVAHRVLGIVKGNTILVELPEYRFLGKLRRKCYDILPNRRYVDGVLKLVYSTIRSAMALGVDVSKLELKQWLLFQSDGEASAKGNNNIRLLEPHRARILVFSYDRQPETMEIKLTVPKGYRKLVEELVRKAYSREIGYPARVYISDYGIGKFGLHVAGELQVMVPYQLYCEVMKRYDKPLSDNIAGIDVNVERLDVAIVSPSGRLRRVKTFWLDGTVHMGIRAGRAWSLIGETIHEMLEWLYHSGVSTIVLENPEVLGYLRYYWIRNGKRRGRYWNWKVSMFRTSIIERIAWKTPLYSINVVYIDPKGTTSSREHSEIMRKYGLDRHTASAYLIALKGLKQP

SEQ ID NO: 1448 - protein, 363 aa, Unknown
  Description of Unknown: uncultivated organism sequence
  Category: MG61 effectors
  Description: MG61-284 effector
MSYITVTAGFNASGGEAKLLLSTAWLFKLATHRVLSYAKSMPILPASKIGWKSTFRKVAYEIIPNRRYADSAVTLVMGIYESCRQLGINFGDVGLGDWLMFQQSEKEYPPRNITLKDVDEAWITVLGYDGESRRIKLRVHASKAFRKLLDALLRERQPYNPRIVLKTWNVRDGKLYVRGELHVAIPLDFYYKHMARFTRNNGRLYAGVDVNVDRINLAVVDVEGNLRDTYTFWFREVTTRGYPRHRARSVIGMRIHEMLKYAYHHGVKTLFLENPEVLGKLKLLWIRNGDRKSKNYNWKKTIFRSSVIEMIAMKAPLYSINVKYVDPRGTTNSREHDEAMKRCRLDRHTASAYLTALKGLNLT

SEQ ID NO: 1449 - protein, 369 aa, Unknown
  Description of Unknown: uncultivated organism sequence
  Category: MG61 effectors
  Description: MG61-285 effector
MWAIALNESPLYTLKLSFNASGEAARRILSTAWLFKLACHRVLNKSKGLIDHLVPSKVAWLKVFYDDARAYIPNKRYAYGAVYLVYGVWQSAGELKVDYKNVELSDWLLFQHYEREVDGNVIRVSEDGSTLITTYSYDGSKDRVFIRARPNRGHAGLLKLVVESKEKYMPKVVVKGYNVRDGTLYLRGELHVAVSYSFYLKHSTRYREPRGGLVGGVDVNADRINLAIVDRKGNLRDYKTFLFAETTARGYPRRGAWSVIGMKIHEMLEYAYHHGVSAIALEGPEVLGYLKSAWMRGDDRSHENYNYKKAVFRSSLIERIAMKAPLYGLSVEFVNPRGTTSSVERDEAMRRYGLDKHTASAYLIALRCI

SEQ ID NO: 1450 - protein, 374 aa, Unknown
  Description of Unknown: uncultivated organism sequence
  Category: MG61 effectors
  Description: MG61-286 effector
MAYKLYWGFPITSYITIVLPFNAGGDVAERLLSTAWLFKVASHRMLRLAKQSPVLPATDIGWKNMFRKAVYEVIPNRRYADGAVVLVRGIYESCRQLGVGFKEAELSDWLMFQQAETEYPVRNITLKEDYEFHITTIGYEGATDRVVVEPTIPKNYRTLLDEILEERQRHTARVVIKDYGARENMLWVHGEVQLTIPIDFYCKHMARYRRNYGKLYAGVDVNVDRINLAIIDADGNLRDTYTFWFRETTARGFPRRRARSVIGMAVHEMLKYAYHHGVKTLFLENPDVLGKLKLMWVKSSERRHENYNYKVAIFRGSVIEMVAMKAPLYAIDVKYVSPRRTTNSKEHNEIMRKHRLDRHTASAYLTALKGLKQT

SEQ ID NO: 1451 - protein, 382 aa, Unknown
  Description of Unknown: uncultivated organism sequence
  Category: MG61 effectors
  Description: MG61-287 effector
MTSLPEYLTISLPFTVKGENAKLIWLTAWFSKLCAHRLLDDVKNNEFLIDLSQTSFLKYARKRCYDILPNRRYIDGIATLIHSTLKSVRKLGVTIGSIELKRWLLFQSEAEKEKKGNLNIRLVSVNRAEILVFNHKKESRRIEISLRTLKGYRRVLEALLGRALKSEVGYPARVVIKEFNFYPSNLHLYCSLQIMIPYNLYLETMRKYYKALGDHVAGVDVNVDRLNLAIVDKYGRLRDVKTFWFREITSRGYRRRPAWTKIHHAIHNMLNYAYHHGISCIALERPEIIGYLRYYWVRNGDRKSKNYNYRKSIFRNKIIEAITCKAPLYSLKTIYVNPKGTTRSKKHDEAMKKYGLDRHTASAYLIALRGIERHTMIQKATI

SEQ ID NO: 1452 - protein, 364 aa, Unknown
  Description of Unknown: uncultivated organism sequence
  Category: MG61 effectors
  Description: MG61-288 effector
MSQYQTNNVVDATNFITYVTITGELVPISPEDYMKLVRLAHDFRKAVLYATRMIAKGKNTNAILKELRSMLNKAYGDSAYKVAKALVEGCRFNGGNPRHIEVRKLFIVSEGESSRLGNRNIRLESTSTTRIKYPYDSSWLTFKARFGEKYLSLIEELVKLTRHKEISYGARIVFRSGKVYLHLSVPIGLYLKYFSKGKTKGNLIAGFDLNSDRINMVVIDRYGRIRDIKTEWFPEVASHGYPRSKAKTKRLEALAKLLRYAYYHNVGAVVFENLLVIRKRRYTRNRKANRKITRFAKRELLQHGIVMAMKHGFKVLLVNPKGTTNSEEHSKIMRRDGLDRHSASAYIIALRGIERHNPIQKTII

SEQ ID NO: 1453 - protein, 378 aa, Unknown
  Description of Unknown: uncultivated organism sequence
  Category: MG61 effectors
  Description: MG61-289 effector
MKDTGLPDYIAINIPFTVNGEEAKLVWYTAWFSKLCAHRLLNDVKGNDALLGFSQASFLKYARERCYELLPNRRYIDGVATLVHSTLRSARKLGVNIRDIELGQWLLFQSEAESEKRGNLNIRLLSVNRAEVLVLNYDGASKRIDIGLKTPKGYVELLKVLIERAGKYEVGYPARVMVRGYSFRPGNMHLYCGLQVMVPYSLYLNVMRRYSEPRGNLIGGVDVNVDRLNLAIVDRYGRLRDVKTFWFREVTARGVKGVVAWTKIHQAIHELLNYAYHHGVSAISLENPRTIGYLRYYWVRNGDRGSRNYNYRVSIFRSRTIEVISYKAPLYAMRTIYVNPKGTTNSQQHDEVMRRLGLDRHAASAYLIALRGINKQRK

SEQ ID NO: 1454 - protein, 300 aa, Unknown
  Description of Unknown: uncultivated organism sequence
  Category: MG61 effectors
  Description: MG61-290 effector
MLNKAYGDSAFKLAKTIVESARSNRGDPLKIEIRRLFIVSEGEAGRQGNRNVRLDDSSKVRIRYPYERSWLSFRARFGENYVPLVKELSELAKSRKCSYGVMIVFRNGRIYLHLSVPVELYLKYFRKGEAKGDLIAGFDLNSDRINTVIVDKYGRVVDVRTAWFPEVTSPGYPRNKARVVRLQALVELFNYAYHHGANVAVFEDLDKIKRRRFTSSPTANRKITRFAKKQLLTHAVVMSLRYGLKPALVDPRGTMSSPVHSAVMKKHGLDRHTTSAYLIALRYLQDEKTVNSYKAYKQSK

SEQ ID NO: 1455 - protein, 363 aa, Unknown
  Description of Unknown: uncultivated organism sequence
  Category: MG61 effectors
  Description: MG61-291 effector
MSYVTVTAGFNACGEEAKLLLSTAWLFKIATYRVLAHAKSMPVLPATKVAWKNAFREVALSAMPNRRYADSSIIVVMGIYESCRQLGMDFREVELGDWLMFQQSEKEYPPRNITLRDVDEVWVTVIGYGGESGRIKLRVSTSKTFRELLGALLRERQPYNPRVVLKAWNVRGGELYVRGELQVSVHMNLYYAHVAKHRRNEGRLYAGVDVNADRINLAIVDERGDLRDAYTFWFREVTARGYPRRRARSVIGMKVHDMLRYAYHHGVKMIFLEDPGILGRLRLMWIRNGRRLHKDYNWKVSAFRSSVIEMIATKAPLYTVKAVYVDPRGTTHSKRHDEVARKYGLDRHTASAYMIALKGLNLP

SEQ ID NO: 1456 - protein, 364 aa, Unknown
  Description of Unknown: uncultivated organism sequence
  Category: MG61 effectors
  Description: MG61-292 effector
MVENPLYTIKLSFNVSGDRAKKILSTAWLFKLACYRVLSRSKELLNALIPSKIAWVKMFYSDARDLIPNKRYAYGTIYLVYGIWESARELGINYRSVELSDWLMFQHYDREVDGNVIRILEDGSALVTTYSYDGSKDRVLIKAKPNKGYEELLKLVVESKEKYMPRVVVRGYNVRNDKLYVSGEIHVTIDYNFYLKHTTRYGEPKGSLIGGVDVNSDRINLAIVDEKGNLRDCKTFWFPETVTRGYPKRRAWSIIGIKIHEMLRYAYNHDVSTIALENPETLGYLKLAWVRNGDRKHENYNYKKSVFRNTIIERIVMKAPLYGLNTKFVDPKWTTSSREHDEIMKRFGLDRHTASAYIIALRSI

SEQ ID NO: 1457 - protein, 359 aa, Unknown
  Description of Unknown: uncultivated organism sequence
  Category: MG61 effectors
  Description: MG61-293 effector
MNYVTLTLPFNVDGDVAKRLVSTAWLFKTASHRMLSLAKQRPILPATDIGWKNTFRKLVYEIIPNRRYADGVIVLVRGVYESCRQLSIDFRRVELGDWLMFQQAEKEYPVRNITVKLGYEFHITTIDYNGIAERIVLKPTIPKNYKCLLDKILEEKQKHTARVVIKDYGVRKDRLWVHGEIQLTIPLDFYYKYMVRYTVNNGKLYGGVDVNTDRINLAIVDGNGRLRDTYTFWFSETTARGYPRHRARSIIGMKIHDMLRYAYHHGVKTLFLENPGVLGKLRLLWIKNGKRLHSNYNWKVSVFKSSAIEMIAMKAPLYAIITRNVDPGGETNSREHDNDTTNKILHTQLYKFIEFIIYA

SEQ ID NO: 1458 - protein, 1262 aa, Unknown
  Description of Unknown: uncultivated organism sequence
  Category: MG61 effectors
  Description: MG61-294 effector
DRYMDFTKFQKLNSIIKTCSFEMIPIGKTRETMEKHNVIEEDAERKSNAELTKEVSDSFIREFIADYKEDMDWKDLYDAYGEDRARFTDIMNQKAEKLAKRFSDSFNEYINTFLKANGINDKKSKWSDSGYVDVVLPLYVSIHPDFSNDKYERAVASLLHCSNSLFKKYTTSYARIIAGTKKGSFADRSMENFQTACANSVMFDLISRNLSSVGSHDAFKEVFADAPLNMNEYLSQKGISRYNEFVGDSFDESGQVIRYGVNHYINEWNQTHPDERMPKIHKLKKQILSIVEPSFRIRTINDETELFGTFDNIRTAEQRYAGMLESILENMNTADIYDKSGILVTSAERDSLANAITGEWSYFRRQIKEEEENRIREEYLQKKNRVKTKLTQKDNKQIEDALNKSIYSVADLNKMLGSDFGTIEEKLLDEYIRNKSKKESAYAQLVKTDFYDKKTIPAGDDVQRIQQYLDKVLSLTHIVRGLCADSQDPRTDFVFSDDVSSLEDDRVQIISCYNLIRNFVTKKREKTAKEKQIQLCFGRPAHFEQVWNNKQEGKFGNVDAALLEYAGKYYYMVPAAKNEAKLNFPVTDEPQMGECYNYLATKKAIGFAKAFAKFYIKSPEAMEGFEKTEEPFEISVGNDTMIISRKVYEDYEVKTFRESEEAKNKLIDCAKEFLSKNLSYCIYDWSVLKEANDYVNYGEFCNEVDSIAFRVINRYVSKKLVDDAVERGNLYMFEISSLDMYKDSSRMKNIMALRFNQIINGMFTGDKSIIINNAPQIRYRPVVIEKKDVHPVGSRLVNKNTTDGRTIPGDVYLELCAYYNGKKDSLSPEASLYNEKVSVKDSDRAHIKDKHYTEEKFLITFSYTANKNVASATSGYQLNEMVRKEIRENGCNIMAVIRGIDNLLYYAVVDENGNRIEAGDLNVVGDTDFYEKLTILGKQRYTDQKNWKHENKVADLKDTYLGQVCRKIASIAVKNNAVIVIDKINESTKRKNAAFDNNMYRKFENALVNSLTDYYDIGIRGDEPGSVKNPLQLTVKEDNGFQNGIIFYQFDTFTKNICMRTGFVNLLNTFEIKTVASKVAFLKKLSGIYYDNDINEFVFEFTWRNIGCILKDEELPLYDGMDKIWKVRTHFTRYMRNAEKNKYVEIDGTEVLKELIRKNHPDMIGGKIDVDRLTSEEVKKVFEIFTLYTNGYIPRMDDAESGYMSPACDWNNFGTIRYDEMTALQLAKKSSLMIGKVKSGKDWKDMNVSRVEWLNHVLKADW

SEQ ID NO: 1459 - protein, 376 aa, Unknown
  Description of Unknown: uncultivated organism sequence
  Category: MG61 effectors
  Description: MG61-295 effector
RYVSKKLVDDAVERGNLYMFEISSLDMYKDSSRMKNIMALRFNQIMNGMFTGDKFIIINNAPQIRYRPVVIEKKDVHPVGSRLVNKNTTDGRTIPGDVYLELCAYYNGKKDSFSPEASLYNEKVSVKDSDRAHIKDKHYTEEKFLITFSYTANKNVASATSGYQLNEMVRKEIRENGCNIMAVIRGIDNLLYYAVVDENGNRIEAGDLNVVGDTDFYEKLTILGKQRYTDQKNWKHENKVADLKDTYLGQVCRKIASIAVKNNAVIVIDKINERTKRKNAAFDNNMYRKFENALVNSLTDYYDIGIRGDEPGSVKNPLQLTVKEDNGFQNGIIFYQFDTFTKNICMRTGFVNLLNTFEIKTVASKVAFLKKLSGIY

SEQ ID NO: 1460 - protein, 258 aa, Unknown
  Description of Unknown: uncultivated organism sequence
  Category: MG61 effectors
  Description: MG61-296 effector
MYRKFENALVNSLTDYYDIGIRGDEPGSVKNPLQLTVKEDNGFQNGIIFYQFDTFTKNICMRTGFVNLLNTFEIKTVASKVAFLKKLSGIYYDNDINEFVFEFTWRNIGCILKDEELPLYDGMDKIWKVRTHFTRYMRNAEKNKYVEIDGTEVLKELIRKNHPDMIGGKIDVDRLTSEEVKKVFEIFTLYTNGYIPRMDDAESGYMSPACDWNNFGTIRYDEMTALQLAKKSSLMIGKVKSGKDWKDMNVSRVEWLNH

SEQ ID NO: 1461 - protein, 122 aa, Unknown
  Description of Unknown: uncultivated organism sequence
  Category: MG61 effectors
  Description: MG61-297 effector
NKYVEIDGTEVLKELIRKNHPDMIGGKIDVDRLTSEEVKKVFEIFTLYTNGYIPRMDDAESGYMSPACDWNNFGTIRYDEMTALQLAKKSSLMIGKVKSGKDWKDMNVSRVEWLNHVLKADW

SEQ ID NO: 1462 - protein, 1264 aa, Unknown
  Description of Unknown: uncultivated organism sequence
  Category: MG61 effectors
  Description: MG61-298 effector
MEDIYMDFTKFQKLNSIIKTCSFEMIPIGKTRETMEKHNVIEEDAERKSNAELTKEASDSFIREFIADYKEDMDWKDLYDAYGEDRARFTDIMNQKAEKLAKRFSDSFNEYINTFLKANGINDKKSKWSDSGYVDVVLPLYVSIHPDFSNDKYERAVASLLHCSNSLFKKYTTSYARIIAGTKKGSFADRSMENFQTACANSVMFDLISRNLSSVGSHDAFKEVFADAPLNMNEYLSQKGISRYNEFVGDSFDESGQVIRYGVNHYINEWNQTHPDERMPKMHKLKKQILSIVEPSFRIRTINDETELFGTFDNIRTAEQRYAGMLESILENMNTADIYDKSGILVTSAERDSLANAITGEWSYFRRQIKEEEENRIREEYLQKKNRVKTKLTQKDNKQIEDALNKSIYSVADLNKMLGPDFGTIEEKLLDEYIRNKSKKESAYAQLVKTDFYDKKTIPAGDDVQRIQQYLDKVLSLTHIVRGLCADSQDPRTDFVFSDDVSSLEDDRVQIISCYNLIRNFVTKKREKTAKEKQIQLCFGRPAHFEQVWNNKQEGKFGNVDAALLEYAGKYYYMVPAAKNEAKLNFPVTDEPQMGECYNYLATKKAIGFAKAFAKFYIKSPEAMEGFEKTEEPFEISVGNDTMIISRKVYEDYEAKTFRESEEAKNKLIDCAKEFLSKNLSYCIYDWSVLKEANDYVNYGEFCNEVDSIAFRVINRYVSKKLVDDAVERGNLYMFEISSLDMYKDSSRMKNIMALRFNQIMNGMFTGDKSIIINNAPQIRYRPVVIEKKDVHPVGSRLVNKNTTDGRTIPGDVYLELCAYYNGKKDSLSPEASLYNEKVSVKDSDRAHIKDKHYTEEKFLITFSYTANKNVASATSGYQLNEMVRKEIRENGCNIMAVIRGIDNLLYYAVVDENGNRIEAGDLNVVGDTDFYEKLTILGKQRYTDQKNWKHENKVADLKDTYLGQVCRKIASIAVKNNAVIVIDKINESTKRKNAAFDNNMYRKFENALVNSLTDYYDIGIRGDEPGSVKNPLQLTVKEDNGFQNGIIFYQFDTFTKNICMRTGFVNLLNTFEIKTVASKVAFLKKLSGIYYDNDINEFVFEFTWRNIGCILKDEELSLYDGMDKIWKVRTHFTRYMRNAEKNKYVEIDGTEVLKELIRKNHPDMIGGKIDVDRLTSEEVKKVFEIFTLYTNGYIPRMDDAESGYMSPACDWNNFGTIRYDEMTALQLAKKSSLMIGKVKSGKDWKDMNVSRVEWLNHVLKADW

SEQ ID NO: 1463 - protein, 343 aa, Unknown
  Description of Unknown: uncultivated organism sequence
  Category: MG61 effectors
  Description: MG61-299 effector
FNEYINTFLKANGINDKKSKWSDSGYVDVVLPLYVSIHPDFSNDKYERAVASLLHCSNSLFKKYTTSYARIIAGTKKGSFADRSMENFQTACANSVMFDLISRNLSSVGSHDAFKEVFADAPLNMNEYLSQKGISRYNELVGDSFDESGQVIRYGVNHYINEWNQTHPDERMPKMHKLKKQILSIVEPSFRIRTINDETELFGTFDNIRTAEQRYAGMLESILENMNTADIYDKSGILVTSAERDSLANAITGEWSYFRRQIKEEEENRIREEYLQKKNRVKTKLTQKDNKQIEDALNKSIYSVADLNKMLGSDFGTIEEKLLDEYIRNKSKKESAYAQLVKT

SEQ ID NO: 1464 - protein, 1258 aa, Unknown
  Description of Unknown: uncultivated organism sequence
  Category: MG61 effectors
  Description: MG61-300 effector
MEFTKYTRSNKIVRSVIFEMSPIGNTRAAIKEHGVIEEDAVRKSNAVLIKEVSDNFIREFLNDDKLEKYDWVEWEDLCLLIDDKPAFDAKAEKMKESIATSISKSFDSYINRFMAANGKANGKYSWKSAGYIDEVIPMYILCHPDYQDEKYTLAAESLKHASSAMFKKYFVSYERILNGTKTGSIAYRVMENVLIFCTNSKMYKKFAAKISGADLFAKIADITVLEDLISQNGIDFYNEMIGDLYDKDGQLIRKGFNSRINEYNSTHPDDKIPYLKKMKKQILSYVEPFFTIDKIESKEDLDNILTSVRATEESLTENLKTLFSNLLSNDKFPLDRILLTSAARSTIANSLAGRWDYFENIIREKETDKLKADYFEKKNRILTKLTKKDQKKINDAVTSNISSIADLNQMLHNVSEETVEDFLIKSLNKQISLKESSYSVLNNSGFMKSDSKPAWDDNQKIQDYLDHVIAISRMLKYFYTDLMNEKVDPIFVEELQMFDDSKDKIVKSYNMIRNYCTTKTELTAKEKRIQLCFGRPVHFEQTWNNKQEGKFGNLDAALLEFDGLYYYIVPAAKNKRKLNFPVTDIPQEGVNYHYLSTKKSIKLSMALPKMTFKSPAAVKKYAETEEPFTINIGNSTMTVSKKMYDDYNLKTFSSSPDARIALIDYAKEFISKEFSFKCYDYSSLKPSEEYRSYGEFCNEVDSITFSTTSKYVNKDLVDNAVMDGDLYMFLITSADMYKDREKNKDITAIRFNTIMQSMFTGDTSIIINNSPTIYYRPQIIEAVDKHPVGSILVNKMTTDGRTIPGEIYLELCDFYNGKKDYLSAEAKAYNENVSVKESSFSHIKDAHYTREMFTISLSYTLNKGVSNEKLGYALNDEIRRDIVEEGCNIMSIIRGINNLLYYCIVDQNGNQLKAGSLNIVGGVDYYEKLTLLSTQRYLDSKNWKYEKKSAELKDTYLGQVCREIAKIAIANNAIIVIDKLIDSIKNKAAAFDNQVYKKFENRLISTLGNYYDVTLPDNEPGGSTNPLQLTVPDNTSIQNGIIFFIIDSGTKNICQETGYVNLLNTYNVNTVTAKAKFLSKISKIYFDADLNEFVFEFSWKDIGSINLKEDEEIPLYLGMNKVWKVRTHITRYKKNKEKRSYEEIDGTEMMKAVMKNYPDMIGKDIDITKLSSKDIQAVYEVFTYYANGFIPRIGNEDSEFISPVSTWTSIGNVPYDEMSAYQLAKKSLLGINKIQFTEDSGRYQYTPVSKVEWYNSLL

SEQ ID NO: 1465 - protein, 327 aa, Unknown
  Description of Unknown: uncultivated organism sequence
  Category: MG61 effectors
  Description: MG61-301 effector
MDFTKFQKLNSIIKTCSFEMIPIGKTRETMEKHNVIEEDAERKSNAELTKEVSDSFIREFIADYKEDMDWKDLYDAYGEDRARFTDIMNQKAEKLAKRFSDSFNEYINTFLKANGIKDKKSKWSDSGYVDVVLPLYVSIHPDFSNDKYERAVASLLHCSNSLFKKYTTSYARIIAGTKKGSFADRSMENFQTACANSVMFDLISINLSNVGSHDAFKEVFADAPLNMNEYLSQKGISRYNEFVGDSFDESGQVIRYGVNHYINEWNQTHPDERMPKMHKLKKQILSIVEPSFRIRTINDETELFGTFDNIRTAEQRYAGMLESILEK

SEQ ID NO: 1466 - protein, 278 aa, Unknown
  Description of Unknown: uncultivated organism sequence
  Category: MG61 effectors
  Description: MG61-302 effector
MDFTKFQKLNSIIKTCSFEMIPIGKTRETMEKHNVIEEDAERKSNAELTKEASDSFIREFIADYKEDMDWKDLYDAYGEDRARFTDIMNQKAEKLAKRFSDSFNEYINTFLKANGINDKKSKWSDSGYVDVVLPLYVSIHPDFSNDKYERAVASLLHCSNSLFKKYTTSYARIIAGTKKGSFADRSMENFQTACANSVMFDLISRNLSSVGSHDAFKEVFADAPLNMNEYLSQKGISRYNEFVGDSFDESGQVIRYGVNHYINEWNQTHPDERMPKMH

SEQ ID NO: 1467 - protein, 367 aa, Unknown
  Description of Unknown: uncultivated organism sequence
  Category: MG61 effectors
  Description: MG61-303 effector
MIRGIDNLLYYAVVDENGNRIEAGDLNVVGDTDFYEKLTILGKQRYTDQKNWKHENKVADLKDTYLGQVCRKIASIAVKNNAVIVIDKINESTKRKNAAFDNNMYRKFENALVNSLTDYYDIGIRGDEPGSVKTPLQLTVKEDNGFQNGIIFYQFDTFTKNICMRTGFVNLLNTFEIKTVASKVAFLKKLSGIYYDNDINEFVFEFTWRNIGWILKEEELPLYDGMDKIWKVRTHFTRYMRNAEKNKYVEIDGTEVLKELIRKNHPDMIGGKIDVDRLTSEEVKKVFEIFTLYTNGYIPRMDDAESGYMSPACDWNNFGTIRYDEMTALQLAKKSSLMIGKVKSGKDWKDMNVSRVEWLNHVLKADW

SEQ ID NO: 1468 - protein, 410 aa, Unknown
  Description of Unknown: uncultivated organism sequence
  Category: MG61 effectors
  Description: MG61-304 effector
FVHIISRKYKEATYNMNYAKFTKQGKLIKGIKLELVPQGNTRDAISEYKIVEADQQLADMVKEVVMAGNEFYKDFIKQIVEHMDGTDWQAYGEAVENKTADQKAYDEAVKSISASIKNAILDTAELYGGKKTLFAKDFITIVLRKYVETAENFPYNRERVLTCIDVLSDKNVLFKTPYVKWEHIIFGESKGSIAERMLSNFDIFYDNKNKYAALKEATAITDFDDFFTDYASYTRYVGQDGIELYNSAIRGIYSESGAKISEGINEYINKLKMKHPELHVNMLKKLQKQILSNSEPLFKVATIQNAEELKGIMNKVKVTEESVLSSAKELLVHMETSDLHDLYISGQRLYFVCQKIAKDGGLLEELIFNDECSRVEKLTEKKKEEIRGAIVKHDYSFAYVDSLLSEYAEK

SEQ ID NO: 1469 - protein, 1259 aa, Unknown
  Description of Unknown: uncultivated organism sequence
  Category: MG61 effectors
  Description: MG61-305 effector
MDFTKFQKLNSIIKTCSFEMIPIGKTRETMEKHNVIEEDAERKSNAELTKEVSDSFIREFIADYKEDMDWKDLYDAYGEDRARFTDIMNQKAEKLAKRFSDSFNEYINTFLKANGINDKKSKWSDSGYVDVVLPLYVSIHPDFSNDKYERAVASLLHCSNSLFKKYTTSYARIIAGTKKGSFADRSMENFQTVCANSVMFDLISRNLSSVGSHDAFKEVFADAPLNMNEYLSQKGISRYNEFVGDSFDESGQVIRYGVNHYINEWNQTHPDERMPKMHKLKKQILSIVEPSFRIRTINDETELFGTFDNIRTAEQRYAGMLESILENMNTADIYDKSGILVTSAERDSLANAITGEWSYFRRQIKEEEENRIREEYLQKKNRVKTKLTQKDNKQIEDALNKSIYSVADLNKMLGSDFGTIEEKLLDEYIRNKSKKESAYAQLVKTDFYDKKTIPAGDDVQRIQQYLDKVLSLTHIVRGLCADSQDPRTDFVFSDDVSSLEDDRVQIISCYNLIRNFVTKKREKTAKEKQIQLCFGRPAHFEQVWNNKQEGKFGNVDAALLEYAGKYYYMVPAAKNEAKLNFPVTDEPQMGECYNYLATKKAIGFAKAFAKFYIKSPEAMEGFEKTEEPFEISVGNDTMIISRKVYEDYEAKTFRESEEAKNKLIDCAKEFLSKNLSYCIYDWSVLKEANDYVNYGEFCNEVDSIAFRVINRYVSKKLVDDAVERGNLYMFEISSLDMYKDSSRMKNIMALRFNQIMNGMFTGDKSIIINNAPQIRYRPVVIEKKDVHPVGSRLVNKNTTDGRTIPGDVYLELCAYYNGKKDSLSPEASLYNEKVSVKDSDRAHIKDKHYTEEKFLITFSYTANKNVASATSGYQLNEMVRKEIRENGCNIMAVIRGIDNLLYYAVVDENGNRIEAGDLNVVGDTDFYEKLTILGKQRYTDQKNWKHENKVADLKDTYLGQVCRKIASIAVKNNAVIVIDKINESTKRKNAAFDNNMYRKFENALVNSLTDYYDIGIRGDEPGSVKNPLQLTVKEDNGFQNGIIFYQFDTFTKNICMRTGFVNLLNTFEIKTVASKVAFLKKLSDIYYDNDINEFVFEFTWRNIGCILKDEELPLYDGMDKIWKVRTHFTRYMRNAEKNKYVEIDGTEVLKELIRKNHPDMIGGKIDVDRLTSEEVKKVFEIFTLYTNGYIPRMDDAESGYMSPACDWNNFGTIRYDEMTALQLAKKSSLMIGKVKSGKDWKDMNVSRVEWLNHVLKADW

SEQ ID NO: 1470 - protein, 1334 aa, Unknown
  Description of Unknown: uncultivated organism sequence
  Category: MG62 effectors
  Description: MG62-1 effector
MKTFENFTNLYELNKTLRFELKPIWGTKELIEEKHILKLDKEKRENYEKVRPYFNKIHQEFINFALKNPNFDFLKHKEKYLNWLKDKKNKDLLKEKEKIDKIFLEKIWELFENSVKDFLKENGFESIIKQEDQDLKFFRRKEIFEVLQEKYGSELETQIIWKDWETKSIFSGWDKWLWYFDKFFNTRDNFYKTDGTSTAIATRIIKDNLKIFLENTIIFEKVKNKKIDFSEVEKNFSINIDSFFEINNFNNYFLQDGIDFYNKIIWWETLENWKKLKGLNEIINKYRQDTGDKIPYFKKLQKQILSEKDWVFIEKIEDDGGFYDILKKFYENAVEKEWFLRNIFENFYGIWDENLEKIYFNKVAFNTISHKFWNAQEFEKILYEEMKKSKVDWIKFEKKENKYKFPDFIQIIFIKKALENYDSENLFWKERYYKSEENTDWFLERNNKNLWEQFCKIFKFEFLNILKRKIIDDAWEEHEVWFDISKEILWKKLENFELNQENKWIIKDFADYALVLYSFWKYFAVEKWRNWDPNTEDIDDEFYKWENWYIEKFYDTGYDEIVKPYNLMRNYISKKPWEDSKKWKINFETSSLLSWWDKNLESNWSYIFQKWNKYYIWIINWSKPAKEVLEKLYSWNGEKIKRFIYDFQKPDNKNTPRMFIRSKKDSFSPAVGKYNLPVEDILEIYDNWLFKTENKDNSNYKESLSKLIDYFKLGFSKHESFKHFNFVWKDSKEYENIADFYRDVEKSCYQITSEFLDFEELKKLTFKKHLYLFQIYNKDFELDESLQKNWYNFRDEWQKNIHTKYFEALFLEENILRKSWAVFKLSWGWEVFFRKESIKAEKEKRKNIEVTKNRRYTEEKYFLHFPIQVNFKNEISWNFNQEINKFLANNPDINIIGIDRWEKHLAYFSVINQKWEILESGSFNKIENYDKNGEKILYSEREIKKTYKDWKLIDLELVETWKKVDYVDYKLLLEYKEEKRILQRQSWKEVEQIKDLKKWYISLLVRKIADLIIKYNAIVIFENLNFRFKQIRGWIEKSIYQQLEKALIDKLSFLVNKNEINLEKAGSLLKAYQLTVPVDSLKEIWKQTWVIFYTEAAYTSKIDPITGWRPNLYLKKNNSKINKENILKFDNIIFNSKENRFEFTYDLKKFLWKDAKFPEKTIWTVCSCVERFKWNKFLANNLWDYDHYEDLTDWKLLNRALKEWEFSNFKELFKKYLIDINWNILEQIKNLDTKNNERFFSEFINLFSLICQIRNTNQKEKWDENDFILSPVEPFFDSRKSKKFWKNLPKNGDENWAFNIARKGLIILDRISQNPEKTDLLILNSDWDNFVRNA

SEQ ID NO: 1471 - protein, 1333 aa, Unknown
  Description of Unknown: uncultivated organism sequence
  Category: MG62 effectors
  Description: MG62-2 effector
MKNFQDFTNLYELSKTLRFELKPIWGTKKLIEEKNILKLDKKKRENYEKVKPYFNKIHQEFINFALRNPNFDFSQFEEKYLNWLKDKKNKDLLKEKESIDKIFLEKIWKLFENSVKDFLKENGFESIVKSEDQNLKFFRRKEIFEVLQEKYGSELETQMVNKDWEIKSIFNGWEKWLWYFDKFFNTRDNFYKTDWTSTAIATRIIKDNLKIFLENTIIFEKVKNKKIDFSEVEKNFSVSIDTFFEINNFNNCFLQDWIDFYNKVIWGETLENWEKLKWLNEIINKYRQDTGEKIPYFKKLQKQILSEKDWVFIDKIEDDGGFYEVLKNFYKNAAEKEWFLKNIFENFYTISDKNLEKIYFNKIAFNTISHKFWSALEFERILYEEMKKEKADWIKFEKKENKYKFPDFIQIIFIKRSLENYDSENLFWKERYYKSEENVDWFLEKNNNNIWEQFCKILNFEFLNILKRRIIDEAWEEYEVWFEISKNILWEKLENFELNQENKWIIKDFADYSLALYSFWKYFAVEKWRNWDLNIDISDDFYGWEDWYIEKFYNTGYDEIVKPYNLMRNYISKKPWEDSKKWKINFETSSLLSWWDKNLESNWSYIFQKWNKYYIWIINWSKPAKEVLEKLYSWNGEKIKRFIYDFQKPDNKNTPRMFIRSKKDSFSPAVGKYNLPVEDILEIYDNWLFKTENKDNSNYKESLSKLIDYFKLGFSKHESFKHFNFVWKDSKEYENIADFYRDVEKSCYQITSEFLDFEELKKLTFKKHLYLFQIYNKDFELDESLQKNWYNFRDEWQKNIHTKYFEALFLEENILRKSWAVFKLSWGWEVFFRKESIKAEKEKRKNIEVTKNRRYTEEKYFLHFPIQVNFKNEISWNFNQEINKFLANNPDINVIWIDRWEKHLAYFSVINQKWEILESWSFNKIENYNKNWEKLLFPEREIKEIHKDWSLIDLELVETWRKVDYVDYKLLLEYKERKRLLQRQSWKEVEQIKDLKKWYISALVRKIADLIIKHNAIVIFEDLNFRFKQIRGWIEKSIYQQLEKALIDKLNFLVNKNEINLEKAGSILKAYQLTVPVDSLKEIWKQTWVIFYTEAAYTSKIDPIKWWRPNLYLKKQNAEINKENILKFDNIIFNSKENRFEFTYDLKKFFWKDSKFPAKTVNTVCSCVERFKWNRNLNNNKWGYIHYENLTDWKLANKEQKEDEFSNFKELFEKYFIDINWNILEQIKNLDTKNNEKFFSSFIDLFTLVCQIRNTNQNAKWDENDFILSPVEPFFDSRKSQNFWKSLPKNWDENWAFNIARKGLIILNRISENPEKPDLLIFNADWDNFARNI

SEQ ID NO: 1472 - protein, 1333 aa, Unknown
  Description of Unknown: uncultivated organism sequence
  Category: MG62 effectors
  Description: MG62-3 effector
MKNFQDFTNLYELSKTLRFELKPIWGTKKLIEEKNILKLDKKKRENYEKVKPYFNKIHQEFINFALRNPNFDFSQFEEKYLNWLKDKKNKDLLKEKESIDKIFLEKIWKLFENSVKDFLKENGFESIVKSEDQNLKFFRRKEIFEVLQEKYGSELETQMVNKDWEIKSIFNGWEKWLWYFDKFFNTRDNFYKTDWTSTAIATRIIKDNLKIFLENTIIFEKVKNKKIDFSEVEKNFSVSIDTFFEINNFNNCFLQDWIDFYNKVIWGETLENWEKLKWLNETINKYRQDTGEKIPYFKKLQKQILSEKDWVFIDKIEDDGGFYEVLKNFYKNAAEKEWFLKNIFENFYTISDKNLEKIYFNKIAFNTISHKFWSALEFERILYEEMKKEKTDWIKFEKKENKYKFPDFIQIIFIKRALENYDSENLFWKERYYKSEENADWFLEKNNNNLWEQFCKILNFEFLNILKRRIIDEAWEEYEVWFEISKNILWEKLENFELNQENKWIIKDFADYSLALYSFWKYFAVEKWRNWDLNIDISDDFYGWEDWYIEKFYNTGYDEIVKPYNLMRNYISKKPWEDNKKWKINFETSSLLSGWDKNLESNWSYIFQKWNKYYLWIINWSKPTNEILEKLYSWDGEKIKRFVCDFQKPDKKNTPRMFIRSKKDSFSPAVEKYNLPINDILEIYDNWLFKTENKDNPNYKESLRKLIDYFKLGFSKHESFKHFNFVWKDSKSYENIADFYRDVEKSCYKIDFEFLNFEELKKLTFEKHLYLFQIYNKDFELDESLQEKWYNFKGEWQKNIHTKYFEALFLEENISRKSWAVFKLSWGWEVFFRKKSIEVEKEKRNSVEVIKNKRYTECKYFLHFPIQVNFKEEISWNFNQEINKFLANNPDINVIWIDRWEKHLAYFSIINQKWEILESWSFNKIENYNKNWEKLLFPEREIKEIHKDWSLIDLELVETWRKVDYVDYKLLLEYKERKRLLQRQSWKEVEQIKDLKKWYISALVRKIADLIIKHNAIVIFEDLNFRFKQIRGWIEKSIYQQLEKALIDKLNFLVNKNEINLEKAGSILKAYQLTVPVDSLKEIWKQTWVIFYTEAAYTSKIDPITGWRPNLYLKKNNSKINKENILKFNNIVFNSKENRFEFTYDLKKFFWKDSKFPAKTVNTVCSCVERFKWNRNLNNNKWGYIHYENLTDWKLANKEQKEDEFSNFKELFEKYFIDINWNILEQIKNLDTKNNEKFFSSFIDLFTLVCQIRNTNQNAKWDENDFILSPVEPFFDSRKSQNFWKSLPKNWDENWAFNIARKGLIILNRISENPEKPDLLIFNADWDNFARNI

SEQ ID NO: 1473 - protein, 372 aa, Unknown
  Description of Unknown: uncultivated organism sequence
  Category: MG70 effectors
  Description: MG70-1 effector
MNYNTVYVGMDVHKESFTLCAYTIDAEKGSHFQRTEADYKNVLKYLEFLRTVYGNDANFICGYEAGCLGYTLYHQLTEHDVNCVILAPTTMLEQRSKRRIKTDRRDAEIIGKCLAQHNYSPVHIPTATDEETKEFLRMRDDHKLALKKVKQQILAFCLRHNYRYDGNSHWTAAHIKWLKSLNPEALYKEILDEYLLTYTTLSDKVERLDKRIEELASKDEYRESVKKLCCFIGIKTHTALSVLVEVGDFQRFASAQNFASYLGLVPGEDSSGDGQTRLGITKAGNRHVRMLLTEASQCYARGQIGFKSKELKSRQAGNSPQVIAYADKANERLRRRYYKMVLGKSKKHNVAKTAIARELACFMWGMMTEHIA

SEQ ID NO: 1474 - protein, 167 aa, Unknown
  Description of Unknown: uncultivated organism sequence
  Category: MG70 effectors
  Description: MG70-2 effector
MEFLRTIYGDDANFICGYEAGCLGYNLYHQLTANNIKCIILAPTTMLEQRSKKRIKTDKRDAEIIAKCLAQHNYSPVHIPTAKDEETKEFLRMRDDHKLALKKVPLLDRYKFYSHVICSGTKIKVITQPIDNRFYSHVICSGTKIHAADNTEAPVFYSHVICSGTKI

SEQ ID NO: 1475 - protein, 50 aa, Unknown
  Description of Unknown: uncultivated organism sequence
  Category: MG70 effectors
  Description: MG70-3 effector
MNNTTVYVGMDVHKESFTLCAYTLEKEKGSYSRRTPADYKEVLKYLEFLR

SEQ ID NO: 1476 - protein, 172 aa, Unknown
  Description of Unknown: uncultivated organism sequence
  Category: MG70 effectors
  Description: MG70-4 effector
MNYNTVYVGIDVHKESFSLCAYTIETKKASHYQKTDADYKNVLKYVEFLRTIYGDDANFICGYEAGCLGYNLYHQLTANNIKCIILAPTTMLEQRSKKRIKTDKRDAEIIAKCLAQHNYSPVHIPTAKDEETKEFLRMRDDHKLALKKVPLLDRYKFYSHVICSGTKIQREV

SEQ ID NO: 1477 - protein, 182 aa, Unknown
  Description of Unknown: uncultivated organism sequence
  Category: MG70 effectors
  Description: MG70-5 effector
MNYNTVYVGIDVHKESFSLCAYTIETKKASHYQKTDADYKNVLKYVEFLRTIYGDDANFICGYEAGCLGYNLYHQLTANNIKCIILAPTTMLEQRSKKRIKTDKRDAEIIAKCLAQHNYSPVHIPTAKDEETKEFLRMRDDHKLALKKVPLLDRYKFYSHVICSGTKIRILCNPIIISFTVT

SEQ ID NO: 1478 - protein, 172 aa, Unknown
  Description of Unknown: uncultivated organism sequence
  Category: MG70 effectors
  Description: MG70-6 effector
MNYNTVYVGIDVHKESFSLCAYTIETKKASHYQKTDADYKNVLKYVEFLRTIYGDDANFICGYEAGCLGYNLYHQLTANNIKCIILAPTTMLEQRSKKRIKTDKRDAEIIAKCLAQHNYSPVHIPTAKNEETKEFLRMRDDHKLALKKVPLLDRYKFYSHVICSGTKIQREV

SEQ ID NO: 1479 - protein, 183 aa, Unknown
  Description of Unknown: uncultivated organism sequence
  Category: MG70 effectors
  Description: MG70-7 effector
MNYNTVYVGIDVHKESFSLCAYTIETKKASHYQKTEADYKNVLKYVEFLRTIYGDDANFICGYEADCLDYNLYHQLTANNIKCIILAPTTMLEQRSKKKRIKTDKRDSEIIAKCLAQHNYSPVHIPTAKDEETKEFLRLRDDHKLALKKVPLLDRYKFYSHVICSGTKICTDTWVMMSCFTVT

SEQ ID NO: 1480 - protein, 198 aa, Unknown
  Description of Unknown: uncultivated organism sequence
  Category: MG70 effectors
  Description: MG70-8 effector
MNYNTVYVGIDVHKESFSLCAYTIETKKASHYQKTEVDYKNVLKYVEFLRTIYGDDANFICGYETGYLGYNLYHQLTANNIKCIILAPTTMLEQRSKKRIKTDKRDAEIIAKCLAQHNYSPVHIPTAKDEETKEFLRMRDDHKLALKKVPLLDRYKFYSHVICSGTKIESEEVTRLGQFYSHVICSGTKINCCIAVLH

SEQ ID NO: 1481 - protein, 173 aa, Unknown
  Description of Unknown: uncultivated organism sequence
  Category: MG70 effectors
  Description: MG70-9 effector
MNYNTVYVGMDVHKESFSLCAYTIEAEKASQYQRTEADYKKVLNYLEFLRTIYGDDANFICGYETGYLGYNLYHQLTANNIKCIILAPTTMLEQRSKKRIKTDKRDAEIIAKCLAQHNYSPVHIPTAKDEETKEFLRMRDDHKLALKKVPLLDRYKFYSHVICSGTKIFSLPG

SEQ ID NO: 1482 - protein, 173 aa, Unknown
  Description of Unknown: uncultivated organism sequence
  Category: MG70 effectors
  Description: MG70-10 effector
MNYNTVYVGMDVHKESFSLCAYTIETEKASHYQKTEVDYKNVLKYVEFLRTIYGDDANFICGYETGYLGYNLYHQLTANNIKCIILAPTTMLEQRSKKRIKTDKRDAEIIAKCLAQHNYSPVHIPTAKDEETKEFLRMRDDHKLALKKVPLLDRYKFYSHVICSGTKIFSLPG

SEQ ID NO: 1483 - protein, 198 aa, Unknown
  Description of Unknown: uncultivated organism sequence
  Category: MG70 effectors
  Description: MG70-11 effector
MNYNTVYVGMDVHKESFSLCAYTIETEKASHYQKTEVDYKNVLKYVEFLRTIYGDDANFICGYETGYLGYNLYHQLTANNIKCIILAPTTMLEQRSKKRIKTDKRDAEIIAKCLAQHNYSPVHIPTAKDEETKEFLRMRDDHKLALKKVPLLDRYKFYSHVICSGTKIIGGFVKHHDLFYSHVICSGTKICMPSFRTT

SEQ ID NO: 1484 - protein, 151 aa, Unknown
  Description of Unknown: uncultivated organism sequence
  Category: MG70 effectors
  Description: MG70-12 effector
MNYNTVYVGMDVHKESFSLCAYTIETEKASHYQKTEVDYKNVLKYVEFLRTIYGDDANFICGYETGYLGYNLYHQLTANNIKCIILAPTTMLEQRSKKRIKTDKRDAEIIAKCLAQHNYSPVHIPTAKDEETKEFLRMRDDTSWLSKKYLF

SEQ ID NO: 1485 - protein, 199 aa, Unknown
  Description of Unknown: uncultivated organism sequence
  Category: MG70 effectors
  Description: MG70-13 effector
MNYNTVYVGMDVHKESFSLCAYTIETEKASHYQKTEVDYKNVLKYVEFLRTIYRDDANFICGYETGYLGYNLYHQLTANNIKCIILAPTTMLEQRSKKRIKTDKRDAEIIAKCLAQHNYSPVHIPTAKDEETKEFLRMRDDHKLALKKVPLLDRYKFYSHVICSGTKIAPQAVYHGCWFYSHVICSGTKILNVHVKHLH

SEQ ID NO: 1486 - protein, 218 aa, Unknown
  Description of Unknown: uncultivated organism sequence
  Category: MG70 effectors
  Description: MG70-14 effector
MNYNTVYVGMDVHKESFSLCAYTIETEKASHYQKTEVDYKNVLKYVEFLRTIYRDDANFICGYETGYLGYNLYHQLTANNIKCIILAPTTMLEQRSKKRIKTDKRDAEIIAKCLAQHNYSPVHIPTAKDEETKEFLRMRDDHKLALKKVPLLDRYKFYSHVICSGTKIAPQAVYHGCWFYSHVICSGTKMQGLISPSTLGFYRHVICSGTKIGNTADS

SEQ ID NO: 1487 - protein, 214 aa, Unknown
  Description of Unknown: uncultivated organism sequence
  Category: MG70 effectors
  Description: MG70-15 effector
MNYNTVYVGMDVHKESFSLCAYTIETEKASHYQKTEVDYKNVLKYVEFLRTIYRDDANFICGYETGYLGYNLYHQLTANNIKCIILAPTTMLEQRSKKRIKTDKRDAEIIAKCLAQHNYSPVHIPTAKDEETKEFLRMRDDHKLALKKVPLLDRYKFYSHVICSGTKIAPQAVYHGCWFYSHVICSGTKMQGLISPSTLGFYRHVICSGTKIKV

SEQ ID NO: 1488 - protein, 172 aa, Unknown
  Description of Unknown: uncultivated organism sequence
  Category: MG70 effectors
  Description: MG70-16 effector
MNYNTVYVGMDVHKESFSLCAYTIETKKASHYQKTEADYKNVLKYVEFLRTIYGDDANFICGYEAGCLGYNLYHQLTANNIKCIILAPTTMLEQRSKKRIKTDKRDAEIIAKCLAQHNYSPVHIPTAKDEETKEFLRMRDDHKLALKKVPLLDRYKFYSHVICSGTKIVPSQ

SEQ ID NO: 1489 - protein, 372 aa, Unknown
  Description of Unknown: uncultivated organism sequence
  Category: MG70 effectors
  Description: MG70-17 effector
MNYNTVYVGMDVHKESFTLCSCKYEDEKASHYQRTPASYKNVLRYLAFLRTIYGEDTRFVCGYEAGCLRYSLYHQLENFNVECVILAPTTMLEQRSKRRIKTDKRDAEIIAKSLAQHNYSPVHIPTKMDNQTKEFIRMRDDHKAELKKIKQQILSFCLRQGYQYDGSGNWTAKHVKWLRSLKPAGLYKEILDEYLLTYTILTDKLNRLDQRIEELASKEEYKESVSKLTCFLGIKIHTALSVIVEVGDFQRFVSARKFAGYLGLVPGQHSSGDDRNGLGITKAGNTHVRRLLVESAQSYTRGKIGYKSRVLRSRQAGNSPQIINYADRANERLRRRYYQMVLKDGKKYNIAKIAVARELACFIWGMMTDNIY

SEQ ID NO: 1490 - protein, 414 aa, Unknown
  Description of Unknown: uncultivated organism sequence
  Category: MG70 effectors
  Description: MG70-18 effector
MQFGFLGIDYKNADLTIRDEISFTDQKKLEFFHKAEEIGVEQVMILSTCNRSEIYYFFDDEQQIKKIQNIYCDMFDKAEIEQYIRHCEEDKAVSYLFQVTAGLESMVLGEDQILGQVKDALDFSRTMGFSKKELNKVVRDAITCAKKVKTTFRISEKPVSVGYIGICELQKICDIKDKMVLVIGSGDTAVLALRYLQEYEAGKIYLCSRTLAHAGNVQKEFQEIEIISYEQRYEIMKQCDIVVSATSAPHVVVKQEYYTPEKQVTFLDLATPRDIDPKLSDDSKVNLINLDTIKEISKANQSEREELCRQSNTMISKAKEETMQWLFQAPMEETIRSLQEKCTEIVEDSYSYLSRKIDFGTREQKLLKKVLNASLQRMIKEPIQELKHLETRQEQADYKKMVEQLFGIETKKGK

SEQ ID NO: 1491 - protein, 372 aa, Unknown
  Description of Unknown: uncultivated organism sequence
  Category: MG70 effectors
  Description: MG70-19 effector
MYYNTIYVGMDVHKSSFTLCSYTIEAEKVSHFQRTEADYKKVLKYLEFLRTVYGDDARFVCGYEAGCLGYTLYHQLTEHHVECVILAPTTMLEQRSRKRIKTDKRDAEVIARCLAQHNYSAVHIPTATDEETKEYLRMRNDHKLALKRIKQQILAFCLRHGHIYGGKSNWTISHLKWLKELELNSMHREILDEYLLTYTTLTDKLERLDSRIEEIASKPEYNESVKKLSCFIGIKTHTALSTLVEVGDFHRFATASKFASYLGLVPGEDSSGDDQTRLGITKAGNRHLRLLLTEAAQCYARGQIGYKSKALKARQSGNPPEIIAYADKANERLRRKYYKMVLQERKTHNVAKTAITRELACFIWGMMTDRIA

SEQ ID NO: 1492 - protein, 198 aa, Unknown; identical to SEQ ID NO: 1480
  Description of Unknown: uncultivated organism sequence
  Category: MG70 effectors
  Description: MG70-20 effector

SEQ ID NO: 1493 - protein, 373 aa, Unknown
  Description of Unknown: uncultivated organism sequence
  Category: MG70 effectors
  Description: MG70-21 effector
MNYSIVYLGIDAHMQSFSLCCYTNEKEKAEYPQKVDGHYSKVINYIEAMRFHFGDDALFICGYEAGSLGFTLYHQLTDHGVKCVILAPTTMPTQKGGKRIKTDKRDAALIARCLAHRDYSPVHIPTEQDEQTKEYIRMRDDHKLALKKVKQQILSFCLRHNYRFDGTKHYWTQAHLNWLRALKPEGLYAEILMEYLLTYDNLTNKIERLDKRIEELAAGDAYRQNVHKLSCFLGVKTITALSVLTEVGDFKRFASAQHFSSYIGLTPGEDSSGNDKKRLGITKAGNRHVRTLLVEAAQNYSRGRIGVKSKALMARQEGNAPEVIAYADKANERLRRKYYRMVLKNNKKTNVAKTAVARELACFMWGMVTGNVV

SEQ ID NO: 1494 - protein, 373 aa, Unknown
  Description of Unknown: uncultivated organism sequence
  Category: MG70 effectors
  Description: MG70-22 effector
MEYSTVYVGMDVHKNSFSLCCFTNEKEEAEYPQKVTAHYSKVINYIEAMRFHYGNDALFICGYEAGCLGYTLYHQLTDHNIKCVILAPTTMAQQRGKKKVKTDKRDAALIARCLAHHDYSAVHIPTDQDEQTKEYIRMRDDHKLALKKIKQQILSFCLRHNCHYDGTKTHWTQTHLNWLRSLKLDGLYQEILDEYLLTYDRLSEKLERLENRIEELASGEAYADNVHKLSCFIGVKTTTALAALTEVGDFKRFETAQQFSSFLGLTPGEDSSGDDQNRLGITKAGNRHLRMLLIEAAQCYSRGAIGSKSKALKQRQEGNKPEVISYADKANERLRRKYYRMVLHNSKKANVAKTAVARELACFVWGMMVEDFA

SEQ ID NO: 1495 - protein, 372 aa, Unknown
  Description of Unknown: uncultivated organism sequence
  Category: MG70 effectors
  Description: MG70-23 effector
MNYNTVYVGMDVHKESFTFCAYTIDAEKGSHFQRTEADYKNVLKYLEFLRTVYGNDANFICGYEAGCLGYTLYHQLIEHHVNCVILAPTTMLEQCSRRRIKTDRRDAEIIAKCLAQHNYSPVHIPTATDEETKEFLRMRDDHKLALKKVKQQILAFCLRHNYRYDGNSHWTAAHIKWLKSLKPEALYKEILDEYLLTYTTLSDKLERLDKRIEELASKDEYRESVKKLCCFIGIKTHTALSVLIEVGDFQRFASAQKFASYLGLVPGEDSSGDEQTRLGITKAGNRHVRMLLTEASQCYARGQIGFKSKELKSRQAGNSPQVIAYADKANERLRRRYYKMVLGKSKKHNVAKTAIARELACFMWGMMTDHIT

SEQ ID NO: 1496 - protein, 376 aa, Unknown
  Description of Unknown: uncultivated organism sequence
  Category: MG70 effectors
  Description: MG70-24 effector
MNTNTIYVGMDVHKESFSLCCYSIEKDEASHQQKIGADYRLILKYLGSMRGVFGEDTEFVCGYEAGCLGFTLYRQLTDLNVKCIILAPTTMMAEQGRKRIKTDKRDAVLIARCLAYHTYHAVHIPTEQDEQIKEYIRMRDDHRLALKKDKQQILSFCLRHGFQYTETNSRWTQAHINWLRKLELEGLYQETMAEYLMTFDRLTEVIERLDKRIAGLAEQDTYRSNVKKLTCFMGVKTQTALAVLVEVGDFNRFARAENIAAYIGLVPGEDSSGGDKQRLSITKAGNTHVRRLLIEAAQSYSRGVVGYKSKALKERQEGNPPEVIAYADKANTRLRRRYYHMILQNGRKANVAKTAIARELMCFMWGMVTGNIEARI

SEQ ID NO: 1497 - protein, 379 aa, Unknown
  Description of Unknown: uncultivated organism sequence
  Category: MG70 effectors
  Description: MG70-25 effector
MKRIIKIGMDVHSTNYTLCALEPVIGAEDKIFAQIQVTPDYKNILMFINKLMLKLEPSDDYSIECGYEAGCLGYSLYNQLTSAGVKCTILAPTTMLTPKNKRVKTDSRDALMIAQCLAYGGYHPVYVPTEEDNSVKEYLRMRDDHKLALKKVKQQIISFCMRHGHQYSGTNWTGRHIAWLRKADFSALFREALNEYLVTYEELTSKIERFDKRIEEISSQKAYQEKVKKLSCFLGIRTHTALSLIVETGDFYRYKKGNIYSSFLGMAPGENSSGDHIKRTGITKAGNSHLRRLLIESARGICKGTIGYKSKDLKSRQAGNSAEVIAYADKANQRLRSRYYKMIRHGKKKNVAVVAIARELACFVWGMMTDNIYSASSAT

SEQ ID NO: 1498 - protein, 388 aa, Unknown
  Description of Unknown: uncultivated organism sequence
  Category: MG70 effectors
  Description: MG70-26 effector
MESLVAIGIDVHKEKFALVAILLVLGAQDQILGEIEVGSDYKEILAFIESIKQKALPGQTYSFVCGYEAGCLGYVLYHQLTAAGVRCVIMAPTTMLSEQGKRIKTDRRDARLIAKCLCCNGYHQVYIPTAEDEDVRDYLRMRDDHQGALKKLKQQINAFVLRHGCSYVGTKWTARHIGWLMDLQNKLDEMQAETLKEYMLSYAEQKDKIERFDEKIEEIARMDRYSKLVSKLVCFLGVKTHTALSLIVETGDFMRFAKGNIFAAFLGLAPGEHSSGSGVHRLGITKAGNTHLRTLLIEAASGICKGAVGHKSKALKARQAGQESEVIAYADKANTRLRSKYYRMMRHGKKRNVAVAAVARELACFIWGMATGNTGLTRQAQASAKAGI

SEQ ID NO: 1499 - protein, 372 aa, Unknown
  Description of Unknown: uncultivated organism sequence
  Category: MG70 effectors
  Description: MG70-27 effector
MNYNTVYVGMDVHKESFSLCAYTIEAEKASHYQRTEADYKKVLNYLEFLRTIYGDDANFICGYEAGCLGYTLYHQLTANNVKCIILAPTTMLEQRSKKRIKTDKRDAEIIAKCLAQHNYSPVHIPTAKDEETKEFLRMRDDHKLALKKVKQQILAFCLRHNYRYDGNSHWTAAHLKWLKALTPEALYKEILDEYLLTYQTLSDKLERLDKRIEELSTQDEYKEAVKKLCCFIGVKTHTALSVLVEVGDFNRFASAQHFASYLGLVPGEDSSGNDQNRLGITKAGNRHVRLLLTEASQCYARGQVGFKSKELKARQSGNTPAVIAYADKANERLRRRYYKMVLNKCKKHNVAKTAIARELACFMWGMMTDNIA

SEQ ID NO: 1500 - protein, 372 aa, Unknown
  Description of Unknown: uncultivated organism sequence
  Category: MG70 effectors
  Description: MG70-28 effector
MNYNTVYVGMDVHKESFTFCAYTIDAEKGSHFQRTEADYKNVLKYLEFLRTVYGNDANFICGYEAGCLGYTLYHQLTEYHVNCVILAPTTMPEQCSKRRIKTDRRDAEIIAKCLAQHNYSPVHIPTATDEETKEFLRMRDDHKLALKKLKQQILAFCLRHNYRYDGNSHWTAAHIKWLKSLKPEALYKEILDEYLLTYTTLSDKLERLDKRIEELASKDEYRESVKKLCCFIGIKTHTALSVLVEVGDFQRFASAQKFASYLGLVPGEDSSGDEQTRLGITKAGNRHVRMLLTEASQCYARGQIGFKSKELKSRQAGNSPQVIAYADKANERLRRRYYKMVLGKSKKHNVAKTAIARELACFMWGMMTDHIA

SEQ ID NO: 1501 - protein, 371 aa, Unknown
  Description of Unknown: uncultivated organism sequence
  Category: MG70 effectors
  Description: MG70-29 effector
MKSIIYLGMDVHTTNYTLCCYTLEDDRMCHLQQIAPDYRLILKYMDQVRRLYNNDVEFLCGYEAGCLGYSLYHQLTAHQVRCVILAPTTMGAVLGIRKVKTDKRDAMLIAKCLAFHTYHPVHIPTPEEEQVKEFIRMRDDHKLALKRIKQQISAFCLRHGFHYTATKSKWTQAHWKWLKSLKPDGLHQETLNEYLLTCSSLSDKLERLDRRIEELAAQEPFQERVRQLTCLVGVKTHTALSIIVEVGDFNRFPTAGKFASFLGLTPGEASSSDKQNRFGITKAGNTHVRRLLVEAAQSYARGQTGRKSKDLKARQAGNKEQVIAYADKGSERLRRRFRQLLYKGKQHNVIKTAIARELSCFIWGMMTDRIA

SEQ ID NO: 1502 - protein, 378 aa, Unknown
  Description of Unknown: uncultivated organism sequence
  Category: MG70 effectors
  Description: MG70-30 effector
MNRIIKIGMDVHTSNYTLCIFEPSFEHDGTVHCITQVKPEVKNIIHVIETFKKKHENEELNIVCGYEAGCLGYSLYHELKEKGIECVILAPTTMKTEKGGRKLKNDYRDAKMIAECLAYGGYSAVHIPTELDNSVKEFIRMRDDIKENLKSIKQQIIAFLTRNGKQFEGKSFWTRKHIDWINTVSFSEPLLQDTLKEYMIEYNHLCNRIETLDRQIEEISLKEEYVEKVQQLQCLIGIKTHTALSLIVETSDFNRFKKGNMYSAYLGLIPGDDSSGGHENKLGITKAGNSHLRRLLVEAAQGYTRGRVGFKSKDLKSRQEKCSSEVVAYADRANERLRRKYYRMTLRGKKFNVAKTAIARELACFVWGIMTDHIDLCN

SEQ ID NO: 1503 - protein, 405 aa, Unknown
  Description of Unknown: uncultivated organism sequence
  Category: MG70 effectors
  Description: MG70-31 effector
MQLGYVGINYKNSDLSVRDKITFTDSGIADFMQQAEEAGVNQCMCLSTCNRCEVFYLYEDETFVQVMSDLFNDYFGLTDTKLAGVKCGEEALVYLFCIAAGLESMVLGEDQILGQLKDAADLSRTLGHSGKELNYIVREAVSCAKRIKTEYKVSEKPVSVCYVGIQELDRVCGISGKHALVIGSGKTAALAIRYLAEYGADVTVCSRTYQHAKALLKEFPDIQVIAYDKKTEALKSSDIVVSATSSPHLVIKCAELSGGKKMTLLDLAAPRDIEKSAGDICGVTLIDLDRIGGIVKSNQNERAHLLKESQCVIDEYIAETKKWLTSSRMDTTIQSLGKKCDEIVQDSYDYLNRKIDLSDHDRVILKKILKSSLHRLLKEPIEELKNVEENEQQQYKDMVERLFGL

SEQ ID NO: 1504 - protein, 204 aa, Unknown
  Description of Unknown: uncultivated organism sequence
  Category: MG70 effectors
  Description: MG70-32 effector
MNYNTVYVGMDVHKESFSLCAYTIETKKASHYQKTEADYKNVLKYVEFLRTIYGDDANFICGYEAGCLGYNLYHQLTANNIKCIILAPTTMLEQRSKKRIKTDKRDAEIIAKCLAQHNYSPVHIPTAKDEETKEFLRMRDDHKLALKKVPLLDRYKFYSHVICSGTKIKVITQPIDNRFYSHVICSGTKIAWDYENCMNGFTVT

SEQ ID NO: 1505 - protein, 193 aa, Unknown
  Description of Unknown: uncultivated organism sequence
  Category: MG70 effectors
  Description: MG70-33 effector
MNYNTVYVGMDVHKESFSLCAYTIETKKASHYQKTEADYKNVLKYVEFLRTIYGDDANFICGYEAGCLGYNLYHQLTANNIKCIILAPTTMLEQRSKKRIKTDKRDAEIIAKCLAQHNYSPVHIPTAKDEETKEFLRMRDDHKLALKKVPLFDRYKFYSHVICSGTKIMFAGVAVYFGFYSHVICSGTKIVLH

SEQ ID NO: 1506 - protein, 415 aa, Unknown
  Description of Unknown: uncultivated organism sequence
  Category: MG70 effectors
  Description: MG70-34 effector
MIFGYVGICYKEAPLALRGQVALPDSKKIELWERLSVIGLKQCVIVSTCNRSEIFYFSHSDAVTGEQVQSCYQDIFPNVSFGDYCKKKEGSEAVSYLFRVAAGLESLVVGEDQILGQVVEAMDFARTMGHSGKELERIVRDAVTCAKWIKTNYRISEKPLSVSYIGVKELHRAGGVSGKNILVIGSGKTAALALTYLFEYGAKKIYLCSRTLAHAKELLAVHENLTVVDYHERYDAMKRCETVVSATSSPHLVVLYDKWKETGVTQMQFLDLASPRDIDSRLQEVPGVQLIDMDTLQKITEKNQNEREKLAADCEQVIEEKVQETMEWLLLSRVDGTIETLQKRCLQIETDSYEYLNRKISLNHREQKLLKKVLHASLQRLIREPIQELKQLEDEEKQKEYQNILKTLFRMYEDE

SEQ ID NO: 1507 - protein, 405 aa, Unknown
  Description of Unknown: uncultivated organism sequence
  Category: MG70 effectors
  Description: MG70-35 effector
MQLGYVGINYKNTDLSVRDKITFTDSGIADFMQQAEEAGVNQCMCLSTCNRCEVFYLYEDETFVQVMSDLFNDYFGLTDTKLAGVKCGEEALVYLFCIAAGLESMVLGEDQILGQLKDAADLSRTLGHSGKELNYIVREAVSCAKRIKTEYKVSEKPVSVCYVGIQELDRVCGISGKHALVIGSGKTAALAIRYLAEYGADVTVCSRTYQHAKALLKEFPDIQVIAYDKKTEALKNSDIVVSATSSPHLVIRASELSEGKKMTLLDLAAPRDIEKSAGDICGVTLIDLDRIGGIVKSNQNERAHLLKESQCVIDEYIAETKKWLTSSRMDTTIQSLGKKCDEIVQDSYDYLNRKIDLSDHDRVILKKILKSSLHRLLKEPIEELKNVEENEQQQYKDMVERLFGL

SEQ ID NO: 1508 - protein, 377 aa, Unknown
  Description of Unknown: uncultivated organism sequence
  Category: MG70 effectors
  Description: MG70-36 effector
MNRIIKIGMDVHTTNYTLCIFEPSFEHDGTVHCITQVKPEVKNILRVIETFKNKHPEESFKITCGYEAGCLGYSLYHDLKAKGIECVILAPTTMKVEKGGRKIKNDYRDARMIAECLAYGGYSAVHVPTQLDNSVKEYIRMRDDVQSNLKSIKQQIIGFMTRNGKFYDGKSYWTQKHLDWIRQTTFHDPLLREVLDEYMIEYSRLKERVETLDKRIEELSTKEEYVEKVKQLQCLIGIKTHTALSLIVETSDFKRFRKGDMYAAYLGLIPGEDSSAEHENRLGITKAGNRHLRRLLVEAAQGYTRGQIGFKSKALKERQEKCDHEVVAYADRANERLRRKYYRMIGRGKKYNVAKTAIARELACFVWGIMTDHIELQ

SEQ ID NO: 1509 - protein, 388 aa, Unknown
  Description of Unknown: uncultivated organism sequence
  Category: MG70 effectors
  Description: MG70-37 effector
MNRIIKIGMDVHSTNYTLCAMEPTIGAEDRVYGEVQVAPDYKEVVTFIASLKQKLGLDHDYSIECGYEAGCLGYTLYHQLSNAGIKCVILAPTTMLTQQGQRIKTDKRDAHLIAQCLCYGGYHPVYIPTGEDDSVKEYLRMRDDHKLALKKLKQQINAFVLRHGNQFTGTKWTIKHITWLKKLELDPMYRETLDEYLSSYEEQEAKIERYDKRIEEIADEARYQENTKKLGCFLGIRTHTALSLIVETGDFKRFAKGNTYAAFLGLAPGEHSSSKSVNRLGISKAGNTHLRCLLIEAAKGICKGAIGHKSRELRSRQSGQSAEVITYADKANTRLRSKYYRMIRHGKKKNVAVAAVARELACFIWGMMTGNISTAYSAGASNPAVSQG

SEQ ID NO: 1510 - protein, 373 aa, Unknown
  Description of Unknown: uncultivated organism sequence
  Category: MG70 effectors
  Description: MG70-38 effector
MKYSTVYVGMDVHKESFSLCCYTNEKEQAEYPQKVDAHYSKVINYIEAMRFHYGDDTLFICGYEAGCLGFTLYHQLMDHGVKCVILAPTTMLQQKGRKKVKTDKRDAALIARCLAHHDYSPVHIPTEQDEQTKEYIRMRDDHKLALKKVKQQILSFCLRHNYRFDGTANHWTQAHLKWLRSLKPEGLYAEILQEYLLTYDSLIDKLKRFDKRIEELAADEVYQENVRKLSCFIGVKTVTALAVLTEVGDFKRFASAQHFASYIGLTPGEDSSGDDQHRLGITKAGNRHVRSLLVEAAQSYSRGQIGFKSKALKARQDGNPPEVIAYADKANERLRRKYYHMVLKNNKKTNVAKTAVARELACFMWGMITGNVA

SEQ ID NO: 1511 - protein, 384 aa, Unknown
  Description of Unknown: uncultivated organism sequence
  Category: MG70 effectors
  Description: MG70-39 effector
MVTGITAYNRRSHMNSIVYVGMDVHKESYTLCCYCFDTDKVEFKQTIPSDYKLILKYIEAMRGKYGEDSKFVCGYEAGCLGYSLYHQLKEHSVDCRILAPTTMAITNTNHVKTDRRDAANIARCLAFHTYSEVYVPDDEDNSVKEYIRMRDDQKLMLKKTKQQILAFVLRQGKKFEGGKTYWTIAHMKWLKSLELDGLNKETLSEYLITYEYLTEKIARLDDRIEELASGEKYKEKVKNMGCFLGVKTHTALSMVVEIGDFNRFEKAPKFAGFLGLVPSEDSSGGNVNRYSITKAGNSHLRRLMVEAAQSYTRGNVGHKSVALKARQKGCNAEVIAYADKANERLRRRFYKMTLNKGVNRNVATTAIARELACFMWGMATGNIS

SEQ ID NO: 1512 - protein, 372 aa, Unknown
  Description of Unknown: uncultivated organism sequence
  Category: MG70 effectors
  Description: MG70-40 effector
MNYNTVYVGMDVHKESFSLCAYTIEAEKASHYQRTEADYKKVLNYLEFLRTIYGDDANFICGYEAGCFGYTLYHQLTANNVKCIILAPTTMLEQRSKKRIKTDRRDAEIIAKCLAQHNYSPVHIPTAKDEETKEFLRMRDDHKLALKKVKQQILAFCLRHNYRYDGKSHWTAAHLKWLKALTPEALYKEILDEYLLTYQTLSDKIERLDKRIEELATQDEYKEAVKKLCCFIGVKTHTALSVLVEVGDFKRFASAQHFASYLGLVPGEDSSGDDQNRLGITKAGNRHVRLLLTEASQCYARGQVGFKSKELKSRQSGNTPAVIAYADKANERLRRRYYKMVLNKYKKHNVAKTAIARELACFMWGMMTDNIA

SEQ ID NO: 1513 - protein, 382 aa, Unknown
  Description of Unknown: uncultivated organism sequence
  Category: MG70 effectors
  Description: MG70-41 effector
MNRIIKIGMDVHSTNFTLCALEPKIDGEDRIFANIKVEPDYKYILRFIEKLKEKLGSSDNYSIECGYEAGCLGYSLYRQLTKAGVKCVILAPTTMLTQQGKRVKTDTRDAVMIAQCLAYNGYHAVHVPTEKDNSVKEYLRMRDDHKIALKKLKQQINAFCLRNGHQYCGNKWTISHLTWLRKLELPELYRETLNEYLATYDEETAKIERFDKRIEELASDTDYKDHVRNLGALLGIKTHTALSLIVETGDFNRFAKGNTYAAFLGLAPGESSSGEHICRTGISKAGNAHLRTLLIEASRGICKGAVGYKSRALRARQAECSAEIIAYADRANTRLRSKYYRLIRHDKKKNVAVAAIARELACFIWGIMTDHTEIKTNGQKTA

SEQ ID NO: 1514 - protein, 392 aa, Unknown
  Description of Unknown: uncultivated organism sequence
  Category: MG70 effectors
  Description: MG70-42 effector
MNRIVYIGMDVHTSNYTLCSLDPGYGVEKDNYFAEVQFTNNFVTNVVNYVSNLKKKLKDCEFVCGYEAGCLGYSTYKDLTKVGIKCVLMAPSTMAVQKGGKKVKNDRRDARVIAQCLAYQTYKEVYVLSEHDEAVRGYLRMRDSHNKALKRIKQQIIAFCTGHGLFSPTKSNWTVAHLKWLKDLKFNDPVEQEILNEYLSSLTFLSDKIKAMDVRIEELASEKQYCENVKKLRCIKGIETNVALTLLAEIGDFNRFSKPTDFASYLGLIPGEQSSGDKVRGTGITKAGNSTLRRKLTESAKGYWRGRIGIKSATFKKLEKELPKEVTEYALKANTRLQRKFFNMTHVKGKNMNVAASACAREMACFVWGLITNHYDKAPAVPKTDEELLDLN

SEQ ID NO: 1515 - protein, 1272 aa, Unknown
  Description of Unknown: uncultivated organism sequence
  Category: MG75 effectors
  Description: MG75-1 effector
MKFEEFTHLYQRSITIRMGLKPIGNTLEQIKEKHFLEKDEHRANSYKRVKNIIDEYYKDYIEKRLSDFSHSHHSDTDSSWNKLLKEYNGLYHSKRAENTEKSRFAEIQQTLRKEISKALNDKAQSLSGKELIQKDLISFLKTRKDLSKDEINDRLIPLVNEFEKFSTYFTGFSQNRENIFSSKEKSSSASYRLINENLPKFIDNMGTYGKLHSIPEISEMQDKLYEAFKKQIHYLKLGISSIDEMFQLEYFNNVLTQSQIDLYNAIIGGKTEGDLHIDGINQYVNRYNQTHKDERLPKLKTLFKQILSDRASLSAIPEKIENDDQAVKAVTGIYETIEQQVLAEDKLKNMLVSLSDYNLEGIFISNGQQLTQISKNMLGRREFISDAIVKCYQKSLPQKKRENYEDYLNRIRNNVRSIGSFSIADINQYIAKQPNGKDDYPKENPSTTIQDYFAKLDASDHTADIFSRISKAHQALLPALGKQNTGNISSFKDKNTLLLIKNLLDAILDLVHFVKPLLGTGDEIGKDERFYGDFSPLWNELKKFMSVYDMIRNYATQKPYKKDKIKINFENVQLLQGWDQNKEKEYASIILRRDGKYYLAIMDKDSKKLLGKAMPSDGDCYEKMVYKFIPDAKKMFPKVFLSKKGQETFKPTPLLIDNYNRGTHKKGKNFNLKDCHDLIDYFKHSIGMHEDWGKFGFNFSDTSSYEDISEFYNEVNQQSYKLTFTKVSVHFIDKLVDEGKMYMFQIYNKDFSEYSKGTPNIHTLYWKALFDERNLADVVYKLNGKAELFYRKKSIGHTHPTHPANQPIKNKSKDNEKAESTFGYDLIKDRRYTVDMFQFHVPITMNFKCGEKEKINLQVAEYLHTADDIHIIGVDRGERNLLYLVVIDIHGNIKEQFTLNDIVNEHNGNTYHTNYHDLLGEREEERIKARQSWQAIENIKELKEGYLSQVIHKITQLMMKYHAIVVLEDLNFGFKRSRQKVEKSVYQKFEKQLINKLQFLVNKQQSDPQAPGGVFNAYQLADKFESFQKLGKQSGFIFYIPAWNTSNIDPVTGFVNLFDTHYANVEKSKEFFKKFDTIRYNAEKDWFEFSFDYNHFTKKAEGSRTNWTLYTYGTRIKTFRNDKRNNEWDNEEMNLTDSFKTFFADNYVDINSNLQEAITNQNDKGFFVKLFELFKLLLQMRNSKIKSDVDFLLSPVADENGVFFDSRKYKGSRKCSGVVLPENADANGAFNIARKGLMLVRQMRIAKDEPFKPDLSNRQWLKFAQDKPYLND

SEQ ID NO: 1516 - protein, 1245 aa, Unknown
  Description of Unknown: uncultivated organism sequence
  Category: MG75 effectors
  Description: MG75-2 effector
METFSGFTNLYPLSKTLRFRLIPVGETLKHFIDSGILEEDQHRAESYVKVKAIIDDYHRAYIENSLSGFELPLESTGKFNSLEEYYLYHNIRNKTEEIQNLSSKVRTNLRKQVVAQLTKNEIFKRIDKKELIQSDLIDFVKNEPDANEKIALISEFRNFTVYFKGFHENRRNMYSDEEKSTSIAFRLIHENLPKFIDNMEVFAKIQNTSISENFDAIQKELCPELVTLCEMFKLGYFNKTLSQKQIDAYNTVIGGKTTSEGKKIKGLNEYINLYNQQHKQEKLPKMKLLFKQILSDRESASWLPEKFENDSQVVGAIVNFWNTIHDTVLAEGGLKTIIASLGSYGLEGIFLKNDLQLTDISQKATGSWGKISSEIKQKIEVMNPQKKKESYETYQERIDKIFKSYKSFSLAFINECLRGEYKIEDYFLKLGAVNSSSLQKENHFSHILNTYTDVKEVIGLYSESTDTKLIQDNDSIQKIKQFLDAVKDLQAYVKPLLGNGDETGKDERFYGDLIEYWSLLDLITPLYNMVRNYVTQKPYSVDKIKINFQNPTLLNGWDLNKETDNTSVILRRDGKYYLAIMNNKSRKVFLKYPSGTDRNCYEKMEYKLLPGANKMLPKVFFSKSRINEFMPNERLLSNYEKGTHKKSGTCFSLDDCHTLIDFFKKSLDKHEDWKNFGFKFSDTSTYEDMSGFYKEVENQGYKLSFKPIDATYVDQLVDEGKIFLFQIYNKDFSEHSKGTPNMHTLYWKMLFDETNLGDVVYKLNGEAEVFFRKASINVSHPTHPANIPIKKKNLKHKDEERILKYDLIKDKRYTVDQFQFHVPITMNFKADGNGNINQKAIDYLRSASDTHIIGIDRGERNLLYLVVIDGNGKICEQFSLNEIEVEYNGEKYSTNYHDLLNVKENERKQARQSWQSIANIKDLKEGYLSQVIHKISELMVKYNAIVVLEDLNAGFMRGRQKVEKQVYQKFEKKLIEKLNYLVFKKQSSDLPGGLMHAYQLANKFESFNTLGKQSGFLFYIPAWNTSKMDPVTGFVNLFDVKYESVDKAKSFFSKFDSIRYNVERDMFEWKFNYGEFTKKAEGTKTDWTVCSYGNRIITFRNPDKNSQWDNKEINLTENIKLLFERFGIDLSSNLKDEIMQRTEKEFFIELISLFKLVLQMRNSWTGTDIDYLVSPVCNENGEFFDSRNVDETLPQNADANGAYNIARKGMILLDKIKKSNGEKKLALSITNREWLSFAQGCCKNG

SEQ ID NO: 1517 - protein, 1254 aa, Unknown
  Description of Unknown: uncultivated organism sequence
  Category: MG75 effectors
  Description: MG75-3 effector
MRFEDFTGLYPVSKTLRFEARPVGNTLKYLIKSGLLEQDTHRADSYQKVKKLIDEYHKAFIDSVMSGFMFSNETLEEYFVLYANKSVDEESRNKYVELQKKMRESVSNALKGDERFKNIDKKELIKEDLYAFVRKADESQLAGLTLEQAEELLLEFKDFTTYFGGFHQNRANMYVPDEKSTSIAYRLVNENLPRFVDNIYVFKKIYSIPELRDNVKTVYDAFKEHLNVVELSDIFDVTFYSEVLTQKHIDLYNSIIGGRTDKESSKKIQGLNEYINLYNQTHKDEKLPKFKVLYKQILSDRVAVSWLPEAFSNDNETLCAIRDCYSGLEEHILGEKDLKILLESLDKYDLCGVFISNNKQLLSEISQKLYGNWGTIENAVRRHFEEVSPQRGKKETEEKYRERIAKSTKRYESFSIADLNEWVKQSNPDEARRIEDYFTSLGVVNSEDEQKEDLFRRVENAYTDVTDLLSSDYPEGKKLAQDSKAVEKIKNLLDAIKELQWFVKPLNGSGDENNKDERFYGEFSMLWAELDSFSLLYDKVRNYMTRKPYSQDKIKLNFANATLLKGWDRNKEVDNACVILRRNGLYYLGIMDKEHRRSFEGNYPCNGDVYEKMVYKLLPDPKKMLPKVFFSESREKDFNPTDSIRQLYKGNTYKAGPQFKIEDCRELIDFYKKSISLHEDWKNFGFQFSDTSTYEDLNGFFREVEQQGYKMTFKNVSVSYVEKLVDEGKLYLFQLYNKDFSAYSKGTPNIHTLYWKAVFDEKNLLNVVYKLNGEAELFFRKKSINITNPTHPANVSVANKNKLNQKRESVFDYDLVKDRRYTVDKFLFHVPITMNFKSKGKPQIEQQVRSYLHSAENTHIIGIDRGERHLLYVSVIDSYGNIKEQFSLNEIVNENAGNIYVTDYHALLDTKEAERKEARQSWQTIENIKELKEGYLSQAVHKVTQLMIKYNAIVVLEDLNMGFMRGRQKVEKQVYQKFEKMLIDKLNYMVDKKICVDEPGGIFHAYQLASKFESFTKLGKQSGFLFYIPAWNTSKIDPVTGFVNLFDLRYESIERTKLFFSKFKFVRYNQSSDWFEFAFDYNDFTDKATGTRTEWNITTHGTRIITFRNPEKNSQWDSREVVLTDEFKVLFSKYSIALNGNLKESIAIQTDRLFFETLLNCFKLTLQMRNSITGTDIDYLISPVADENGVFYDSRNCSNSLPKNADANGAYNIARKGLMLIDQIKHSDDFKTVKFDITNKAWLEFAQKKPYLND

SEQ ID NO: 1518 - protein, 1245 aa, Unknown
  Description of Unknown: uncultivated organism sequence
  Category: MG75 effectors
  Description: MG75-4 effector
METFSGFTNLYPLSKTLRFRLIPVGETLKYFIGSGILEEDQHRAESYVKVKAIIDDYHRAYIENSLSGFELPLESTGKFNSLEEYYLYHNIRNKTEEIQNLSSKVRTNLRKQVVAQLTKNEIFKRIDKKELIQSDLIDFVKNEPDANEKIALISEFRNFTVYFKGFHENRRNMYSDEEKSTSIAFRLIHENLPKFIDNMEVFAKIQNTSISENFDAIQKELCPELVTLCEMFKLGYFNKTLSQKQIDAYNTVIGGKTTSEGKKIKGLNEYINLYNQQHKQEKLPKMKLLFKQILSDRESASWLPEKFENDSQVVGAIVNFWNTIHDTVLAEGGLKTIIASLGSYGLEGIFLKNDLQLTDISQKATGSWGKISSEIKQKIEVMNPQKKKESYETYQERIDKIFKSYKSFSLAFINECLRGEYKIEDYFLKLGAVNSSSLQKENHFSHILNTYTDVKEVIGLYSESTDTKLIQDNDSIQKIKQFLDAVKDLQAYVKPLLGNGDETGKDERFYGDLIEYWSLLDLITPLYNMVRNYVTQKPYSVDKIKINFQNPTLLNGWDLNKETDNTSVILRRDGKYYLAIMNNKSRKVFLKYPSGTDRNCYEKMEYKLLPGANKMLPKVFFSKSRINEFMPNERLLSNYEKGTHKKSGTCFSLDDCHTLIDFFKKSLDKHEDWKNFGFKFSDTSTYEDMSGFYKEVENQGYKLSFKPIDATYVDQLVDEGKIFLFQIYNKDFSEHSKGTPNMHTLYWKMLFDETNLGDVVYKLNGEAEVFFRKASINVSHPTHPANIPIKKKNLKHKDEERILKYDLIKDKRYTVDQFQFHVPITMNFKADGNGNINQKAIDYLRSASDTHIIGIDRGERNLLYLVVIDGNGKICEQFSLNEIEVEYNGEKYSTNYHDLLNVKENERKQARQSWQSIANIKDLKEGYLSQVIHKISELMVKYNAIVVLEDLNAGFMRGRQKVEKQVYQKFEKKLIEKLNYLVFKKQSSDLPGGLMHAYQLANKFESFNTLGKQSGFLFYIPAWNTSKMDPVTGFVNLFDVKYESVDKAKSFFSKFDSIRYNVERDMFEWKFNYGEFTKKAEGTKTDWTVCSYGNRIITFRNPDKNSQWDNKEINLTENIKLLFERFGIDLSSNLKDEIMQRTEKEFFIELISLFKLVLQMRNSWTGTDIDYLVSPVCNENGEFFDSRNVDETLPQNADANGAYNIARKGMILLDKIKKSNGEKKLALSITNREWLSFAQGCCKNG

SEQ ID NO: 1519 - protein, 1245 aa, Unknown
  Description of Unknown: uncultivated organism sequence
  Category: MG75 effectors
  Description: MG75-5 effector
METFSGFTNLYPLSKTLRFRLIPVGETLKHFIDSGILEEDQHRAESYVKVKAIIDDYHRAYIENSLSGFELPLESTGKFNSLEEYYLYHNIRNKTEEIQNLSSKVRTNLRKQVVVQLTKNEIFKRIDKKELIQSDLIDFVKNEPDANEKIALISEFRNFTVYFKGFHENRRNMYSDEEKSTSIAFRLIHENLPKFIDNMEVFAKIQNTSISENFDAIQKELCPELVTLCEMFKLGYFNKTLSQKQIDAYNTVIGGKTTSEGKKIKGLNEYINLYNQQHKQEKLPKMKLLFKQILSDRESASWLPEKFENDSQVVGAMVNFWNTIHDTVLAEGGLKTIIASLGSYGLEGIFLKNDLQLTDISQKATGSWSKISSEIKQKIEVMNPQKKKESYESYQERIDKLFKSYKSFSLAFINECLRGEYKIEDYFLKLGAVNSSSLQKENHFSHILNAYTDVKEAIGFYSESTDTKLIQDNDSIQKIKQFLDAVKDLQAYVKPLLGNGDETGKDERFYGDLIEYWSLLDLITPLYNMVRNYVTQKPYSVDKIKINFQNPTLLNGWDLNKETDNTSVILRRDGKYYLAIMNNKSRKVFLKYPSGTDGNCYEKMEYKLLPGANKMLPKVFFSKSRINEFMPNERLLSNYEKGTHKKSGICFSLDDCHTLIDFFKKSLDKHEDWKNFGFKFSDTSTYEDMSGFYKEVENQGYKLSFKPIDATYVDQLVDEGKIFLFQIYNKDFSEHSKGTPNMHTLYWKMLFDETNLGDVVYKLNGEAEVFFRKASINVSHPTHPANIPIKKKNLKHKDEERILKYDLIKDKRYTVDQFQFHVPITMNFKADGNGNINQKAIDYLCSASDTHIIGIDRGERNLLYLVVIDGNGKICEQFSLNEIEVEYNGEKYSTNYHDLLNVKENERKQARQSWQSIANIKDLKEGYLSQVIHKISELMVKYNAIVVLEDLNAGFMRGRQKVEKQVYQKFEKKLIEKLNYLVFKKQSSDLPGGLMHAYQLANKFESFNALGKQSGFLFYIPAWNTSKMDPVTGFVNLFDVKYESVDKAKSFFSKFDSMRYNVERDMFEWKFNYGEFTKKAEGTKTDWTVCSYGNRIITFRNPDKNSQWDNKEINLTENIKLLFERFGIDLSSNLKDEIMQRTEKEFFIELISLFKLVLQMRNSWTGTDIDYLVSPVCNENGEFFDSRNVDETLPQNADANGAYNIARKGMILLDKIKKSNGEKKLALSITNREWLSFAQGCCKNG

SEQ ID NO: 1520 - protein, 1245 aa, Unknown
  Description of Unknown: uncultivated organism sequence
  Category: MG75 effectors
  Description: MG75-6 effector
METFSGFTNLYPLSKTLRFRLIPVGETLKHFIGSGILEEDQHRAESYVKVKAIIDDYHRAYIENSLSGFELPLESTGKFNSLEEYYLYHNIRNKTEEIQNLSSKVRTNLRKQVVTQLTKNEIFKRIDKKELIQSDLIDFVKNEPDANEKIALISEFRNFTVYFKGFHENRRNMYSDEEKSTSIAFRLIHENLPKFIDNMEVFAKIKNTSISENFEAIQKELCPELVTLCEMFKLGYFNKTLSQKQIDAYNTVIGGKTTSEGKKIKGLNEYINLYNQQHKQEKLPKMKLLFKQILSDRESASWLPEKFENDSQVVGAMVNFWNTIHDTVLAEGGLKTIIVSLGSYGLEGIFLKNDLQLTDISQKATGSWSKISSEIKQKIEVMNPQKKKESYESYQERIDKLFKSYKSFSLAFINECLRGEYKIEDYFLKLGAVNSSSLQKENHFSHILNTYTDVKEVIGFYSESTDTKLIQDNDSIQKIKQFLDAVKDLQAYVKPLLGNGDETGKDERFYGDLIEYWSQLDLITPLYNMVRNYVTQKPYSVDKIKINFQNPTLLNGWDLNKEMDNTSVILRRDGKYYLAIMNNKSRKVFLKYPSGTDRNCYEKMEYKLLPGANKMLPKVFFSKSRINEFMPNERLLSNYEKGTHKKSGTCFSLDDCHTLIDFFKKSLNKHEDWKNFGFKFSDTSTYEDMSGFYKEVENQGYKLSFKPIDATYVDQLVDEGKIFLFQIYNKDFSEHSKGTPNMHTLYWKMLFDETNLGDVVYKLNGEAEVFFRKASINVSHPTHPANIPIKKKNLKHKDEERILKYDLIKDKRYTVDQFQFHVPITMNFKADGNGNINQKAIDYLCSASDTHIIGIDRGERNLLYLVVIDGNGKICEQFSLNEIEVEYNGEKYSTNYHDLLNVKENERKQARQSWQSIANIKDLKEGYLSQVIHKISELMVKYNAIVVLEDLNAGFMRGRQKVEKQVYQKFEKKLIEKLNYLVFKKQSSDLPGGLMHAYQLANKFESFNALGKQSGFLFYIPAWNTSKMDPVTGFVNLFDVKYESVDKAKSFFSKFDSMRYNVERDMFEWKFNYGEFTKKAEGTKTDWTVCSYGNRIITFRNPDKNSQWDNKEINLTENIKLLFERFGIDLSSNLKDEIMQRTEKEFFIELISLFKLVLQMRNSWTGTDIDYLVSPVCNENGEFFDSRNVDETLPQNADANGAYNIARKGMILLDKIKKNNGEKKLALSITNREWLSFAQGCCKNG

SEQ ID NO: 1521 - protein, 1236 aa, Unknown
  Description of Unknown: uncultivated organism sequence
  Category: MG75 effectors
  Description: MG75-7 effector
METFSGFTNLYPLSKTLRFRLIPVGETLKHFIDSGILEEDQHRAESYVKVKAIIDDYHRAYIENSLSGFELPLESTGKFNSLEEYYLYHNIRNKTEKNQKSLSTVRFNLRKQMVKQLTKNELYKRIYKQNLIKKDLIDFVKNEPDANEKIALISEFRNFTVYFKGFHENRRNMYLDEEKSTSIAFRLIHENLPKFIDNMEVFAKIQNTSISENFDVIQKELCPELVTLCEMFKLGYFNKTLSQKQINAYNTVIGELNKYLNHYNQQHKQEKLPKMKLLFKQILSDRESTSWLPERFANDGQVVGAMVNFWNTIHDTVLAEGGLKTIIASLGSYGLEGIFLKNDLQLTDISQKATGSWSKISSEIKQKIEVMNPQKKKESYESYQERIDKLFKSYKSFSLAFINECLRGEYKIEDYFLKLGAVNSSSLQKENHFSHILNTYTDVKEVIGFYSESTDTKLIRDNGSIQKIKLFLDAVKDLQAYVKPLLGNGDETGKDERFYGDLIEYWSLLDLITPLYNMVRNYVTQKPYSVDKIKLNFRNPTLLDGWDLNRETANTSVILRRDGKYYLAIMNNKSRKVFLKYPSGTGKDCYEKMEYKLIPGAYKMLPKAFFSKSKINKFMPDEHLLSNYKKGTHKKNNANFDLDDCHTLIDFFKKSLNKHEDWKNFDFKFSDTSTYTDINNFYKEIDNQAYKLSFRPVPSDFVDKLVEEGKIFLFWIYNKDFSGHSKGTPNMHTLYWRMLFDERNLEDVVYSLNGGAEVFFRKASINVSHPTHPANIPIKKKNLKHKDEERILKYDLIKDKRYTIDQFQFHVPITMNFKVAGNGNININQKAIDYLRSASDTHIIGIDRGERNLLYLVVIDGNGKICEQFSLNEIEVEYNGEKYSTNYHDLLNVKENERKQARQSWQSIANIKDLKEGYLSQVIYKISELIVKYNAIVVLEDLNAGFMRGRQKVEKQVYQKFEKKLIEKLNYLVFKKQSSDLPGGLMHAYQLANKFESFNTLGKQSGFLFYIPAWNTSKMDPVTGFVNLFDVKYESVDKAKSFFSKFDSIRYNVERDMFEWKFNYGEFTKKAEGAKTDWTVCSYGNRIITFRNPDKNSQWDNKEINLTENVKLLFERFGIDLSSNLKDEIMERTEKEFFIELISLFKLVLQMRNSWTGTDIDYLVSPVCNENGEFFDSRNVDETLPQNADANGAYNIARKGMILLDKIKKNNGEKKLALSITNREWLSFAQGCCKNG

SEQ ID NO: 1522 - protein, 1248 aa, Unknown
  Description of Unknown: uncultivated organism sequence
  Category: MG75 effectors
  Description: MG75-8 effector
METFSGFTNLYPLSKTLRFRLIPVGETLKHFIDSGILEEDQHRAESYVKVKAIIDDYHRAYIENSLSGFELPLESTGKFNSLEEYYLYHNIRNKTEEIQNLSSKVRTNLRKQVVTQLTKNEIFKRIDKKELIQSDLIDFVKNEPDANEKIALISEFRNFTVYFKGFHENRRNMYSDEEKSTSIAFRLIHENLPKFIDNMEVFAKIQNTSISENFDAIQKELCTELVTLCEMFKLGYFNKTLSQKQIDAYNTVIGGKTTSEGKKIKGLNEYINLYNQQHKQEKLPKMKLLFKQILSDRESASWLPEKFENDSQVVGAMVNFWNTIHDTVLAEGGLKTIIASLGSYGLEGIFLKNDLQLTDISQKATGSWSKISSEIKQKIEVMNPQKKKESYESYQERIDKLFKSYKSFSLAFINECLRGEYKIEDYFLKLGAVNSSSLQKENHFSHILNTYTDVKEVIGFYSESTDTKLIRDNGSIQKIKLFLDAVKDLQAYVKPLLGNGDETGKDERFYGDLIEYWSLLDLITPLYNMVRNYVTQKPYSVDKIKLNFRNPTLLDGWDLNRETANTSVILRRDGKYYLAIMNNKSRKVFLKYPLGTGKDCYEKMEYKLIPGAYKMLPKAFFAKSKINKFMPDEHLLSNYKKGTHKKNNANFDLDDCHTLIDFFKKSLNKHEDWKNFDFKFSDTSTYTDINNFYKEIDNQAYKLSFRPVPSDFVDKLVEEGKIFLFWIYNKDFSGHSKGTPNMHTLYWRMLFDERNLEDVVYSLNGGAEVFFRKASINVSHPTHPANIPIKKKNLKHKDEERILKYDLIKDKRYTVDQFQFHVPITMNFKADGNGNINQKAIDYLCSASDTHIIGIDRGERNLLYLVVIDGNGKICEQFSLNEIEVEYNGENYSTNYHDLLNVKENERKQARQSWQSIANIKDLKEGYLSQVIHKISELMVKYNAIVVLEDLNAGFMRGRQKVEKQVYQKFEKKLIEKLNYLVFKKQSSDLPGGLMHAYQLANKFESFNTLGKQSGFLFYIPAWNTSKMDPVTGFVNLFDVKYESVDKAKSFFSKFDSMRYNVERDMFEWKFNYGEFTKKAEGTKTDWTVCSYGNRIITFRNPDKNSQWDNKEINLTENIKLLFERFGIDLSSNLKDEIMQRTEKEFFIELISLFKLVLQMRNSWTGTDIDYLVSPVCNENGEFFDSRNVDETLPQNADANGAYNIARKGMILLDKIKKSNGEKKLALSITNREWLSFAQGCCKKWMIT

SEQ ID NO: 1523 - protein, 1250 aa, Unknown
  Description of Unknown: uncultivated organism sequence
  Category: MG75 effectors
  Description: MG75-9 effector
MKTLSDFTNLFPLSKTLRFKLIPIGNTLKNIEASGILDEDRHRAESYVKVKAIIDEYHKAFIDRVLSDTCLQTESIGKHNSLEEFFFYYQIGAKSEQQKKTFKKIQDALRKQIADSLTKDKHFSRIDKKELIQEDLIQFVRDGEDAAEKTSLISEFQNFTVYFTGFHENRQNMYSPDEKSTAIAYRLINENLPKFVDNMKVFDRIAASELASCFDELYHNFEEYLQVERLHDIFSLDYFNLLLTQKHIDVYNALIGGKATETGEKIKGLNEYINLYNQRHKQEKLPKFKMLFKQILTDREAISWLPRQFDDNSQLLSAIEQCYNHLSTYTLKDGSLKYLLENLHTYDTEKIFIRNDSLLTEISQRHYGSWSILPEAIKRHLERANPQKRRETYEAYQSRIEKAFKAYPGFSIAFLNGCLTETGKESPSIESYFESLGAVETETSQQENWFARIANAYTDFREMQNRLHATDVPLAQDAEAVARIKKLLDALKGLQLFIKPLLDTGEEAEKDERFYGDFTEFWNELDTITPLYNMVRNYLTRKPYSEEKIKLNFQNPTLLNGWDLNKEVDNTSVILRRNGRYYLAIMHRNHRRVFSQYPGTERGDCYEKMEYKLLPGANKMLPKVFFSKSRIDEFNPSEELLARYQQGTHKKGENFNLHDCHALIDFFKDSIEKHEEWRNFHFKFSDTSSYTDMSGFYREIETQGYKLSFVPVACEYIDELVRDGKIFLFQIYNKDFSTYSKGKPNMHTLYWEMLFDERNLMNVVYKLNGQAEIFFRKASLSARHPEHPAGLPIKKKQAPTEESCFPYDLIKNKRYTVDQFQFHVPITINFKATGTSNINPSVTDYIRTADDLHIIGIDRGERHLLYLVVIDSQGRICEQFSLNEIVTQYQGHQYRTDYHALLQKKEDERQKARQSWQSIENIKELKEGYLSQVVHKVSELMIKYKAIVVLEDLNAGFKRSRQKVEKQVYQKFEKMLIDKLNYLVFKTAEADQPGGLLHAYQLTNKFESFKKMGKQSGFLFYIPAWNTSKIDPTTGFVNLFDTRYENVDKSRAFFGKFDSIRYRADKGTFEWTFDYNNFHKKAEGTRSSWCLSSHGNRVRTFRNPAKNNQWDNEEIDLTQAFRDLFEAWGIEITSNLKEAICNQSEKKFFSELFELFKLMIQLRNSVTGTNIDYMVSPVENHYGTFFDSRTCDSSLPANADANGAYNIARKGLMLARRIQATPENDPISLTLSNKEWLRFAQGLDETTTYE

SEQ ID NO: 1524 - protein, 1246 aa, Unknown
  Description of Unknown: uncultivated organism sequence
  Category: MG75 effectors
  Description: MG75-10 effector
MMETFSDFTNLYPLSKTLRFRLIPVGETLRHFIDSGILEEDQHRAESYVKVKAIIDDYHRTYIENSLSGFELPVESTGKANSLEEYYLYHNIRNKTEDIQNALSKVRNNLRKQIVTQLTKNEMFKRIDKKELIQTDLIDFVKNDPDANEKIALISEFRNFTVYFKGFHENRKNMYSDEEKSTSIAFRLIHENLPKFIDNMEVFAKIQNTSISENFEAIQKDLCPETIAFADMFKLGYFNKTLSQKQIDAYNTVISGRTTAEGEKIKGLNEYINLYNQQHKQEKLPKMKLLFKQILSDRESASWLPEKLENDKQVVGALVDFWNAIHDTVLAEGGLKTVISSLVSYSLEGIFLKNDLQLTDVSQKATGSWSKIPAAIKQKLEAMNPQKKKESYEGYQERIDKIFKSYKSFSLAFINECLHGEYKIEDYFIKLGAINTDLLQKENHFSHILNTYTDIKEMIESYFESTDTKLIRDNGSIQKIKQFLDAVKDLQVYVKPLLGNGDETGKDERFYGDFVEYWNLLDLITPLYNMVRNYVTQKPYSIEKIKINFQNPTLLNGWDLNKETDNTSVILRRDGKYYLAIMNSKFRKVFLKYPSGSDRNCYEKMEYKLLPGANKMLPKVFFSKSRIQEFMPDERLLSNYEKGTHKKTGNCFSLTDCHALIDFFKKSLNKHEDWKNFGFKFSDTSTYTDMSGFYKEVENQGYKLSFKPIDAVYVDQLVDEGKIFLFQIYNKDFSGHSKGTPNMHTLYWKMLFDETNLGDVVYKLNGEAEVFFRKASIKVSSPTHPANVPIKKKNPKHKDEERILKYDLIKDKRYTVDQFQFHVPITMNFKSDGNGNINQKVIEYLRSASNIHIMGIDRGERNLLYLVVIDGSGNICEQFSLNEIKVEHNGETYSTNYHDLLDIKENERKQARQSWQSIANIKELKEGYLSQVIHKISELMVKYNAIVVLEDLNTGFMRGRQKVEKQVYQKFEKMLIEKLNYLVFKKQPSNLCGGLMHAYQLTNKFEGFNKLGKQSGFLFYIPTWNTSKMDPVTGFVNLFDLKYESIDKAKSFFSKFDSIRYNEERDMFEWKFNYDEFTKKAEGTKTNWTVCSYGNRIITFRNPNKNSQWDNKEINLTENIKLLFERFGIDLSSNLKDEIMQRTEKEFFIELISLFKLVLQMRNSWTGTDIDYLVSPVCNEKGEFFDSRNVDKALPQNADANGAYNIARKGLILLDRIKESTSDKKLNFSITNKEWLSFAQGCCKNG

SEQ ID NO: 1525 - protein, 1319 aa, Unknown
  Description of Unknown: uncultivated organism sequence
  Category: MG75 effectors
  Description: MG75-11 effector
MAKNFEDFKRLYPLSKTLRFEAKPIGATLDNIVKSGLLDEDEHRAASYVKVKKLIDEYHKVFIDRVLDNGCLPLKNEGHNNSLTEYYDSYVSKSQNEDAKKAFEENQQNLRSIIAKKLTEDKAYANLFGKNLIESYKDKEDKTKIIDSDLIKFINTAESTQLDSMSQDEVKELVKEFWGFITYFYGFFDNRKNMYTSEEKSTGIAYRLINENLPKFIDNMEAFNTAITRPEIQANMDELYSNFSEYLNVESIQEMFQLDYYNMLLTQKQIDVYNAIIGGKTDDEHDVKIKGINEYINLYNQQHKDDKLPKLKALFKQILSDRNAISWLPEEFNSDQEVLNAIKDCYERLAENVLGDKVLKSLLGSLADYSLDGIFIRNDLQLTDISQKMFGNWGVIQNAIMQNIKRVAPARKHKESEEDYEKRIAGIFKKADSFSISYINDCLNEADPNNAYFVENYFATFGAVNTPTMQRENLFALVQNAYTEVAALLHSDYPTVKHLAQDKANVSKIKALLDAIKSLQHFVKPLLGKGDESDKDERFYGELASLWAELDTVTPLYNMIRNYMTRKPYSQKKIKLNFENPQLLGGWDANKEKDYATIILRRNGLYYLAIMDKDSKNLLGKAMPSDGECYEKMVYKQFDISKQLPKCTTELKHVRKALVEDAKRSCLLSDFNNWNKPLNVTRKLWELNNFVWDKKREDWVLRKKDNETRPKKFHKKYLELTSDKKGYNQAKNDWIKFTKEFLSSYKKVEAYDIHYKKRYNSVDELYKQLNGDLYAISFTYVSVSFIEQLVSEGKMYLFQIYNKDFSEYSKGTPNMHTLYWKALFDERNLADVVYKLNGQAEMFYRKKSIENTHPTHPANHPILNKNKDNKKKESLFEYDLIKDRRYTVDKFMFHVPITMNFKSSGSENINQDVKAYLRHADDMHIIGIDRGERHLLYLVVIDLQGNIKEQFSLNEIVNDYNGNTYHTNYHDLLDVREDERLKARQSWQTIENIKELKEGYLSQVIHKITQLMVKYHAIVVLEDLNMGFMRGRQKVEKQVYQKFEKMLIEKLNYLVDKKADASVSGGLLNAYQLTSKFDSFQKLGKQSGFLFYIPAWNTSKIDPVTGFVNLLDTRYQNVEKAKVFFSKFDAIRYNKDKDWFEFNLDYDKFGKKAEGTRTKWTLCTRGMRIDTFRNKEKNSQWDNQEVDLTAEMKSLLEHYYIDIHGNLKDAISAQTDKAFFMGLLHILKLTLQMRNSITGTETDYLVSPVADENGIFYDSRSCGDELPENADANGAYNIARKGLMMIEQIKEAKDLDNLKFDISNKSWLNFAQQKPYKNG

SEQ ID NO: 1526 - protein, 1245 aa, Unknown
  Description of Unknown: uncultivated organism sequence
  Category: MG75 effectors
  Description: MG75-12 effector
METFSGFTNLYPLSKTLRFRLIPVGETLKHFIDSGILEEDQHRAESYVKVKAIIDDYHRAYIENSLSGFELPLESTGKFNSLEEYYLYHNIRNKTEEIQNLSSKVRTNLRKQVVVQLTKNEIFKRIDKKELIQSDLIDFVKNEPDANEKIALISEFRNFTVYFKGFHENRRNMYSDEEKSTSIAFRLIHENLPKFIDNMEVFAKIQNTSISENFDAIQKELCPELVTLCEMFKLGYFNKTLSQKQIDAYNTVIGGKTTSEGKKIKGLNEYINLYNQQHKQEKLPKMKLLFKQILSDRESASWLPEKFENDSQVVGAMVNFWNTIHDTVLAEGGLKTIIASLGSYGLEGIFLKNDLQLTDISQKATGSWSKISSEIKQKIEVMNPQKKKESYESYQERIDKLFKSYKSFSLAFINECLRGEYKIEDYFLKLGAVNSSSLQKENHFSHILNTYTDVKEVIGFYSESTDTKLIQDNDSIQKIKLFLDAVKDLQAYVKPLLGNGDETGKDERFYGDLIEYWSLLDLITPLYNMVRNYVTQKPYSIDKIKINFQNPTLLNGWDLNKETDNTSVILRRDGKYYLAIMNNKSRKVFLKYPSGTDRNCYEKMEYKLLPGANKMLPKVFFSKSRINEFMPNERLLSNYEKGTHKKSGTCFSLDDCHTLIDFFKKSLDKHEDWKNFGFKFSDTSTYEDMSGFYKEVENQGYKLSFKPIDATYVDQLVDEGKIFLFQIYNKDFSEHSKGTPNMHTLYWKMLFDETNLGDVVYKLNGEAEVFFRKASINVSHPTHPANIPIKKKNLKHKDEERILKYDLIKDKRYTVDQFQFHVPITMNFKADGNGNINQKAIDYLRSASDTHIIGIDRGERNLLYLVVIDGNGKICEQFSLNEIEVEYNGEKYSTNYHDLLNVKENERKQARQSWQSIANIKDLKEGYLSQVIHKISELMVKYNAIVVLEDLNAGFMRGRQKVEKQVYQKFEKKLIEKLNYLVFKKQSFDLPGGLMHAYQLANKFESFNALGKQSGFLFYIPAWNTSKMDPVTGFVNLFDVKYESVDKAKSFFSKFDSIRYNVERDMFEWKFNYGEFTKKAEGTKTDWTVCSYGNRIITFRNPDKNSQWDNKEINLTENIKLLFERFGIDLSSNLKDEIMQRTEKEFFIELISLFKLVLQMRNSWTGTDIDYLVSPVCNENGEFFDSRNVDETLPQNADANGAYNIARKGMILLDKIKKSNGEKKLALSITNREWLSFAQGCCKNG

SEQ ID NO: 1527 - protein, 1275 aa, Unknown
  Description of Unknown: uncultivated organism sequence
  Category: MG75 effectors
  Description: MG75-13 effector
MAKNFEDFKRLYSLSKTLRFEAKPIGATLDNIVKSGLLDEDEHRAASYVKVKKLIDEYHKVFIDRVLANGCLPLKNEGHNNSLTEYYDNYVSKSQNEDAKKTFEENQQNLRSIIAKKLTEDKAYANLFGKNLLESYKDKTDKTKIIDSDLFKFINTAESTQLDSMSQDEAKELVKEFWGFITYFYGFFDNRKNMYTSEDKSTGIAYRLINENLPKFIDNMEAFNTAVTRPEIQANMDELYSNFSEYLNVESIQEMFQLDYYNMLLTQKQIDVYNAIIGGKTDDEHDVKIKGINEYINLYNQKHKDDKLPKLKALFKQILSDRNAISWLPEEFNSDQEVLNAIKDCYERLSENVLGDKVLKSLLGSLADYSLDGIFIRNDLQLTDISQKMFGNWGVIQNAIMQDIKHVAPARKHKESEEDYEKRIAGIFKKADSFSISYINDCLNEADPNNAYFVENYFATLGAVDTPTMQRENLFALVQNAYTEITALLHSDYPTEKNLAQDKANVAKIKALLDAIKSLQHFVKPLLGKGDESDKDERFYGELASLWTELDTVTPLYNMIRNYMTRKPYSQKKIKLNFENPQLLGGWDVNKKKDYATIILRRNGLYYLAIMNKDSKKLLGKAMPSDGECYEKMVYKLLPGANKMLPKVFFAKSRMEDFKPSKELVEKYNNGTHKKGKNFNIQDCHNLIDYFKQSIDKHEDWSKFGFKFSDTSTYEDFSGFYREVEQQGYKLSFARVSVSYINQLVEEGKMYLFQIYNKDFSEYSKGTPNMYTLYWKALFDERNLADVVYKLNGQAEMFYRKKSIENTHPTHPANHPILNKNKDNKKKESLFDYDLIKDRRYTVDKFMFHVPITMNFKSVGSENINQDVKAYLRHADDMHIIGIDRGERHLLYLVVIDLQGNIKEQYSLNEIVNEYNGNTYHTNYHDLLDVREEERLKARQSWQTIENIKELKEGYLSQVIHKITQLMVGYHAIVVLEDLSKGFMRSRQKVEKQVYQKFEKMLIDKLNYLVDKKTDVSTPGGLLNAYQLTCKSDSSQKLGKQSGFLFYIPAWNTSKIDPVTGFVNLLDTHSLNSKEKIKAFFSKFDAIRYNKDKKWFEFNLDYDKFGKKAEDTRTKWTLCTRGMRIGTFRNKEKNSQWDNQEVDLTTEMKSLLEHYYIDIHGNLKDAISTQTDKAFFTGLLHILKLTLQMRNSITGTETDYLVSPVADENGIFYDSRSCGDQLPENADANGAYNIARKGLMLIEQIKNAEDLNNVKFDISNKAWLNFAQQKPYKNG

SEQ ID NO: 1528 - protein, 1245 aa, Unknown
  Description of Unknown: uncultivated organism sequence
  Category: MG75 effectors
  Description: MG75-14 effector
METFSGFTNLYPLSKTLRFRLIPVGETLKYFIGSGILEEDQHRAESYVKVKAIIDDYHRAYIENSLSGFELPLECTGKFNSLEEYYLYHNIRNKTEEIQNLSSKVRTNLRKHVVAQLTKNEIFKRIDKKELIQSDLIDFVKNEPDANEKIALISEFRNFTVYFKGFHENRRNMYSDEEKSTSIAFRLIHENLPKFIDNMEVFAKIQNTSISENFDAIQKELCPELVTLCEMFKLGYFNKTLSQKQIDAYNTVIGGKTTSEGKKIKGLNEYINLYNQQHKQEKLPKMKLLFKQILSDRESASWLPEKFENDSQVVGAIVNFWNTIHDTVLAEGGLKTIIASLGSYGLEGIFLKNDLQLTDISQKATGSWGKISSEIKQKIEVMNPQKKKESYETYQERIDKIFKSYKSFSLAFINECLRGEYKIEDYFLKLGAVNSSSLQKENHFSHILNTYTDVKEVIGLYSESTDTKLIQDNDSIQKIKQFLDAVKDLQAYVKPLLGNGDETGKDERFYGDLIEYWSLLDLITPLYNMVRNYVTQKPYSVDKIKINFQNPTLLNGWDLNKETDNTSVILRRDGKYYLAIMNNKSRKVFLKYPSGTDRNCYEKMEYKLLPGANKMLPKVFFSKSRINEFMPNERLLSNYEKGTHKKSGTCFSLDDCHTLIDFFKKSLDKHEDWKNFGFKFSDTSTYEDMSGFYKEVENQGYKLSFKPIDATYVDQLVDEGKIFLFQIYNKDFSEHSKGTPNMHTLYWKMLFDETNLGDVVYKLNGEAEVFFRKASINVSHPTHPANIPIKKKNLKHKDEERILKYDLIKDKRYTVDQFQFHVPITMNFKADGNGNINQKAIDYLRSASDTHIIGIDRGERNLLYLVVIDGNGKICEQFSLNEIEVEYNGEKYSTNYHDLLNVKENERKQARQSWQSIANIKDLKEGYLSQVIHKISELMVKYNAIVMLEDLNAGFMRGRQKVEKQVYQKFEKKLIEKLNYLVFKKQSSDLPGGLMHAYQLANKFESFNTLGKQSGFLFYIPAWNTSKMDPVTGFVNLFDVKYESVDKAKSFFSKFDSIRYNVERDMFEWKFNYGEFTKKAEGTKTDWTVCSYGNRIITFRNPDKNSQWDNKEINLTENIKLLFERFGIDLSSNLKDEIMQRTEKEFFIELISLFKLVLQMRNSWTGTDIDYLVSPVCNENGEFFDSRNVDETLPQNADANGAYNIARKGMILLDKIKKSNGEKKLALSITNREWLSFAQGCCKNG

SEQ ID NO: 1529 - protein, 1302 aa, Unknown
  Description of Unknown: uncultivated organism sequence
  Category: MG75 effectors
  Description: MG75-15 effector
MEFNDFKRLYPLSKTLRFEAKPIGATLKNIIKSGLLEEDEHRAQSYVKVKKLIDEYHKVFIDRVLNEGCLTIENKGKKNSLEEYYESYMSKSNDENVSKTFKEIQENLRSVIAKKLTDDNAYANLFGNKLIESYKDKEEKNKIIDSDLIQFINSAEPSQLDSMSQDEANELVKEFWGFTTYFVGFFDNRKNMYTSEEKSTGIAYRLINENLPKFIDNMEAFKKAVAKPEIQANMEELYSNFAEYLNVESIQEMFQLDYYNMLLTQKQIDVYNAIIGGKTDEEHDVKIKGINEYINLYNQQHKDEKLPKLKALFKQILSDRNAISWLPEEFNSDQEVLNAIKDCYERLSENVLGDKVLKSLLCSLSDYNLNGIFVRNDLQLTDISQKMFGNWSVVQDAIMQNIKNVAPARKRKESEEDYEKRISDIFKKADSFSIQYINDCLNEMDDNNLHAVDGYFATLGAVNTPTMQRENLFALIQNAYTDISDMLDTPYPKNMNLAQDKTNVAKVKALLDAIKSLQHFVKPLLGKGDESDKDERFYGELASLWTELDTVTPLYNMIRNYMTRKPYSEKKIKLNFENPQLLGGWDANKEKDYATIILRRNGMYYLAIMNKDSKRLLGKSMPSDGEYYEKMVYKFFKDVTTMIPKCSTQLKDVQAFFKVNTDDFVLNSKAFNKPLTITKEVFDLNNVLYGKFKKFQKGYLSATGDTAGYTHAVNVWIKFCMDFLNSYESTCMYDFSLLKFESYLSLDAFYQDANLLLYKLSFTNVSVSFIDKLVDEGKMYLFQIYNKDFSDFSKGTPNMHTLYWKALFDERNLADVVYKLNGKAEIFYRKKSINNTHPTHPANHTIQNKNKDNKKKESVFEYDLIKDRRYTVDKFLFHVPITMNFKSVGSENINQQVREYLQQAEDTHIIGIDRGERHLLYLVVIDMQGEIKEQFTLNEIVNEYNGNTYRTNYHDLLDTREEERLKARPSWQTIENIKDLKEGYLSQAIHKITQLMVKYHAVVVLEDLNKGFMRGRQKVEKQVYQKFEKMLIDKLNYLVDKKADAAQSGGLLNAYQLTSKFDSFQKLGKQSGFLFYIPAWNTSKIDPVTGFVNLLDTRYQNIEKAKAFFSKFDAIRYNANKDWFEFNLDYDKFGTKAEGTRTKWILCTQGNRICTFRNAEKNSQWDNLKIDLTREMKSLFEHYHINICGNLKEEICSQTDKAFFTGLLHMLKLTLQMRNSITETETDYLVSPVADENGVFYDSRSCGDTLPKNADANGAYNIARKGLMLIGQIKETKDLANFKYDISNKAWLNFAQQKPYKK

SEQ ID NO: 1530 - protein, 1274 aa, Unknown
  Description of Unknown: uncultivated organism sequence
  Category: MG75 effectors
  Description: MG75-16 effector
MAKNFEDFKRLYPLSKTLRFEAKPIGATLDNIVKSGLLDEDEHRAASYVKVKKLIDEYHKVFIDRVLDNGCLPLEDKGDNNSLAEYYDSYVSKSQNEDAKKAFKEIQQNLRSIIAKKLTDDKAYANLFGNKLIESYKDKADKTKIIDSDLIQFIHTAESTQLDSMSQDEAKELVKEFCGFTTYFVGFFDNRKNMYTAEEKSTGIAYRLINENLPKFIDNMEAFKKAIARPEIQANMEELYSDFSEYLNVESILEMFQLDYYNMLLTQKQIDVYNAIIGGKTDDEHDVKIKGINEYINLYNQQHKDDKLPKLKALFKQILSDRNAISWLPEEFNSDQEVLNAIKDCYERLAENVLGDKVLKSLLGSLADYSLDGIFIRNDLQLTDISQKMFGNWGVIQNAIMQNIKHVAPARKHKESEEDYEKRIAGIFKKADSFSISYINDCLNEEEPNNAYFVENYFATFGAVNTPTMQRENLFALVQNAYTEVAALLHSDYPTVKHLAQDKANVSKIKALLDAIKSLQHFVKPLLGKGDESDKDERFYGELASLWAELDTVTPLYNMIRNYMTRKPYSQKKIKLNFENPQLLGGWDANKEKDYATIILRRNGLYYLAIMNKDSKKLLGKAMPSDGECYEKMVYKLLPGANKMLPKVFFAKSRMEDFKPSKELVEKYNNGTHKKGKNFCIQDCHNLIDYFKQSIDKHEDWSKFGFNFSETSTYEDLSGFYREVEQQGYKLSFARVSVSYINQLVEEGKMYLFQIYNKDFSEYSKGTPNMHTLYWKALFDERNLADVVYKLNGQAEMFYRKKSIENTHPTHPANHPILNKNKDNKKKESLFEYDLIKDRRYTVDKFMFHVPITMNFKSSGSENINQDVKAYLRYADDMHIIGIDRGERHLLYLVVIDLQGNIKEQFSLNEIVNDYNGNTYHTNYHDLLDVREDERLKARQSWQAIENIKELKEGYLSQVIHKITQLMVKYHAIVVLEDLNMGFMRGRQKVEKQVYQKFEKMLIEKLNYLVDKKVDVSVSGGLLNAYQLTSKFDSFQKLGKQSGFLFYIPAWNTSKIDPVTGFVNLLDTRYQNVEKAKCFFSKFDAIRYIEDKEWFEFNLDYDKFGKKAEGTRTKWTLCTRGMRIDTFRNKEKNSQWDNQEVDLTAEMKSLLEHYYIDIHGNLKDAISAQTDKAFFTGLLHILKLTLQMRNSITGTETDYLVSPVADENGIFYDSRSCGDQLPENADANGAYNIARKGLMLIEQIKNAEDLNNVKFDISNKAWLNFAQQKPYKNG

SEQ ID NO: 1531 - protein, 1246 aa, Unknown
  Description of Unknown: uncultivated organism sequence
  Category: MG75 effectors
  Description: MG75-17 effector
MMETFSDFTNLYPLSKTLRFRLIPVGKTLRHFIDSGILEEDQHRAESYVKVKAIIDDYHRSYIESSLSGFELPVESMGKSNSLEEYYLYHNIRNKTEDIQNALSKVRNNLRKQIVAQLTKNEMFKRIDKKELIQNDLIDFVKNEPDANEKIALISEFRNFTVYFKGFHENRKNMYSDEEKSTSIAFRLIHENLPKFIDNMEVFAKIQNTSISEKFDAIQKELCPDSVAFVDMFKLGYFNRTLSQKQIDAYNTVISGRTTAEGEKIKGLNEYINLYNQQHKQEKLPKMKLLFKQILSDRESASWLPEKLENDKQVVGALVDFWNTIHDTVLAEGGLKTVISLLVSYSLEGIFLKNDLQLTDVSQKATGSWSKIPTAIKQKLKAMNPQKKKESYEGYQERIDKIFKSYKSFSLAFINECLHGEYKIEDYFIKLGAINTDLLQKENHFSHILNTYTDIKEVIESYSESTDTKLIRDNGSIQKIKQFLDSVKDLQAYVKPLLGNGDETGKDERFYGDFVEYWNLLDLITPLYNMIRNYVTQKPYSVEKIKINFQNPTLLNGWDLNKETDNTSVILRRDDKYYLAIMTSKFRKVFLEYPSGSDRSCYEKMEYKLLPGANKMLPKVFFSKSRIQEFMPDERLLSNYEKGTHKKTGNCFSLTDCHALIDFFKKSLNKHEDWRNFGFKFSDTSTYTDMSGFYKEVENQGYKLSFKPIDAVYVDQLVDEGKIFLFQIYNKDFSEHSKGTPNMHTLYWKMLFDETNLGDVVYKLNGEAEVFFRKASIKVSSPTHPASVPIKKKNPKHMDEERILKYDLIKDKRYTVDQFQFHVPITMNFKSDGNGNINQKVVEYLRSASNIHIIGIDRGERNLLYLVVIDGSGKICEQFSLNEIKVEHNGETYSTNYHDLLDIKENERKQARQSWQSIANIKELKEGYLSQVIHKISELMVKYNAIVVLEDLNTGFMRGRQKVEKQVYQKFEKMLIEKLNYLVFKKQSLNLCGGLMHAYQLTNKFEGFNKLGKQSGFLFYIPAWNTSKMDPVTGFVNLFDLKYESIDKAKSFFSKFDSIRYNVERDMFEWKFNYDKFTKKAEGTKTNWTVCSYGNRIITFRNPNKNSQWDNKEINLTENIKLLFERFGIDLSSNLKDEIIQRTEKEFFIELISLFKLVLQMRNSWTGTDIDYLVSPVCNEKGEFFDSRNVDKALPQNADANGAYNIARKGLIFLDRIKESTSDKKLNCSITNKEWLLFVQNCCKNG

SEQ ID NO: 1532 - protein, 1270 aa, Unknown
  Description of Unknown: uncultivated organism sequence
  Category: MG75 effectors
  Description: MG75-18 effector
MNFEQFTHLYPLSKTLRFELRPVGATLARIKEGGFLENDNHRAESYKKVKKLIDEYHKHFIEQALGDFSLTENETEGSKCLNSYLETYIQLYRSSRIEDAEKKAFEKVQAEMRKFIAKTLKGSEAYKRLFKKELIKEDLPAFLRTHADKELVAEFKNFTTYFKGFYKNRKNMYSEEEKSTAISYRLVNENLPKFVDNMAAFAIIAQVPEVRAMLDVLQKDLGAELDGTTIDELFTLPFFNKVLTQKQIAVYNAVIGGKVSDSHSKEESHIKGINQIVDCYNQQHKDARLPKLKKLYKQILSDREALSWIPEKFDKDADLLKAIHDGYERLASDRALEKLRTLLESMADYQTEGIFITNDQQLTRISQKMFGEWSFISEAILCALKKEVSQKRNECDEKYEKRIDKMLKNHGGFSIRFIDDCVAAYVNTLDDEEQKKRFIPTVEAYFATLGAFDTEKGQTINFFSRIQNARVALRGLLDSAYPEGRSLIQDKENGALLKELLDAILALMHFIKPLLGKNENGKDERFYGELIQIWDEFDTFVPLYNMSRNYLTQKAYSEEKYKLNFENSQLLNGWDLNKEVANTSIILRKDGLFYLAIMNKKHNKLFTRELPTDGDCYDKMTYKFLSGYRDLPHVFFSKSRKAEFVPSEHIMDVYEKGAFKKGDTFNLQDCHDLIDFYKASILKHEDWRQFDFKFSETEQYDDISGFYREVEAQGYKVTFRQVSVSYIDRLVKEGKLYLFQIYNKDFSPYSKGTPNMHTLYWRALFDERNLSDVVYKLNGEAEVFYRKKSIEAHPTHPANRPIKNKNKLNDKEESLFAYDLIKDRRYSEDKFSLHVPITMNFKSVGGPNINDDVVEFLRTNENLHFIGIDRGERHLLYLTVIDSHGHILEQRTLNDVVNNYQGKDYHTDYHDLLKTRERQRQEERSSWKVIENIKDLKEGYLAQVVHQIAQLMVKYHAIVVLEDLNGGFMRERQKKAERSVYQQFEKKLIDKLNYLVDKKTDAHAPGGLMNAYQLANQVESSKNKSSRNKNFKSMGRQSGFIFYIPAWNTSNIDPVTGFTNLFDTRYKNAHDAQQFFSTFKSIRYNKTADRFEFRFSYSDFTRKAEGSRTDWTVCTYGTRIKTFRDPQKNNEWTSKEVVLTEEFKKFFAAYHVDIHSNLKDSIAAHGEKAFFKQLLALMRLTLQIRNSKSGTDIDYLLSPVADENGVFFDSRSCGNSLPQDADANGAYNIARKGLMLVRQMREAKDLKKFKADMTNRNWLKFVQEKPYLND

SEQ ID NO: 1533 - protein, 1121 aa, Unknown
  Description of Unknown: uncultivated organism sequence
  Category: MG75 effectors
  Description: MG75-19 effector
MVQFINTANLKQRLNLSKEEAKDLVQEFCGFTTYFGDFYQNRENMYSAEEKSTGIAYRLINENLPKFIDNMETFKKIAAIPEMEDNLKEIHDNLSEHLNVENIQDMFQLNYYNQLLTQKQIDVYNAIIGGKTDDEHKEKIKGINEYVNLYNQAHKDAKLPKLKTLFKQILSDRNAISWLPEEFDNDQETLNAIKDCYAHLSGNILKDENLKRLLCSLSEYDTKGIFLRNDSQLTSISKKMSGSWTDIPSAIKNDMKDGVPAKKRKESEEDYEKRIDNLFKKQDSFSIDYMDACLNKFVENNPYTIEGYFKELGAKDTQSEDIFKQIENAYTDVKPLLNSTYPKNKNLSQDKENVAKIKRFLDTLMSLVHFVKPLLGKGDERNKDEKFYGELSLLWTELETIVPLYNMVRNYMTRKPYSNSKIKLNFDNSQLLGGWDANKESDYSSILLYRDGKYYLAIFDKDSKKLLGKSMPSDGECYEKMVYKLLPGANKMLPKVFFAKSRIKDFKPSEQLLEKYNKGTHKKGKNFSISDCHALIDFFKQSINKHEDWKNFDFNFSETSTYEDLNSFYREVELQGYKITFTKVSASFIDKLVEEGKVYLFQIYNKDFSEYSKGTPNMHTLYWKALFDDRNLKDVVYKLNGQAEMFFRKKSINCNHPTHPANQPIQNKNKDNKKKESVFEYDLIKDHRYTVDKFMFHVPITMNFKSTNEKDINLHVREYLQTSNDTHIIGIDRGERHLLYLVVIDLHGNIVEQYTLNDIVNEYNGNTYRTNYHDLLDAREEDRLKQRQSWQTIENIKELKEGYLSQVIHKITQLMIKYHAIIVLEDLNIGFMRGRQKVEKQEYQKFEKMLIDKLNYLVDKKADIESTGGLLNAYQLTNKFASFKKLGKQSGFLFYIPAWNTSKIDPVTGFVNLLDTRYQNVDKAKAFFAKFDSIRYNKDKDWFEFALDYNNFGSKAEGTRTKWTLCTQGKRIKTSFNKMSSKWNNQEIDLTKDLKQLFVQYDIDINGNLKEAISKQTKYTFFVELMGLLKLTLQMRNSITGTETDYLVSPVADENGNFYDSRTCGPSLPENADANGAFNIARKGLMIIEQIKASDDLSKLKFDISNKSWLNFAQKKPYKHE

SEQ ID NO: 1534 - protein, 1235 aa, Unknown
  Description of Unknown: uncultivated organism sequence
  Category: MG75 effectors
  Description: MG75-20 effector
METFSGFTNLYPLSKTLRFRLIPVGETLKHFIGSGILEEDQHRAESYVKVKAIIDDYHRAYIENSLSGFELPLESTGKFNSLEEYYLYHNIRNKTEKNQKSLSTVRFNLRKQIVKQLTKNELYKRIYKQNLIKKDLIDFVKNEPDANEKIALISEFRNFTVYFKGFHENRRNMYLDEEKSTSIAFRLIHENLPKFIDNMEVFAKIQNTSISENFDVIQKELCPELVTLCEMFKLGYFNKTLSQKQINAYNTVIGELNKYLNHYNQQHKQEKLPKMKLLFKQILSDRESTSWLPERFANDGQVIGAIVNFWNTIHDTVLAEGGLKTIIASLGSYSLEGIFLKNDLQLTDVSQKATGSWSKITAAIKQKLEDMNPQTKKESYETYQGRIDKLFKFYKSFSLAFINECLRGEYKIEDYFLKLGAVNSSSLQKENHFSHILNTYTDVKEVIGFYSESTDTKLIRDNGSIQKIKLFLDAVKDLQAYVKPLLGNGDETGKDERFYGDLIEYWSQLDLITPLYNMVRNYVTQKPYSVDKIKLNFRNPTLLDGWDLNQETANTSVILRRDGKYYLAIMNNKSRKVFLKPSGTGKDCYEKMEYKLIPGAYKMLPKVFFAKSKINKFMPDEYLLSNYKKGTHKKNNANFDLDDCHTLIDFFKRSLNKHEDWKNFDFKFSDTSTYTDINNFYKEIDNQAYKLSFRPVPSDFVDKLVEEGKIFLFWIYNKDFSGHSKGTPNMHTLYWRMLFDERNLEDVVYSLNGGAEVFFRKASINVSHPTHPANIPIKKKNLKHKGEERILKYDLIKDKRYTIDQFQFHVPITMNFKVAGNGNININQKAIDYLRSASDTHIIGIDRGERNLLYLVVIDGNGKICEQFSLNEIEVEYNGEKYSTNYHDLLNVKENERKQARQSWQSIANIKDLKEGYLSQVIHKISELIVKYNAIVVLEDLNAGFMRGRQKVEKQVYQKFEKKLIEKLNYLVFKKQSSDLPGGLMHAYQLANKFESFNTLGKQSGFLFYIPAWNTSKMDPVTGFVNLFDVKYESVDKAKSFFSKFDSIRYNVERDMFEWKFNYGEFTKKAEGAKTDWTVCSYGNRIITFRNPDKNFQWDNKEINLTENIKLLFERFGIDLSSNLKDEIMERTEKEFFIELISLFKLVLQMRNSWTGTDIDYLVSPVCNENGEFFDSRNVDETLPQNADANGAYNIARKGMILLDKIKKNNGEKKLALSITNREWLSFAQGCCKNG

SEQ ID NO: 1535 - protein, 1245 aa, Unknown
  Description of Unknown: uncultivated organism sequence
  Category: MG75 effectors
  Description: MG75-21 effector
METFSGFTNLYPLSKTLRFRLIPVGETLKHFIDSGILEEDQHRAESYVKVKAIIDDYHRAYIENSLSGFELPLESTGKFNSLEEYYLYHNIRNKTEEIQNLSSKVRTNLRKQVVAQLTKNEIFKRIDKKELIQSDLIDFVKNEPDANEKIALISEFRNFTVYFKGFHENRRNMYSDEEKSTSIAFRLIHENLPKFIDNMEVFAKIQNTSISENFDAIQKELCPELVTLCEMFKLGYFNKTLSQKQIDAYNTVIGGKTTSEGKKIKGLNEYINLYNQQHKQEKLPKMKLLFKQILSDRESASWLPEKFENDSQVVGAMVNFWNTIHDTVLAEGGLKTIIASLGSYGLEGIFLKNDLQLTDISQKATGSWSKISSEIKQKIEVMNPQKKKESYETYQERIDKIFKSYKSFSLAFINECLRGEYKIEDYFLKLGAVNSSSLQKENHFSHILNAYTDVKEAIGFYSESTDTKLIQDNDSIQKIKQFLDAVKDLQAYVKPLLGNGDETGKDERFYGDLIEYWSLLDLITPLYNMVRNYVTQKPYSIDKIKINFQNPTLLNGWDLNKETDNTSVILRRDGKYYLAIMNNKSRKVFLKYPSGTDRNCYEKMEYKLLPGANKMLPKVFFSKSRINEFMPNERLLSNYEKGTHKKSGTCFSLDDCHTLIDFFKKSLDKHEDWKNFGFKFSDTSTYEDMSGFYKEVENQGYKLSFKPIDATYVDQLVDEGKIFLFQIYNKDFSEHSKGTPNMHTLYWKMLFDETNLGDVVYKLNGEAEVFFRKASINVSHPTHPANIPIKKKNLKHKDEERILKYDLIKDKRYTVDQFQFHVPITMNFKADGNGNINQKAIDYLRSASDTHIIGIDRGERNLLYLVVIDGNGKICEQFSLNEIEVEYNGEKYSTNYHDLLNVKENERKQARQSWQSIANIKDLKEGYLSQVIHKISELMVKYNAIVVLEDLNAGFMRGRQKVEKQVYQKFEKKLIEKLNYLVFKKQSSDLPGGLMHAYQLANKFESFNALGKQSGFLFYIPAWNTSKMDPVTGFVNLFDVKYESVDKAKSFFSKFDSMRYNVERDMFEWKFNYGEFTKKAEGTKTDWTVCSYGNRIITFRNPDKNSQWDNKEINLTENIKLLFERFGIDLSSNLKDEIMQRTEKEFFIELISLFKLVLQMRNSWTGTDIDYLVSPVCNENGEFFDSRNVDETLPQNADANGAYNIARKGMILLDKIKKSNGEKKLALSITNREWLSFAQGCCKNG

SEQ ID NO: 1536 - protein, 1245 aa, Unknown
  Description of Unknown: uncultivated organism sequence
  Category: MG75 effectors
  Description: MG75-22 effector
METFSGFTNLYPLSKTLRFRLIPVGETLKHFIDSGILEEDQHRAESYVKVKAIIDDYHRAYIENSLSGFELPLESTGKFNSLEEYYLYHNIRNKTEEIQDLSSKVRTNLRKQVVVQLTKNEIFKRIDKKELIQSDLIDFVKNEPDANEKIALISEFRNFTVYFKGFHENRRNMYSDEEKSTSIAFRLIHENLPKFIDNMEVFAKIQNTSISENFDAIQKELCPELVTLCEMFKLGYFNKTLSQKQIDAYNTVIGGKTTSEGKKIKGLNEYINLYNQQHKQEKLPKMKLLFKQILSDRESASWLPEKFENDSQVVGAMVNFWNTIHDTVLAEGGLKTIIASLGSYGLEGIFLKNDLQLTDISQKATGSWSKISSEIKQKIEVMNPQKKKESYESYQERIDKLFKSYKSFSLAFINECLRGEYKIEDYFLKLGAVNSSSLQKENHFSHILNAYTDVKEAIGFYSESTDTKLIQDNDSIQKIKQFLDAVKDLQAYVKPLLGNGDETGKDERFYGDLIEYWSLLDLITPLYNMVRNYVTQKPYSVDKIKINFQNPTLLNGWDLNKETDNTSVILRRDGKYYLAIMNNKSRKVFLKYPSGTDGNCYEKMEYKLLPGANKMLPKVFFSKSRINEFMPNERLLSNYEKGTHKKSGICFSLDDCHTLIDFFKKSLDKHEDWKNFGFKFSDTSTYEDMSGFYKEVENQGYKLSFKPIDATYVDQLVDEGKIFLFQIYNKDFSEHSKGTPNMHTLYWKMLFDETNLGDVVYKLNGEAEVFFRKASINVSHPTHPANIPIKKKNLKHKDEERILKYDLIKDKRYTVDQFQFHVPITMNFKADGNGNINQKAIDYLCSASDTHIIGIDRGERNLLYLVVIDGNGKICEQFSLNEIEVEYNGEKYSTNYHDLLNVKENERKQARQSWQSIANIKDLKEGYLSQVIHKISELMVKYNAIVVLEDLNAGFMRGRQKVEKQVYQKFEKKLIEKLNYLVFKKQSSDLPGGLMHAYQLANKFESFNALGKQSGFLFYIPAWNTSKMDPVTGFVNLFDVKYESVDKAKSFFSKFDSMRYNVERDMFEWKFNYGEFTKKAEGTKTDWTVCSYGNRIITFRNPDKNSQWDNKEINLTENIKLLFERFGIDLSSNLKDEIMQRTEKEFFIELISLFKLVLQMRNSWTGTDIDYLVSPVCNENGEFFDSRNVDETLPQNADANGAYNIARKGMILLDKIKKSNGEKKLALSITNREWLSFAQGCCKNG

SEQ ID NO: 1537 - protein, 1264 aa, Unknown
  Description of Unknown: uncultivated organism sequence
  Category: MG75 effectors
  Description: MG75-23 effector
MNFEQFTHLYPLSKTLRFELRPVGATLAKIKEGGFLENDNHRAESYKKVKKLIDEYHKHFIEQALGDFSLTKNETEGSKCLNSYLETYIQLYRSSRIEDAEKKAFEKVQAEMRKFIAKTLKGSEAYKRLFKQELIKEDLTAFLRTHGGTVADEELVAEFKNFTTYFTGLYENRENMYSEEEKSTAISYRLVNENLPKFVDNMAAFAIIAQVPEVRAMLDVMQKDLGAELDGTTIDELFTLPFFNKVLTQKQIAVYNAVIGGKVSDSHSKGESHIKGINQIVNLYNQQHKDARLPKLKMLYKQILSDREALSWLPEKFDKDADLLKAIHDGYERLASDGVLENLRTLLESMADYQAEGIFITNDQQLTRISQKMFGEWSFISEAILCALKKDVPQKRNECDEKYEERIDKMLKNHGGFSIRFIDDCVAAYVNTLDDEEQKKRFIPTVEAYFATLGAFDTEEEQTINFFSRIQNARDALQGLLDSAYPEGRALIQDKENGALLKELLDAILALMHFVKPLLGKNENGKDERFYGELMQIWDEFDSFVPLYNMSRNYLTQKPYSEEKYKLNFENSQLLKGWDLNKEADNTSIILRKDGLFYLAIMNKKHNKLFTRELPTDGDCYDKMDYKLLPGPNKMFPKVFFSKSRKAEFAPSEHIMDVYKKGSFKKGDTFNLQDCHDLIDFFKASILKHEDWRQFEFKFSETEQYDDISGFYREVEAQGYKVTFRQVSVSYIDRLVNEGKLYLFQIYNKDFSSYSKGTPNMHTLYWRALFDERNLSDVVYKLNGEAEVFYRKKSIEAHPTHPANRPIKNKNKLNDKEKSLFAYDLIKDRRYSEDKFSLHVPITMNFKSVGGPNINDDVVEFLRTNENLHFIGIDRGERHLLYLTVIDSHGHILEQRTLNDVVNNYQGKDYHTDYHDLLETRERQRQEARSSWKAIENIKDLKEGYLAQVVHQIAQLMVKYHAIVVLEDLNGGFMRGRQKVERSVYQQFEKKLIDKLNYLVDKKTDAHAPGGLMNAYQLANQFKSFKSMGRQSGFIFYIPAWNTSKIDPVTGFTNLFDTRYKNVHDAQQFFSAFKSIRYNETADRFEFKFSYSDFTRKAEGSRTDWTVCTYGTRIKTFRDPQKNNEWTSKEVVLTEEFKKFFAAYHVDIHSNLKDSIAAHDEKAFFEQLLALMRLTLQIRNSKSGTDVDYLLSPVADENGVFFDSRSCGNSLPQDADANGAYNIARKGLMLVRQMREAKDLKKFKADMTNRNWLKFAQEKPYLND

SEQ ID NO: 1538 - protein, 1274 aa, Unknown
  Description of Unknown: uncultivated organism sequence
  Category: MG75 effectors
  Description: MG75-24 effector
MAKNFEDFKRLYSLSKTLRFEAKPIGATLDNIVKSGLLDEDEHRAASYVKVKKLIDEYHKVFIDRVLDDGCLPLENKGNNNSLAEYYESYVSRAQDEDAKKKFKEIQQNLRSVIAKKLTEDKAYANLFGNKLIESYKDKEDKKKIIDSDLIQFINTAESTQLDSMSQDEAKELVKEFWGFVTYFYGFFDNRKNMYTAEEKSTGIAYRLVNENLPKFIDNIEAFNRAITRPEIQENMGVLYSDFSEYLNVESIQEMFQLDYYNMLLTQKQIDVYNAIIGGKTDDEHDVKIKGINEYINLYNQKHKDDKLPKLKSLFKQILSDRNAISWLPEEFNSDQEVLNAIKDCYERLSENVLGDKVLKSMLGSLADYSLDGIFIRNDLQLTDISQKMFGNWSVIQNAIMQNIKHVAPARKHKESEEEYENRIAGIFKKADSFSISYIDACLNETDPNNAYFVENYFATLGAVDTPTMQRENLFALVQNAYTEITALLHSDYPTEKNLAQDKANVAKIKALLDAIKSLQHFVKPLLGKGDESDKDERFYGELASLWAELDTMTPLYNMIRNYMTRKPYSQKKIKLNFENPQLLGGWDANKEKDYATIILRRNGLYYLAIMNKDSKKLLGKAMPSDGECYEKMVYKLLPGANKMLPKVFFAKSRMEDFKPSKELVEKYNNGTHKKGKNFNIQDCHNLIDYFKQSIDKHEDWSKFGFKFSDTSTYEDLSGFYREAEQQGYKLSFARVSVSYINQLVEEGKMYLFQIYNKDFSEYSKGTPNMHTLYWKALFDERNLADVVYKLNGQAEMFYRKKSIENTHPTHPANHPILNKNKDNNKKESLFEYDLIKDRRYTVDKFMFHVPITMNFKSSGSENINQDVKAYLCHADDMHIIGIDRGERHLLYLVVIDLQGNIKEQFSLNEIVNDYNGNTYHTNYHDLLDVREDERLKARQSWQTIENIKELKEGYLSQVIHKITQLMVKYHAIVVLEDLNMGFMRGRQKVEKQVYQKFEKMLIEKLNYLVDKKADASVSGGLLNAYQLTSKFDSFQKLGKQSGFLFYIPAWNTSKIDPVTGFVNLLDTRYQNVEKAKSFFSKFDAIRYNKDKEWFEFNLDYDKFGKKAEGTRTKWTLCTRGMRIDTFRNKEKNSQWDNQEVDLTAEMKSLLEHYYIDIHGNLKDAISAQTDKAFFTGLLHILKLTLQMRNSITGTETDYLVSPVADENGIFYDSRSCGNQLPENADANGAYNIARKGLMLIEQIKNAEDLNNVKFDISNKAWLNFAQQKPYKNG

SEQ ID NO: 1539 - protein, 1274 aa, Unknown
  Description of Unknown: uncultivated organism sequence
  Category: MG75 effectors
  Description: MG75-25 effector
MAKNFEDFKRLYPLSKTLRFEAKPIGATLDNIIKSGLLDEDEHRAASYVKMKKLIDEYHKVFIDRVLDNGCLPLEDKGDNNSLAEYYESYVSKAQDEDAIKKFKEIQQNLCSIIAKKLTDDKAYANLFGNKLIESYKDKADKTKIIDSDLIQFINTAESTQLVSMSQDEAKELVKEFWGFTTYFEGFFKNRKNMYTPEEKSTGIAYRLINENLPKFIDNMEAFKKAIARPEIQANMEELYSDFSEYLNVESIQEMFQLDYYNMLLTQKQIDVYNAIIGGKTDDEHDVKIKGINEYINLYNQQHKDDKLPKLKALFKQILSDRNAISWLPEEFNSDQEVLNAIKDCYERLAENVLGDKVLKSLLCSLSDYTLDGIFIRNDLQLTDISQKMFGNWGVIQNAIMQNIKRVAPARKHKESEEDYEKRIAGIFKKADSFSISYINDCLNEADPNNAYFVENYFATFGAVNTPTMQRENLFALVQNAYTEVASLLHSDYPTAKHLAQDKANVAKIKALLDAIKSLQHFVKPLLGKGDESDKDERFYGELASLWAELDTVTPLYNMIRNYITRKPYSQKKIKLNFENPQLLGGWDANKEKDYATIILRRNGLYYLAIMNKESKKLLGKAMPSDGECYEKMVYKLLPGANKMLPKVFFAKSRMEDFKPSKELVEKYNNGTHKKGKNFNIQDCHNLIDYFKQSISKHEDWGKFGFNFSDTSTYEDLSGFYREVEQQGYKLSFARVSVSYINQLVEEGKMYLFQIYNKDFSEYSKGTPNMHTLYWKALFDERNLADVVYKLNGQAEMFYRKKSIENTHPTHPANHPILNKNKDNKKKESLFEYDLIKDRRYTVDKFMFHVPITMNFKSVGSENINQGVKEYLHHADDMHIIGIDRGERHLLYLVVIDLQGNIKEQYSLNEIVNEYNGNTYHTNYHDLLDVREDERLKARQSWQTIENIKELKEGYLSQVIHKITQLMVKYHAIVVLEDLNMGFMRGRQKVEKQVYQKFEKMLIDKLNYLVDKKADASVSGGWLNAYQLTSKFDSFQKLGKQSGFLFYIPAWNTSKIDPVTGFVNLLDARYQNVEKAKAFFSKFDAIRYNKDKDWFEFNLDYDKFGKKAEGTRTKWTLCTRGMRIDTFRNKEKNSQWDNQEVDLTAEMKSLLEHYYIDIHGNLKDAISAQTDKAFFTGLLHILKLTLQMRNSITGTETDYLVSPVADENGIFYDSRSCGEELPENADANGAYNIARKGLMLIEQIKGAEDLGNLKFDMSNKAWLNFAQKKPYKNG

SEQ ID NO: 1540 - protein, 1274 aa, Unknown
  Description of Unknown: uncultivated organism sequence
  Category: MG75 effectors
  Description: MG75-26 effector
MAKNFEDFKRLYPLSKTLRFEAKPIGATLDNIIKSGLLDEDEHRAASYVKMKKLIDEYHKVFIDRVLDNGCLPLKNEGQNNSLTEYYESYVSKSQNEDAKKAFEENQQNLRSIVAKKLTDDKAYANLFGKNLIESYKDKEDKKKIIDSDLIQFICTAEATQLDSMSQDEAKEIVKEFWGFTTYFVGFFDNRKNMYTAEEKSTGIAYRLINENLPKFIDNMEAFKKAIARPEIQANMEELYSNFSEYLNVESIQEMFLLDYYNMLLTQKQIDVYNAIIGGKTDDEHDVKIKGINEYINLYNQQHKDDKLPKLKALFKQILSDRNAISWLPEEFNSDQEVLNAIKDCYERLSENVLGDKVLKSLLGSLSDYTLDGIFIRNDLQLTDISQKMFGNWGVIQNAIMQNIKRVAPARKHKESEEDYEKRIAGIFKKADSFSISYINDCLNEADPNNAYFVENYFATFGAVNTPTMQRENLFALVQNAYTEVASLLHSDYPTAKHLAQDKANVAKIKALLDAIKSLQHFVKPLLGKGDESDKDERFYGELASLWAELDTVTPLYNMIRNYITRKPYSQKKIKLNFENPQLLGGWDANKEKDYATIILRRNGLYYLAIMNKDSKKLLGKAMPSDGECYEKMVYKLLPGANKMLPKVFFAKSRMEDFKPSKELVEKYNNGTHKKGKNFNIQDCHNLIDYFKQSINKHEDWGKFGFNFSDTSTYEDLSGFYREVEQQGYKLSFARVSVSYINQLVEEGKMYLFQIYNKDFSEYSKGTPNMHTLYWKALFDERNLADVVYKLNGQAEMFYRKKSIENTHPTHPANHPILNKNKDNKKKESLFDYDLIKDRRYTVDKFMFHVPITMNFKSSGSENINQDVKAYLRHADDMHIIGIDRGERHLLYLVVIDLQGNIKEQYSLNEIVNEYNGNTYHTNYHDLLDVREEERLKARQSWQTIENIKELKEGYLSQVIHKITQLMVKYHAIVVLEDLNMGFMRGRQKVEKQVYQKFEKMLIDKLNYLVDKKADASVSGGWLNAYQLTSKFDSFQKLGKQSGFLFYIPAWNTSKIDPVTGFVNLLDARYQNVEKAKAFFSKFDAIRYNKDKDWFEFNLDYDKFGKKAEGTRTKWTLCTRGMRIDTFRNKEKNSQWDNQEVDLTAEMKSLLEHYYIDIHGNLKDAISAQTDKAFFTGLLHILKLTLQMRNSITGTETDYLVSPVADENGIFYDSRSCGEELPENADANGAYNIARKGLMLIEQIKGAEDLGNLKFDISNKAWLNFAQQKPYKNG

SEQ ID NO: 1541 - protein, 1274 aa, Unknown
  Description of Unknown: uncultivated organism sequence
  Category: MG75 effectors
  Description: MG75-27 effector
MAKNFEDFKRLYPLSKTLRFEAKPIGATLDNIIKSGLLDEDEHRAASYVKMKKLIDEYHKVFIDRVLDNGCLPLEDKGDNNSLAEYYESYVSKAQDEDAIKKFKEIQQNLCSIIAKKLTDDKAYANLFGNKLIESYKDKADKTKIIDSDLIQFINTAESTQLVSMSQDEAKELVKEFWGFTTYFEGFFKNRKNMYTPEEKSTGIAYRLINENLPKFIDNMEAFKKAITRPEIQANMEELYSDFSEYLNVESIQEMFQLDYYNMLLTQKQIDVYNAIIGGKTDDEHDVKIKGINEYINLYNQQHKDDKLPKLKALFKQILSDRNAISWLPEEFNSDQEVLNAIKDCYERLAENVLGDKVLKSLLGSLADYSLDGIFIRNDLQLTDISQKMFGNWGVIQNAIMQNIKHVAPARKHKESEEDYEKRIAGIFKKADSFSISYINDCLNEADPNNAYFVENYFATFGAVNTPTMQRENLFALIQNAYTEVAALLHSDYPTAKHLAQDKANVAKIKALLDAIKSLQHFVKPLLGKGDESDKDERFYGELASLWAELDMVTPLYNMIRNYMTRKPYSQKKIKLNFENPQLLGGWDANKEKDYATIILRRDGLYYLAIMNKESKKLLGKAMPSDGECYEKMVYKLLPGANKMLPKVFFAKSRMEDFKPSKELVEKYNNGTHKKGKNFNIQDCHNLIDYFKQSISKHEDWGKFGFNFSDTSTYEDLSGFYREVEQQGYKLSFARVSVSYISQLVEEGKMYLFQIYNKDFSEYSKGTPNMHTLYWKALFDERNLADVVYKLNGQAEMFYRKKSIENTHPTHPANHPILNKNKDNKKKESLFDYDLIKDRRYTVDKFMFHVPITMNFKSSGSENINQNVKTYLRHADDMHIIGIDRGERHLLYLVVIDLQGNIKEQYSLNEIVNEYNGNTYHTNYHDLLDVREEERLKARQSWQTIENIKELKEGYLSQVIHKITQLMVKYHAIVVLEDLNMGFMRGRQKVEKQVYQKFEKMLIDKLNYLVDKKADASVSGGLLNAYQLTSKFDSFQKLGKQSGFLFYIPAWNTSKIDPVTGFVNLLDTRYQNVEKAKVFFSKFDAIRYNKDKDWFEFNLDYDKFGKKAEGTRTKWTLCTRGMRIDTFRNKEKNSQWDNQEVDLTAEMKSLLEHYYIDIHGNLKDAISAQTDKAFFTGLLHILKLTLQMRNSITGTETDYLVSPVADENGIFYDSRSCGEELPENADANGAYNIARKGLMLIEQIKGAEDLGNLKFDISNKAWLNFAQKKPYKNG

SEQ ID NO: 1542 - protein, 1274 aa, Unknown
  Description of Unknown: uncultivated organism sequence
  Category: MG75 effectors
  Description: MG75-28 effector
MAKNFEDFKRLYPLSKTLRFEAKPIGATLDNIVKSGLLDEDEHRAASYVKVKKLIDEYHKVFIDRVLDNGCLPLEDKGDNNSLAEYYDSYVSKSQNEDAKKAFKEIQQNLRSIIAKKLTDDKAYANLFSNKLIESYKDKADKTKIIDSDLIQFIHTAESTQLDSMSQDEAKELVKEFWGFTTYFVGFFDNRKNMYTAEEKSTGIAYRLINENLPKFIDNMEAFKKAIARPEIQANMEELYSIFSEYLNVESIQEMFLLDYYNMLLTQKQIDVYNAIIGGKTDEEHDVKIKGINEYINLYNQQHKDDKLPKLKALFKQILSDRNAISWLPEEFNSDQEVLNAIKDCYERLAENVLGDKVLKSLLGSLADYSLDGIFIRNDLQLTDISQKMFGNWGVIQNAIMQNIKHVAPARKHKESEEDYEKRIAGIFKKADSFSISYINDCLNEADPNNAYFVENYFATFGAINTPTMQRENLFALVQNAYTEVAVLLHSDYPTAKQLAQDKANVSKIKALLDAIKSLQHFVKPLLGKGDESDKDERFYGDLASLWAELDTVTPLYNMIRNYMTRKPYSQKKIKLNFENPQLLGGWDANKEKDYATIILRRNGLYYLAIMNKESKKLLGKSMPSDGECYEKMVYKLLPGANKMLPKVFFAKSRMDDFKPSKELIEKYNNGTHKKGKNFDIQDCHNLIDYFKQSIDKHEDWSKFGFNFSDTSTYEDLSGFYREVEQQGYKLSFARVSVSYINQLVEEGKMYLFQIYNKDFSEYSKGTPNMHTLYWKALFDERNLADVVYKLNGQAEMFYRKKSIENTHPTHPANHPILNKNKDNKKKESLFDYDLIKDRRYTVDKFMFHVPITMNFKSSGSENINQDVKAYLRHADDMHIIGIDRGERHLLYLVVIDLQGNIKEQFSLNEIVNDYNGNTYHTNYHDLLDVREDERLKARQSWQTIENIKELKEGYLSQVIHKITQLMVKYHAIVVLEDLNMGFMRGRQKVEKQVYQKFEKMLIDKLNYLVDKKADVSVSGGLLNAYQLTSKFDSFQKMGKQSGFLFYIPAWNTSKIDPITGFVNLLDTRYQNVEKAKVFFSKFDAIRYNKDKDWFEFNLDYDKFGKKAEGTRTKWALCTRGMRIDTFRNKEKNSQWDNQEVDLTAEMKSLLEHYYIDIHGNLKDAISAQTDKAFFTGLLHILKLTLQMRNSIIGTETDYLVSPVADENGIFYDSSSCGDELPENADANGAYNIARKGLMMIEQIKDAKDLDNLKFDISNKSWLNFAQQKPYKNG

SEQ ID NO: 1543 - protein, 1274 aa, Unknown
  Description of Unknown: uncultivated organism sequence
  Category: MG75 effectors
  Description: MG75-29 effector
MAKNFEDFKRLYPLSKTLRFEAKPIGATLDNIIKSGLLDEDEHRAASYVKMKKLIDEYHKVFIDRVLDNGCLPLKNEGQNNSLTEYYESYVSKSQNEDAKKAFEENQQNLRSIVAKKLTDDKAYANLFGKNLIESYKDKEDKKKIIDSDLIQFICTAEATQLDSMSQDEAKEIVKEFWGFTTYFVGFFDNRKNMYTAEEKSTGIAYRLINENLPKFIDNMEAFKKAIARPEIQANMEELYSNFSEYLNVESIQEMFLLDYYNMLLTQKQIDVYNAIIGGKTDDEHDVKIKGINEYINLYNQQHKDDKLPKLKALFKQILSDRNAISWLPEEFNSDQEVLNAIKDCYERLSENVLGDKVLKSLLGSLSDYTLDGIFIRNDLQLTDISQKMFGNWGVIQNAIMQNIKRVAPARKHKESEEDYEKRIAGIFKKADSFSISYINDCLNEADPNNAYFVENYFATFGAVNTPTMQRENLFALVQNAYTEVASLLHSDYPTAKHLAQDKANVAKIKALLDAIKSLQHFVKPLLGKGDESDKDERLYGELASLWAELDTVTPLYNMIRNYITRKPYSQKKIKLNFENPQLLGGWDANKEKDYATIILRRNGLYYLAIMNKESKKLLGKAMPSDGECYEKMVYKLLPGANKMLPKVFFAKSRMEDFKPSKELVEKYNNGTHKKGKNFNIQDCHNLIDYFKQSINKHEDWGKFGFNFSDTSTYEDLSGFYREVEQQGYKLSFARVSVSYINQLVEEGKMYLFQIYNKDFSEYSKGAPNMHTLYWKALFDERNLADVVYKLNGQAEMFYRKKSIENTHPTHPANHPILNKNKDNKKKESLFDYDLIKDRRYTVDKFMFHVPITMNFKSSGSENINQDVKAYLRHADDMHIIGIDRGERHLLYLVVIDLQGNIKEQYSLNEIVNEYNGNTYHTNYHDLLDVREEERLKARQSWQTIENIKELKEGYLSQVIHKITQLMVKYHAIVVLEDLNMGFMRGRQKVEKQVYQKFEKMLIDKLNYLVDKKADASVSGGWLNAYQLTSKFDSFQKLGKQSGFLFYIPAWNTSKIDPVTGFVNLLDARYQNVEKAKAFFSKFDAIRYNKDKDWFEFNLDYDKFGKKAEGTRTKWTLCTRGMRIDTFRNKEKNSQWDNQEVDLTAEMKSLLEHYYIDIHGNLKDAISTQTDKAFFTGLLHILKLTLQMRNSITGTETDYLVSPVADENGIFYDSRSCGEELPENADANGAYNIARKGLMLIEQIKGAEDLGNLKFDISNKAWLNFAQQKPYKNG

SEQ ID NO: 1544 - protein, 1245 aa, Unknown
  Description of Unknown: uncultivated organism sequence
  Category: MG75 effectors
  Description: MG75-30 effector
METFSGFTNLYPLSKTLRFRLIPVGETLKYFIGSGILEEDQHRAESYVKVKAIIDDYHRAYIENSLSGFELPLESTGKSNSLEEYYLYHNIRNKTEEIQNLSSKVRTNLRKQVVAQLTKNEIFKRIDKKELIQSDLIDFVKNEPDANEKIALISEFRNFTVYFKGFHENRRNMYSDEEKSTSIAFRLIHENLPKFIDNMEVFAKIQNTSISENFDAIQKELCPELVTLCEMFKLGYFNKTLSQKQIDAYNTVIGGKTTSEGKKIKGLNEYINLYNQQHKQEKLPKMKLLFKQILSDRESASWLPEKFENDSQVVGAIVNFWNTIHDTVLAEGGLKTIIASLGSYGLEGIFLKNDLQLTDISQKATGSWGKISSEIKQKIEVMNPQKKKESYETYQERIDKIFKSYKSFSLAFINECLRGEYKIEDYFLKLGAVNSSSLQKENHFSHILNTYTDVKEVIGLYSESTDTKLIQDNDSIQKIKQFLDAVKDLQAYVKPLLGNGDETGKDERFYGDLIEYWSLLDLITPLYNMVRNYVTQKPYSVDKIKINFQNPTLLNGWDLNKETDNTSVILRRDGKYYLAIMNNKSRKVFLKYPSGTDRNCYEKMEYKLLPGANKMLPKVFFSKSRINEFMPNERLLSNYEKGTHKKSGTCFSLDDCHTLIDFFKKSLDKHEDWKNFGFKFSDTSTYEDMSGFYKEVENQGYKLSFKPIDATYVDQLVDEGKIFLFQIYNKDFSEHSKGTPNMHTLYWKMLFDETNLGDVVYKLNGEAEVFFRKASINVSHPTHPANIPIKKKNLKHKDEERILKYDLIKDKRYTVDQFQFHVPITMNFKADGNGNINQKAIDYLRSASDTHIIGIDRGERNLLYLVVIDGNGKICEQFSLNEIEVEYNGEKYSTNYHDLLNVKENERKQARQSWQSIANIKDLKEGYLSQVIHKISELMVKYNAIVVLEDLNAGFMRGRQKVEKQVYQKFEKKLIEKLNYLVFKKQSSDLPGGLMHAYQLANKFESFNTLGKQSGFLFYIPAWNTSKMDPVTGFVNLFDVKYESVDKAKSFFSKFDSIRYNVERDMFEWKFNYGEFTKKAEGTKTDWTVCSYGNRIITFRNPDKNSQWDNKEINLTENIKLLFERFGIDLSSNLKDEIMQRTEKEFFIELISLFKLVLQMRNSWTGTDIDYLVSPVCNENGEFFDSRNVDETLPQNADANGAYNIARKGMILLDKIKKSNGEKKLALSITNREWLSFAQGCCKNG

SEQ ID NO: 1545 - protein, 1274 aa, Unknown
  Description of Unknown: uncultivated organism sequence
  Category: MG75 effectors
  Description: MG75-31 effector
MAKNFEDFKRLYPLSKTLRFEAKPIGATLDNIIKSGLLDEDEHRAASYVKMKKLIDEYHKVFIDRVLDNGCLPLKNEGQNNSLTEYYESYVSKSQNEDAKKAFEENQQNLRSIVAKKLTDDKAYANLFGKNLIESYKDKEDKKKIIDSDLIQFICTAEATQLDSMSQDETKEIVKEFWGFTTYFVGFFDNRKNMYTAEEKSTGIAYRLINENLPKFIDNMEAFKKAIARPEIQANMEELYSNFSEYLNVESIQEMFLLDYYNMLLTQKQIDVYNAIIGGKTDDEHDVKIKGINEYINLYNQQHKDDKLPKLKALFKQILSDRNAISWLPEEFNSDQEVLNAIKDCYERLSENVLGDKVLKSLLGSLSDYTLDGIFIRNDLQLTDISQKMFGNWGVIQNAIMQNIKRVAPARKHKESEEDYEKRIAGIFKKADSFSISYINDCLNEADPNNAYFVENYFATFGAVNTPTMQRENLFALVQNAYTEVASLLHSDYPTAKHLAQDKANVAKIKALLDAIKSLQHFVKPLLGKGDESDKDERFYGELASLWAELDTVTPLYNMIRNYITRKPYSQKKIKLNFENPQLLGGWDANKEKDYATIILRRNGLYYLAIMNKESKKLLGKAMPSDGECYEKMVYKLLPGANKMLPKVFFAKSRMEDFKPSKELVEKYNNGTHKKGKNFNIQDCHNLIDYFKQSINKHEDWGKFGFNFSDTSTYEDLSGFYREVEQQGYKLSFARVSVSYINQLVEEGKMYLFQIYNKDFSEYSKGTPNMHTLYWKALFDERNLADVVYKLNGQAEMFYRKKSIENTHPTHPANHPILNKNKDNKKKESLFDYDLIKDRRYTVDKFMFHVPITMNFKSSGSENINQDVKAYLRHADDMHIIGIDRGERHLLYLVVIDLQGNIKEQYSLNEIVNEYNGNTYHTNYHDLLDVREEERLKARQSWQTIENIKELKEGYLSQVIHKITQLMVKYHAIVVLEDLNMGFMRGRQKVEKQVYQKFEKMLIDKLNYLVDKKADASVSGGWLNAYQLTSKFDSFQKLGKQSGFLFYIPAWNTSKIDPVTGFVNLLDARYQNVEKAKAFFSKFDAIRYNKDKDWFEFNLDYDKFGKKAEGTRTKWTLCTRGMRIDTFRNKEKNSQWDNQEVDLTAEMKSLLEHYYIDIHGNLKDAISAQTDKAFFTGLLHILKLTLQMRNSITGTETDYLVSPVADENGIFYDSRSCGEELPENADANGAYNIARKGLMLIEQIKGAEDLGNLKFDISNKAWLNFAQQKPYKNG

SEQ ID NO: 1546 - protein, 1252 aa, Unknown
  Description of Unknown: uncultivated organism sequence
  Category: MG75 effectors
  Description: MG75-32 effector
MKFEDFTGLYPVSKTLRFEAKPVGATLENVIKSGVLEDDAHRARSYKKVKKLIDEYHKVFIDSVMSKFKFKEEILEEICSLYAAKSMDDKSKDRFVKLQGEMRKDVSVAFASDDRYKTINKKELVKEDLFEFVSHADNGQLAGLTKEEAEELILEFKDFTTYFSGFHKNRSNMYVADEKTTSVAYRLVNENLPRFLYNVSVFQKVVSVPEFENKIRAIYDSFREYLCVDNLASMFETSYYNDVLSQMQIDIYNSVIGGKTDKDSSTKIQGLNECINLYNQTHRNDKLPKFKILYKQIRSDRVAMSWLPDEFSDDKETLEAIRNCYDSLTDHILGERDLKTLLESLGQYDMSGVFIANGPYLADISQKLYGDWRAIEKAIRKQEAVNSPKKAKETEEEYFNRITKHIHNYDSFSIEYLNFCITESYPNDGRRVEDYFATLGAVNTDTSQRENLFSRIDNAYTNVSGLLSSEYPETKKLSQDTENVEKIKDLLDSIKELQRFVKPLMGNGDESDNDKRFYGELSPLWDELETFSLLYDKVRNYVTRKPYSQNKIKLNFNNATLFAGWDQNKEKDNACIILRRGGMYYLGIMNKSYRIVFENNFPCDGDCYEKMVYKLLPGANKMLPKVFFSKSRIREFNPSDRILKNYEEGTHKKGPKFKLEDCHELIDFFKASINLHEDWKKFKFKFSDTSSYEDISDFYKEVEQQGYKITFVNVSVSYIDSLVNDGKLYLFQLYNKDFSQYSKGVPNMHTLYWKALFDKANLADVVYKLNGEAELFFRKKSIDMERPTHRANISVANKNIHNIKKESIFKYDLTKDRRYTVDKFLFHVPITMNFKSEGNIAIEQQVRSYLQSAEDTHVIGIDRGERHLLYVSVIDRRGLIKEQFSLNEIINEHNGSTYATNYHDLLDAKESERRKARQSWQTIENIKDLKEGYLSQAVHKIAQLMVKYHAVVVLEDLNVGFMRGRQKVEKQVYQKFEKMLTDKLNYLVDKKLNANDPGGVFHAYQLSSVFKSAEKRGKQSGFIFYIPAWNTSKIDPVTGFVNLFDLKYENIDKAKSFFSKFQIIRYNSERDWFEFIFDYDSFNSKASGTKVGWTLTTHGDRILSFRNSEKNNQWDSRAVILTDEYKALFDKYGIDYNDNLKEAITNQTEKAFFEDLLKCLRLTLQMRNSVIGTDTDFLISPVADNNGVFYDSRICADSLPKNADANGAYNIARKGLMLIDQIKKASDVRNIKFDIANKSWLDFAQKKPYLDE

SEQ ID NO: 1547 - protein, 1274 aa, Unknown
  Description of Unknown: uncultivated organism sequence
  Category: MG75 effectors
  Description: MG75-33 effector
MAKNFEDFKRLYPLSKTLRFEAKPIGATLDNIIKSGLLDEDEHRAASYVKMKKLIDEYHKVFIDRVLDNGCLPLEDKGDNNSLAEYYESYVSKAQDEDAIKKFKEIQQNLCSIIAKKLTDDKAYANLFGNKLIESYKDKADKTKIIDSDLIQFINTAESTQLVSMSQDEAKELVKEFWGFTTYFEGFFKNRKNMYTPEEKSTGIAYRLINENLPKFIDNMEAFKKAITRPEIQANMEELYSDFSEYLNVESIQEMFQLDYYNMLLTQKQIDVYNAIIGGKTDDEHDVKIKGINEYINLYNQQHKDDKLPKLKALFKQILSDRNAISWLPEEFNSDQEVLNAIKDCYERLAENVLGDKVLKSLLCSLSDYTLDGIFIRNDLQLTDISQKMFGNWGVIQNAIMQNIKRVAPARKHKESEEDYEKRIAGIFKKADSFSISYINDCLNEADSNNAYFVENYFATFGAVNTPTMQRENLFALVQNAYTEVASLLHSDYPTAKHLAQDKANVAKIKALLDAIKSLQHFVKPLLGKGDESDKDERFYGELASLWAELDTVTPLYNMIRNYITRKPYSQKKIKLNFENPQLLGGWDANKEKDYATIILRRNGLYYLAIMNKESKKLLGKAMPSDGECYEKMVYKLLPGANKMLPKVFFAKSRMEDFKPSKELVEKYNNGTHKKGKNFNIQDCHNLIDYFKQSISKHEDWGKFGFNFSDTSTYEDLSGFYREVEQQGYKLSFARVSVSYINQLVEEGKMYLFQIYNKDFSEYSKGTPNMHTLYWKALFDERNLADVVYKLNGQAEMFYRKKSIENTHPTHPANHPILNKNKDNKKKESLFEYDLIKDRRYTVDKFMFHVPITMNFKSVGSEIINQGVKEYLHHADDMHIIGIDRGERHLLYLVVIDLQGNIKEQYSLNEIVNEYNGNTYHTNYHDLLDAREDERLKARQSWQTIENIKELKEGYLSQVIHKITQLMVKYHAIVVLEDLNMGFMRGRQKVEKQVYQKFEKMLIDKLNYLVDKKADASVSGGWLNAYQLTSKFDSFQKLGKQSGFLFYIPAWNTSKIDPVTGFVNLLDARYQNVEKAKAFFSKFDAIRYNKDKDWFEFNLDYDKFGKKAEGTRTKWTLCTRGMRIDTFRNKEKNSQWDNQEVDLTAEMKSLLEHYYIDIHGNLKDAISAQTDKAFFTGLLHILKLTLQMRNSITGTETDYLVSPVADENGIFYDSRSCGEELPENADANGAYNIARKGLMLIEQIKGAEDLGNLKFDISNKAWLNFAQKKPYKNG

SEQ ID NO: 1548 - protein, 1274 aa, Unknown
  Description of Unknown: uncultivated organism sequence
  Category: MG75 effectors
  Description: MG75-34 effector
MAKNFEDFKRLYPLSKTLRFEAKPIGATLDNIIKSGLLDEDEHRAASYVKMKKLIDEYHKVFIDRVLDNGCLPLEDKGDNNSLAEYYESYVSKAQDEDAIKKFKEIQQNLCSIIAKKLTDDKAYANLFGNKLIESYKDKADKTKIIDSDLIQFINTAESTQLVSMSQDEAKELVKEFWGFTTYFEGFFKNRKNMYTPEEKSTGIAYRLINENLPKFIDNMEAFKKAITRPEIQANMEELYSDFSEYLNVESIQEMFQLDYYNMLLTQKQIDVYNAIIGGKTDDEHDVKIKGINEYINLYNQQHKDDKLPKLKALFKQILSDRNAISWLPEEFNSDQEVLNAIKDCYERLAENVLGDKVLKSLLCSLSDYTLDGIFIRNDLQLTDISQKMFGNWGVIQNAIMQNIKRVAPARKHKESEEDYEKRIAGIFKKADSFSISYINDCLNEADPNNAYFVENYFATFGAVNTPTMKRENLFALVQNAYTEVASLLHSDYPTAKHLAQDKANVAKIKALLDAIKSLQHFVKPLLGKGDESDKDERFYGELASLWAELDTVTPLYNMIRNYITRKPYSQKKIKLNFENPQLLGGWDANKEKDYATIILRRNGLYYLAIMNKESKKLLGKAMPSDGECYEKMVYKLLPGANKMLPKVFFAKSRMEDFKPSKELVEKYNNGTHKKGKNFNIQDCHNLIDYFKQSISKHEDWGKFGFNFSDTSTYEDLSGFYREVEQQGYKLSFARVSVSYINQLVEEGKMYLFQIYNKDFSEYSKGTPNMHTLYWKALFDERNLADVVYKLNGQAEMFYRKKSIENTHPTHPANHPILNKNKDNKKKESLFEYDLIKDRRYTVDKFMFHVPITMNFKSVGSENINQGVKEYLHHADDMHIIGIDRGERHLLYLVVIDLQGNIKEQYSLNEIVNEYNGNTYHTNYHDLLDAREDERLKARQSWQTIENIKELKEGYLSQVIHKITQLMVKYHAIVVLEDLNMGFMRGRQKVEKQVYQKFEKMLIDKLNYLVDKKADASVSGGWLNAYQLTSKFDSFQKLGKQSGFLFYIPAWNTSKIDPVTGFVNLLDARYQNVEKAKAFFSKFDAIRYNKDKDWFEFNLDYDKFGKKAEGTRTKWTLCTRGMRIDTFRNKEKNSQWDNQEVDLTAEMKSLLEHYYIDIHGNLKDAISAQTDKAFFTGLLHILKLTLQMRNSITGTETDYLVSPVADENGIFYDSRSCGEELPENADANGAYNIARKGLMLIEQIKGAEDLGNLKFDISNKAWLNFAQKKPYKNG

SEQ ID NO: 1549 - protein, 1271 aa, Unknown
  Description of Unknown: uncultivated organism sequence
  Category: MG75 effectors
  Description: MG75-35 effector
MEFNDFKRLYPLSKTLRFEAKPIGATLKNIIKSGLLEEDEHRTQSYVKVKKLIDEYHKVFIDRVLNDGCLTIENKGKKDSLEEYYESYMSKTNDENANKTYKEIQQNLRSVIVKKLTDDNAYANLFGNKLIESYKDKDDKNKIIDSDLIQFINTADPSQLDYMSQDEAKELVKEFWGFTTYFVGFFDNRKNMYTPEDKSTGIAYRLVNENLPKFIDNMEAFKKAVAKPEIQANMEELYSNFAGYLNVESIQEMFQLDYYNMLLSQKQIDVYNAIIGGKTDEEHDVKIKGINEYINLYNQQHKDEKLPKLKALFKQILSDRNAISWLPEEFNSDQDVLNAIDDCYKRLSENVLGDKVLKSLLCSLSDYNLNVIFVRNDLQLTDISQKMFGNWSVIQDAIMQNIKNVAPARKRKESEEDYEKRISDIFKKADSFSIQYINDCLNEMDDNNLHAVDGYFATLGAVNTPTMQRENLFALIQNAYTDISNLLETPYPEKKNLAQDKTNVAKVKALLDAIKSLQHFVKPLLGKGDESDKDERFYGELASLWTELDTVTPLYNMVRNYMTRKPYSEKKIKLNFENPQLLGGWDANKEKDYATIILRRNGMYYLAIMDKDSKKLLGKTMPSDGECYEKMVYKLLPGANKMLPKVFFAKSRINDFKPSKQIVENYNNGTHKKGKNFNINDCHNLIDYFKQSIGKHEDWSKFGFNFSDTSTYEDLSGFYREVEQQGYKLSFTNVSVSFIDKLVDEGKMYLFQIYNKDFSDYSKGTPNMHTLYWKALFDERNLADVVYKLNGQAEMFYRKKSINNTHPTHPANHPIQNKNKDNKKKESVFEYDLIKDRRYTVDKFLFHVPITMNFKSVGSENINQQVREYLQQADDTHIIGIDRGERHLLYLVVIDMQGEIKEQFTLNEIVNEYNGNTYRTNYHDLLDTREEERLKARQSWQTIENIKELKEGYLSQVIHKITQLMVKYHAVVVLEDLNKGFMRGRQKVEKQVYQKFEKMLIDKLNYLVDKKADAAQSGGLLNAYQLTSKFDSFQKLGKQSGFLFYIPAWNTSKIDPVTGFVNLLDTRYQNTEKAKAFFSKFDAIRYNANKDWFEFNLDYDKFGTKAEGTRTKWILCTQGNRICTFRNTEKNSQWDNQEVDLTREMKSLFEYYHINICGNLKEEICSQTDKAFFTGLLHMLKLTLQMRNSITGTETDYLVSPVADENGVFYDSRSCGDALPKNADANGAYNIARKGLMLIGQIKETKDLANFKYDISNKAWLNFAQQKPYKK

SEQ ID NO: 1550 - protein, 1275 aa, Unknown
  Description of Unknown: uncultivated organism sequence
  Category: MG75 effectors
  Description: MG75-36 effector
MAKNFEDFKRLYYLSKTLRFEAKPIGATLDNIVKSGLLDEDEHRAASYVKVKKLIDEYHKVFIDRVLDDGCLPLENKGNNNSLAEYYESYVSRAQDEDAKKKFKEIQQNLRSVIAKKLTEDKAYANLFGNKLIESYKDKEDKKKIIDSDLIQFINTAESTQLDSMSQDEAKELVKEFWGFVTYFYGFFDNRKNMYTAEEKSTGIAYRLVNENLPKFIDNIEAFNRAITRPEIQENMGVLYSDFSEYLNVESIQEMFQLDYYNMLLTQKQIDVYNAIIGGKTDDEHDVKIKGINEYINLYNQKHKDDKLPKLKSLFKQILSDRNAISWLPEEFNSDQEVLNAIKDCYERLSENVLGDKVLKSMLGSLADYSLDGIFIRNDLQLTDISQKMFGNWSVIQNAIMQNIKHVAPARKHKESEEEYENRIAGIFKKADSFSISYIDACLNETDPNNAYFVENYFATLGAVDTPTMQRENLFALVQNAYTEITALLHSDYPTEKNLAQDKANVAKIKALLDAIKSLQHFVKPLLGKGDESDKDERFYGELASLWAELDTMTPLYNMIRNYMTRKPYSQKKIKLNFENPQLLGGWDANKEKDYATIILRRNGLYYLAIMNKDSKKLLGKAMPSDGECYEKMVYKLLPGANKMLPKVFFAKSRMEDFKPSKELVEKYNNGTHKKGKNFNIQDCHNLIDYFKQSIDKHEDWSKFGFKFSDTSTYEDLSGFYREVEQQGYKLSFARVSVSYINQLVEEGKMYLFQIYNKDFSEYSKGTPNMHTLYWKALFDERNLADVVYKLNGQAEMFYRKKSIENTHPTHPANHPILNKNKDNKKKESLFGYDLIKDRRYTVDKFLFHVPITMNFKSSGSENINQDVKAYLRHADDMHIIGIDRGERHLLYLVVIDLQGNIKEQFSLNEIVNDYNGNTYHTNYHDLLDVREEERLKARQSWQTIENIKELKEGYLSQVIHKITQLMVGYHAIVVLEDLSKGFMRSRQKVEKQVYQKFEKMLIDKLNYLVDKKTDVSTPGGLLNAYQLTCKSDSSQKLGKQSGFLFYIPAWNTSKIDPVTGFVNLLDTHSLNSKEKIKAFFSKFDAIRYNKDKKWFEFNLDYDKFGKKAEDTRTKWTLCTRGMRIDTFRNKEKNSQWDNQEVDLTTEMKSLLEHYYIDIHGNLKDAISTQTDKAFFTGLLHILKLTLQMRNSITGTETDYLVSPVADENGIFYDSRSCGDQLPENADANGAYNIARKGLMLIEQIKNAEDLNNVKFDISNKAWLNFAQQKPYKNG

SEQ ID NO: 1551 - protein, 1276 aa, Unknown
  Description of Unknown: uncultivated organism sequence
  Category: MG75 effectors
  Description: MG75-37 effector
MAKKFEDFTKLYPLSKTLCFEARPIGATKSNIIKNGLLDEDKHRAESYVKVKKLIDEYHKAFIDRVLADGCLCYKNEGNEDSLEEYYEFYSLSSKDKSDDTRKHFATIQQNLRSKIAETLTKDKAYANLFGNKLIESHKDKEDKNNIIDSDLIQFVSTATPDQLDSQSKDDATKLIKEFWGFTTYFTGFFENRKNMYTSEEKSTGIAYRLINENLPKFIDNMESFKKIMEKPEMSANMEELRANLEEYLNVESISEMFELNYYNMLLTQKQIDVYNAVIGGKTDEEQDIKTKGINEYVNLYNQQHKDAKLPKLKTLFKQILSDRNAISWLPEEFDKDQNVLNAIKDCYVRLTANVLGNNVLNSLLSTLSEYNTESIFIRNDIQLTNISQKMAGSWNYIQDAIKQDIKNVAPARKRKESEEDYEERISKNFKKADSYSIKYIDDCLNRAYKNNTYTVEGYFATLGATNTPSLQRENLFAQIANAYTNISSLLSSDYSAEKNLAQDKENVAKIKTLLDCIKSLQHFVKPLLGKGDESDKDERFYGELSMLWKELDTVTPLYNMVRNYMTRKPYSQKKIKLNFENPQLLGGWDANKEKDYASILLRRDGKYYLGIMDKESKKLLGKSMPSDGACYQKMVYKLLPGANKMLPKVFFAKSRLADFNPSKEIIENYNNGTHKKGKNFNLKDCHALIDYFKESIKKHEDWSKFGFKFSESTTYEDLSGFYHEVEQQGYKLSFTNVSASYIDKMVDEGKMYLFQIYNKDFSEYSKGTPNMHTLYWKALFDERNLADVVYKLNGQAELFYREKSIDCTHPTHPANHPILNKNKDNEKKESIFEYDLIKDRRYTVDKFMFHVPITMNFKSTGADNINQLVREHLKDADAPHIIGIDRGERHLLYLVVIDMHGNIKEQFTLNDIVNEYNGNTYRTNYHDLLDAREDARLKARQSWQTIENIKELKEGYLSQVIHKITQLMVKYHAIVVLEDLNMGFMRGRQKVEKQVYQKFEKMLIDKLNYYVDKKANAEQAGGLLNAYQLTSKFDSFQKLGKQSGFLLYIPAWNTSKIDPVTGFVNLLDTRYQNVEKAKAFFCKFEAIRYNSNKNWFEFTIDYNNFGQKAEGTRTKWTLCTQGKRIRTFRNPEKNSEWDNQEIDLTSALKNLFAHYHIDINGNIKEAISAQSDKTFFTELLHLLKLTLQMRNSITGTETDYLISPVADDNGYFYDSRTCNDTLPKNADANGAYNIARKGLMLIEQIKKAKDIANIKFDISNKSWLNFAQQKPYKDE

SEQ ID NO: 1552 - protein, 1273 aa, Unknown
  Description of Unknown: uncultivated organism sequence
  Category: MG75 effectors
  Description: MG75-38 effector
MTKKYNDFNRLYPLSKTLRFEARPIGATLDNIIKSGMLEEDEHRAQSYVKVKKLIDEYHKAFIDRVLNDGCLTIENKGRKDSLEEYYESYMSKFNDENVSKTFKEIQENLRSVIAKKLTDDKAYANLFCKNLIESYKDKDDKKIIIDSDLIQFINTAEPSQLDSMSQEEAKELVKEFWGFTTYFVGFFDNRKNMYTSEEKSTGIAYRLVNENLPKFIDNMQAFKKAVAKPEIQANMEELYSNFAEYLNVESIQEMFQLDYYNMLLTQKQIDVYNAIIGGKTDEDHDVKIKGINEYINLYNQQHKDEKLPKLKALFKQILSDRNAISWLPEEFNRDQEVLDAIKDCYGRLSENVLGDKVLKSLLCSLSDYNLNGIFVRNDQQLTDISQKIFGNWSVIQNAIMQNIKNVAPARKRKESEEDYEKRISDIFKKADSFSIQYINDCLNEMDDNNLHAVDGYFATLGAINTPMQRENLFALIQNAYTDISDLLDTPYPENKNLAQDKTNVAKVKALLDAIKSLQHFVKPLLGKGNESNKDERFYGELDSLWEELDTLTPLYNMTRNYMTRKPYSQKKIKLNFENTQLLAGWDANKEKDNATIILRRNGLYYLAIMNKDSKKFLGKAMPSDGECYEKMVYKLLPGANKMLPKVFFAKSRINDFKPSMQIIENYNNGTHKKGKTFNINDCHDLIDFFKRSIDKHEDWSQFGFNFSDTSTYEDLSGFYREVEQQGYKLSFTNVSAYFIDKLIEEGKMYLFQIYNKDFSNYSKGTPNMHTLYWKALFDERNLADVVYKLNGQAEMFYRKKSIDYTHPTHPANHPIQNKNKDNKKKESVFEYDLIKDRRYTVDKFLFHVPITMNFKSVGSENINQQVREYLQQADDTHIIGIDRGERHLLYLVVIDMQGNIKEQFTLNEIMNEYNGNTYRTNYHDLLDTREEERLTARQSWQTIENIKELKEGYLSQVIHKITQLMVKYHAIVVLEDLNKGFMRGRQKVEKQVYQKFEKMLIDKLNYLVDKKADATQSGGLLNAYQLTSKFDSFQKLGKQSGFLFYIPAWNTSKIDPVTGFVNLLDTRYQNTEKAKAFFSKFDAIRYNADKDWFEFNLDYDKFGTKAEGTRTKWALCTQGMRIDTFRNEEKNSQWDNQEVDLTTEMKSLFEHYHINMDGNLKEEICSQTDKAFFTKLLHILKLTLQMRNSITGTETDYLVSPVADENGRFYDSRSCGDKLPENADANGAYNIARKGLMLIEQIKDADDLGNLKFDISNKAWLNFAQQKPYKNE

SEQ ID NO: 1553 - protein, 1274 aa, Unknown
  Description of Unknown: uncultivated organism sequence
  Category: MG75 effectors
  Description: MG75-39 effector
MAKNFEDFKRLYSLSKTLRFEAKPIGATLNNIVKSGLLDEDEHRAASYVKVKKLIDEYHKVFIDRVLADGCLPLENKGNNNSLAEYYESYVSRAQDEDAKKKFKEIQQNLRSIIAKKLTEDKAYANLFGKNLIESYKDKTDKTKIIDSDLIKFINTAESTQLDSMSQDEAKEIVKEFWGFTTYFVGFFDNRKNMYTAEEKSTGIAYRLINENLPKFIDNMEAFKKAIARPEIQANMEELYSNFSEYLNVESIQEMFLLDYYNMLLTQKQIDVYNAIIGGKTDDEHDFKIKGINEYINLYNQQHKDDKLPKLKALFKQILSDRNAISWLPEEFNSDQEVLNAIKDCYERLAENVLGDKVLKSLLGSLADYSLDGIFIRNDLQLTDISQKMFGNWGVIQNAIMQNIKHVAPARKHKESEEDYEKRIAGIFKKADSFSISYINDCLNEEDPNNAYFVENYFATFGAVNTPTMQRENLFALVQNAYTEVAALLHSDYPTVKNLAQDKANVSKIKALLDAIKSLQHFVKPLLGKGDESDKDERFYGELASLWAELDTVTPLYNMIRNYMTRKPYSQKKIKLNFENPQLLGGWDANKEKDYATIILRRNGLYYLAIMNKDSKKLLGKAMPSDGECYEKMVYKLLPGANKMLPKVFFAKSRMEDFKPSKELVEKYNNGTHKKGKNFCIQDCHNLIDYFKQSIDKHEDWSKFGFNFSETSTYEDLSGFYREVEQQGYKLSFARVSVSYINQLVEEGKMYLFQIYNKDFSEYSKGTPNMHTLYWKALFDERNLADVVYKLNGQAEMFYRKKSIENTHPTHPANHPILNKNKDNKKKESLFGYDLIKDRRYTVDKFMFHVPITMNFKSVGSENINQDVKAYLRHADDMHIIGIDRGERHLLYLVVIDLQGNIKEQFSLNEIVNDYNGNTYHTNYHDLLDVREDERLKARQSWQTIENIKELKEGYLSQVIHKITQLMVKYHAIVILEDLNMGFMRGRQKVEKQVYQKFEKMLIEKLNYLVDKKADASVSGGLLNAYQLTSKFDSFQKLGKQSGFLFYIPAWNTSKIDPVTGFVNLLDTRYQNVEKAKSFFSKFDAIRYNKDKDWFEFNLDYDKFGKKAEGTRTKWTLCTRGMRIDTFRNKEKNSQWDNQKVDLTAEMKSLLEHYYIDIYGNLKDAISAQTDKAFFTGLLHILKLTLQMRNSITGTEIDYLVSPVVDENGIFYDSRSCGDQLPENADANGAYNIARKGLMLVEQIKDAEDLDNVKFDISNKAWLNFAQQKPYKNG

SEQ ID NO: 1554 - protein, 1274 aa, Unknown
  Description of Unknown: uncultivated organism sequence
  Category: MG75 effectors
  Description: MG75-40 effector
MAKIFEDFKRLYPLSKTLRFEAKPIGATLDNIIKSGLLDEDEHRAASYVRVKKLIDEYHKVFIDRVLDNGCLPLKNEGHNNSLTEYYESYVTKSQNEDAKKVFKEIQQNLRSIIAKKLTEDKAYANLFGKNLIESYKDKTDKTKIIDSDLIKFINTAESTQLDSMSQDEAKELVKEFWGFTTYFVGFYDNRKNMYTAEEKSTGIAYRLVNENLPKFIDNMEAFKKAIARPEIQANMEELYSDFSEYLNVESVQEMFQLDYYNMLLTQKQIDVYNAIIGGKTDDEHDVKIKGINEYINLYNQQHKDDKLPKLKALFKQILSDRNAISWLPEEFNGDQEVLNAIKDCYERLSENVLGDKVLKSLLGSLSDYSLDGIFIRNDLQLTDISQKMFGNWCVIQNAIMQNIKHVAPARKHKESEEDYEKRIAGIFKKVDSFSISFINDCLNEADPNNAYFVENYFATFGAVNTPTMQRENLFALVQNAYTEVAALLHSDYPTAKHLAQDKVNVAKIKALLDAIKSLQHFVKPLLGKGDESDKDERFYGELASLWAELDTVTPLYNMIRNYMTRKPYSQKKIKLNFENPQLLGGWDANKEKDYATIILRRDGLYYLAIMNKESKKLLGKAMPSDGECYEKMVYKLLPGANKMLPKVFFAKSRMEDFKPSKELVEKYNNGTHKKGKNFNIQDCHNLIDYFKQSISKHEDWGKFGFNFSDTSTYEDLSGFYREVEQQGYKLSFTRVSVSYISQLVEEGKMYLFQIYNKDFSEYSKGTPNMHTLYWKALFDERNLADVVYKLNGQAEMFYRKKSIENSHPTHPANHPILNKNKDNKKKESLFDYDLIKDRRYTVDKFMFHVPITMNFKSSSSENINQDVKAYLRHADDMHIIGIDRGERHLLYLVVIDLQGNIKEQYSLNEIVNEYNGNTYHTNYHDLLDVREEERLKARQSWQTIENIKELKEGYLSQVIHKITQLMVKYHAIVVLEDLNMGFMRGRQKVEKQVYQKFEKMLIDKLNYLVDKKADASVSGGLLNAYQLTSKFDSFQKLGKQSGFLFYIPAWNTSKIDPITGFVNLLDTRYQNVEKAKVFFSKFDAIRYNKDKDWFEFNLDYDKFGKKAEGTRTKWTLCTRGMRIDTFRNKEKNSQWDNQEVDLTAEMKSLLEHYYIDIHGNLKDAISAQTDKAFFTGLLHILKLTLQMRNSITGTETDYLVSPVADENGIFYDSRSCGDELPENADANGAYNIARKGLMMIEQIKEAKDLDNLKFDISNKSWLNFAQQKPYKNE

SEQ ID NO: 1555 - protein, 1177 aa, Unknown
  Description of Unknown: uncultivated organism sequence
  Category: MG75 effectors
  Description: MG75-41 effector
MQKKAFEENQQNLRSIIAKKLTEDKAYANLFGKNLLESYKDKTDKTKIIDSDLIKFINTAESTQLDSMSQDEAKEIVKEFWGFTTYFVGFFDNRKNMYTAEEKSTGIAYRLINENLPKFIDNMEAFKKAIARPEIQADMEELYSNFSEYLNVESIQEMFLLDYYNMLLTQKQIDVYNAIIGGKTDDEHDVKIKGINEYINLYNQQHKDDKLPKLKALFKQILSDRNAISWLPEEFNSDQEVLNAIKDCYERLSENVLGDKVLKSMLGSLADYSLDGIFIRNDLQLTDISQKMFGNWSVIQNAIMQNIKHVAPARKHKESEEEYENRIAGIFKKADSFSISYIDACLNETDPNNAYFVENYFATLGAVDTPTMQRENLFALVQNAYTEITALLHSDYPTEKNLAQDKANVAKIKALLDAIKSLQHFVKPLLGKGDESDKDERFYGELASLWAELDTMTPLYNMIRNYMTRKPYSQKKIKLNFENPQLLGGWDANKEKDYATIILRRNGLYYLAIMNKDSKKLLGKAMPSDGECYEKMVYKLLPGANKMLPKVFFAKSRMEDFKPSKELVEKYNNGTHKKGKNFNIQDCHNLIDYFKQSIDKHEDWSKFGFKFSDTSTYEDLSGFYREVEQQGYKLSFARVSVSYINQLVEEGKMYLFQIYNKDFSEYSKGTPNMHTLYWKALFDERNLADVVYKLNGQAEMFYRKKSIENTHPTHPANHPILNKNKDNKKKESLFEYDLIKDRRYTVDKFMFHVPITMNFKSVGSENINQDVKAYLRHADDMHIIGIDRGERHLLYLVVIDLQGNIKEQFSLNEIVNDYNGNTYHTNYHDLLDVREDERLKARQSWQTIENIKELKEGYLSQVIHKITQLMVKYHAIVVLEDLNMGFMRGRQKVEKQVYQKFEKMLIEKLNYLVDKKADASVSGGLLNAYQLTSKFDSFQKLRKQSGFLFYIPAWNTSKIDPITGFVNLLDTRYQNVEKAKAFFSKFDAIRYNKDKEWFEFDLDYDKFGRKAEGTRTKWTLCTRGMRIDTFRNKEKNSQWDNQEIDLTAEMKSLLEHYYIDIQGNLKEAICTQTDKAFFTGLLHILKLTLQMRNSITGTQTDYLVSPVADENGIFYDSRSCGDSLPENADANGAYNIARKGLMLIEKIKNAEDLDTIKFDISNKAWLNFAQQKPYKNG

SEQ ID NO: 1556 - protein, 886 aa, Unknown
  Description of Unknown: uncultivated organism sequence
  Category: MG75 effectors
  Description: MG75-42 effector
MFGNWGVIQNAVMQNIKRVAPARKHKESEEDYEKRIAGIFKKADSFSISYINDCLNEADPNNAYFVENYFATFGAVNTPTMQRENLFALVQNAYTEITALLHSDYPTEKNLAQDKANVAKIKALLDAIKSLQHFVKPLLGKGDESDKDERFYGELASLWAELDTMTPLYNMIRNYMTRKPYSQKKIKLNFENPQLLGGWDANKEKDYATIILRRNGLYYLAIMNKDSKKLLGKAMPSDGECYEKMVYKLLPGANKMLPKVFFAKSRMEDFKPSKELVEKYNNGTHKKGKNFNIQDCHNLIDYFKQSIDKHEDWSKFGFKFSDTSTYEDLSGFYREVEQQGYKLSFARVSVSYINQLVEEGKMYLFQIYNKDFSEYSKGTPNMHTLYWKALFDERNLADVVYKLNGQAEMFYRKKSIENTHPTHPANHPILNKNKDNNKKESLFEYDLIKDRRYTVDKFMFHVPITMNFKSSGSENINQDVKAYLCHADDMHIIGIDRGERHLLYLVVIDLQGNIKEQFSLNEIVNDYNGNTYHTNYHDLLDVREDERLKARQSWQTIENIKELKEGYLSQVIHKITQLMVKYHAIVVLEDLNMGFMRGRQKVEKQVYQKFEKMLIEKLNYLVDKKADASVSGGLLNAYQLTSKFDSFQKLGKQSGFLFYIPAWNTSKIDPVTGFVNLLDTRYQNVEKAKSFFSKFDAIRYNKDKEWFEFNLDYDKFGKKAEGTRTKWTLCTRGMRIDTFRNKEKNSQWDNQEVDLTAEMKSLLEHYYIDIHSNLKDAISAQTDKAFFTGLLHILKLTLQMRNSITGTETDYLVSPVVDENGIFYDSRSCGDELPENADANGAYNIARKGLMMIEQIKDAKDLDNLKFDISNKAWLNFAQQKPYKNG

SEQ ID NO: 1557 - protein, 1321 aa, Unknown
  Description of Unknown: uncultivated organism sequence
  Category: MG75 effectors
  Description: MG75-43 effector
MEFDDFKRLYPLSKTLRFEAKPIGATLNNIIKSGLLEEDEHRAQSYVKVKKLIDEYHKVFIDRVLDDGCLTIENKGKKDSLEEYYESYMSKSNDENVSKTFKEIQENLRSVIAKKLTDDNAYANLFGNKLIESYKDKDDKKKIIDSDLIQFINTAEPSKLDSMSQDEAKELVKEFWGFTTYFEGFHKNRKNMYTSEEKSTGIAYRLVNENLPKFIDNMEAFKKAIAKPEIQANMEELYSNFAEYLNVESIQEMFQLDYYNMLLTQKQIDDYNAIIGGKTDEDHDVKIKGINEYINLYNQQHKDEKLPKLKALFKQILSDRNAISWLPEEFNSDQDVLNAIKDCYERLSENVLGDKVLKSLLCSLSDYNLNGIFVRNDLQLTDISQKMFGNWNVIQNAIMQNFFFKKVAPARKRKESEEDYEKRISDIFKKTDSFSIQYINDCLNEMDDNNLHAVDGYFATLGAVNTPTMQRENLFALIQNAYTDISDLLDTPYPENKNLAQDKTNVAKVKALLDAIKSLQHFVKPLLGKGDESDKDERFYGELASLWTELDTVTLLFNMVHNYMTRKPYSQKKIKLNYKNTQLLAGWDANKEKEHAAIILRRNGMYYLAIMDKDSKNLLDKAMPSDGECYEKMVYKQFDISKQLPKCTTELKRVRKALVEDAKRSCLLSDSKDWNKPLNVTRKLWELNNYVWDKKKADWVLRKKENETRPKKFHKKYLELTSDKNGYNQAKNDWIKFTKEFLSSYKKVEDYDIHYKKRYNSVDELYKQLNSDFYTISFTYVSVSFIDKLVNEGKMYLFKIYNKDFSNYSKGTPNMHTLYWKALFDERNLADVVYKLNGEAEMFYRKKSINNTHPTHPANHPIQNKNKDNKKKESVFEYDLVKDYRYTEDKFLFHVPITMNFKSVGSENINQQVKEYLQQADDTHIIGIDRGERHLLYLVVIDMEGNIKEQFSLNEIVNEYNGNTYRTNYHDLLDVCADKRLKASQSWQTIENIKELKEGYLSQAIHKITQLMVKYHAVVVLEDLNKGFMRGRQKVEKQVYQKFEKMLIDKLNYLVDKKADAAQSGGLLNAYQLTSKFDSFQKLGKQSGFLFYIPAWNTSKIDPVTGFVNLFDTRYTNADKALEFFSKFDAIRYNEEKDWFEFEFDYDKFTQKAHGTRTKWTLCTYGMRLRSFKNPAKQYNWDSEVVALTDEFKRILEEAGIDIHENLKDAIRNLKGKKQKYLEPLMQFMKLLLQLRNSKAGTDEDYILSPVADENGIFYDSRSCGDELPENADANGAYNIARKGLMMIEQIKDAKDLDNLKFDISNKAWLNFAQQKPYKNG

SEQ ID NO: 1558 - protein, 1274 aa, Unknown
  Description of Unknown: uncultivated organism sequence
  Category: MG75 effectors
  Description: MG75-44 effector
MAKNFEDFKRLYPLSKTLRFEAKPIGATLDNMVKSGLLDEDEHRAASYVKVKKLIDEYHKVFIDRVLDNGCLPLKNEGHNNSLTEYYESYVTKSQNEDAKKVFKEIQQNLRSIIAKKLTEDKAYANLFGKNLIESYKDKTDKTKIIDSDLIKFINTAESTQLDSMSQDEAKELVKEFWGFTTYFVGFYDNRKNMYTAEEKSTGIAYRLVNENLPKFIDNMEAFKKAIARSEIQANMEELYSDFSEYLNVESVQEMFQLDYYNMLLTQKQIDVYNAIIGGKTDDEHDVKIKGINEYINLYNQQHKDDKLPKLKALFKQILSDRNAISWLPEEFNGDQEVLNAIKDCYERLSENVLGDKVLKSLLGSLSDYSLDGIFIRNDLQLTDISQKMFGNWCVIQNAIMQNIKHVAPARKHKESEEDYEKRIAGIFKKVDSFSISFINDCLNEADPNNAYFVENYFATFGAVNTPTMQRENLFALVQNAYTEVAALLHSDYPTAKHLAQDKVNVAKIKALLDAIKSLQHFVKPLLGKGDESDKDERFYGELASLWAELDTVTPLYNMIRNYMTRKPYSQKKIKLNFENPQLLGGWDANKEKDYATIILRRDGLYYLAIMNKESKKLLGKAMPSDGECYEKMVYKLLPGANKMLPKVFFAKSRMEDFKPSKELVEKYNNGTHKKGKNFNIQDCHNLIDYFKQSISKHEDWGKFGFNFSDTSTYEDLSGFYREVEQQGYKLSFTRVSVSYISQLVEEGKMYLFQIYNKDFSEYSKGTPNMHTLYWKALFDERNLADVVYKLNGQAEMFYRKKSIENTHPTHPANHPILNKNKDNKKKESLFDYDLIKDRRYTVDKFMFHVPITMNFKSSGSENINQDVKAYLRHADDMHIIGIDRGERHLLYLVVIDLQGNIKEQYSLNEIVNEYNGNTYHTNYHDLLDVREEERLKARQSWQTIENIKELKEGYLSQVIHKITQLMVKYHAIVVLEDLNMGFMRGRQKVEKQVYQKFEKMLIDKLNYLVDKKADASVSGGLLNAYQLTSKFDSFQKLGKQSGFLFYIPAWNTSKIDPVTGFVNLLDTRYQNVEKAKVFFSKFDAIRYNKDKDWFEFNLDYDKFGKKAEGTRTKWTLCTRGMRIDTFRNKEKNSQWDNQKVDLTAEMKSLLEHYYIDIHGNLKDAISAQTDKAFFTGLLHILKLTLQMRNSITGTETDYLVSPVADENGIFYDSRSCGDELPENADANGAYNIARKGLMMIEQIKDAKDLDNLKFDISNKSWLNFAQQKPYKNE

SEQ ID NO: 1559 - protein, 1272 aa, Unknown
  Description of Unknown: uncultivated organism sequence
  Category: MG75 effectors
  Description: MG75-45 effector
MKFDDFKKLYSLSKTLRFEAKPVGSTLKNIIESGLLEEDEHRAQSYVKVKKLIDEYHKVFIDRVLNDGCLTIENKGKKDSLEEYYESYMSKSNDENVSKTFKEIQENLRSVIAKKLTDDNAYANLFGNKLIESYKDKDEKNKIIDSDLIQFINTAEPSQLDSMSQDEAKELVKEFWGFTTYFVGFFDNRKNMYTSEEKSTGIAYRLVNENLPKFIDNMEAFKKAIAKPEIQASMEELYSNFAEYLNVESIQEMFQLDYYNMLLTQKQIDVYNAIIGGKTDEEHDVKIKGINEYINLYNQQHKDEKLPKLKALFKQILSDRNAISWLPEEFNSDQEVLNAIDDCYKRLSENVLGDKVLKSLLCSLDDYNLDGIFVRNDLQLTDISQKMFGNWSVIQSAIMQNIKNVAPARKRKESEEDYEKRISDIFKKADSFSIQYINDCLNEMDNNNLHAVDGYFATLGAVNTPTMQRENLFALIQNAYTDISNLLETPYPENKNLAQDKTNVAKVKALLDAIKSLQHFVKPLLGKGDESDKDERFYGELASLWTELDTVTPLYNMIRNYMTRKPYSEKKIKLNFENPQLLGGWDANKEKDYATIILRRNGMYYLAIMDKDSKKLLGKTMPSNGECYEKMVYKLLPGANKMLPKVFFAKSRINDFKPSKLIVENYNNGTHKKGKNFNINDCHNLIDYFKQSIDKHEDWSKFGFNFSDTSTYEDLSGFYREVEQQGYKLSFTNVSVSFIDKLVDEGKMYLFQIYNKDFSDFSKGTPNMHTLYWKALFDERNLADVVYKLNGQAEMFYRKKSINNTHPTHPANHPIQNKNKDNKKKESVFEYDLIKDRRYTVDKFLFHVPITMNFKSVGSENINQQVREYLQQADDTHIIGIDRGERHLLYLVVIDMQGNIKEQFTLNEIVNEYNGNTYRTNYHDLLDTREEERLTARQSWQTIENIKELKEGYLSQVVHKITQLMVKYHAVVVLEDLNKGFMRGRQKVEKQVYQKFEKMLIDKLNYLVDKKADAAQSGGLLNAYQLTSKFDSFQKLGKQSGFLFYIPAWNTSKIDPVTGFVNLLDTRYQNTEKAKAFFSRFDAIRYNANKDWFEFYLDYDKFCTKAEGTRTRWTLCTQGSRISTFRNAEKNSQWDNLEVDLTREMKSLFEHYHINICGNLKEEICLQTDKAFFTGLLHMLKLTLQMRNNITGTETDYLISPVADENGTFYDSRSCGDTLPKNADANGAYNIARKGLMFIGQIKETKDLANFKYDISNKAWLNFAQQKPYKNE

SEQ ID NO: 1560 - protein, 1307 aa, Unknown
  Description of Unknown: uncultivated organism sequence
  Category: MG75 effectors
  Description: MG75-46 effector
MAKKFEDFTKLYPLSKTLCFEARPIGATKSNIIKNGLLDEDKHRAESYVKVKKLIDEYHKAFIDRVLADGCLCYKNEGNEDSLEEYYEFYSLSSKDKSDDTRKHFATIQQNLRSKIAETLTKDKAYANLFGNKLIESHKDKEDKNNIIDSDLIQFVSTATPDQLDSQSKDDATKLIKEFWGFTTYFTGFFENRKNMYTSEEKSTGIAYRLINENLPKFIDNMESFKKIMEKPEMSANMEELRANLEEYLNVESISEMFELNYYNMLLTQKQIDVYNAVIGGKTDEEQDIKTKGINEYVNLYNQQHKDAKLPKLKTLFKQILSDRNAISWLPEEFDKDQNVLNAIKDCYVRLTANVLGNNVLNSLLSTLSEYNTESIFIRNDIQLTNISQKMAGSWNYIQDAIKQDIKNVAPARKRKESEEDYEERISKNFKKADSYSIKYIDDCLNRAYKNNTYTVEGYFATLGATNTPSLQRENLFAQIANAYTNISSLLSSDYSAEKNLAQDKENVAKIKTLLDCIKSLQHFVKPLLGKGDESDKDERFYGELSMLWKELDTVTPLYNMVRNYMTRKPYSQKKIKLNFENPQLLGGWDANKEKDYASILLRRDGKYYLGIMDKESKKLLGKPMPSDGDYYEKMVYKFFKDITTMIPKCSTQLKAVKEHFSKSNADFVLSGKNFNTPLIISKEVFELNNVKYGQFKKFQKDYVATTNDIEGYAHAVKIWIKFCMDFLGTYDSTISYDLSSLASNEYTSLDTFYQDVNRLLYAVSFIKVSVSHIDSLVEEGKMYLFQIYNKDFSEYSKGTPNMHTLYWKALFDERNLADVVYKLNGQAELFYREKSIDCTHPTHPANHPILNKNKDNEKKESIFEYDLIKDRRYTVDKFMFHVPITMNFKSTGADNINQLVREHLKDADAPHIIGIDRGERHLLYLVVIDMHGNIKEQFTLNDIVNEYNGNTYRTNYHDLLDAREDARLKARQSWQTIENIKELKEGYLSQVIHKITQLMVKYHAIVVLEDLSMGFMRGRQKVEKQVYQKFEKMLIDKLNYYVDKKANAEQAGGLLNAYQLTSKFDSFQKLGKQSGFLLYIPAWNTSKIDPVTGFVNLLDTRYQNVEKAKAFFCKFEAIRYNSNKNWFEFTIDYNNFGQKAEGTRTKWTLCTQGKRIRTFRNPEKNSEWDNQEIDLTSALKNLFAHYHIDINGNIKEAISAQSDKTFFTELLHLLKLTLQMRNSITGTETDYLISPVADDNGYFYDSRTCNDTLPKNADANGAYNIARKGLMLIEQIKKAKDIANIKFDISNKSWLNFAQQKPYKDE

SEQ ID NO: 1561 - protein, 1270 aa, Unknown
  Description of Unknown: uncultivated organism sequence
  Category: MG75 effectors
  Description: MG75-47 effector
MEFDDFKRLYPLLKTLRFEAKPIGATLKNIIKSGLLEEDEHRAQSYVKVKKLIDEYHKVFIDRVLNDGCLTIENKGKQDSLEEYFESYISKSNDENANKAFKEIQGNLRSLIANKLTKDKGYANLFGKNLIESYKDKDDTKKIIDSDLIQFINTAEPSKLDSMSQDEAKELVKEFRGFTTYFVGFFDNRKNMYTSEEKSTGIAYRLVNENLPKFIDNMEAFKKAIAKPEIQANMEELYSNFAEYLNVESIQEMFKLDYYNMLLTQKQIDVYNAIIGGKTDEDHDVKIKGINEYINLYNQQHKDEKLPKLKALFKQILSDRNAISWLPEEFNSDQDVLNAIKDCYERLSENVLGDKVLKSLLCSLSDYNLNGIFVRNDLQLTDISQKTFGNWSVIQNAIMQNIKNVAPARKRKESEEDYEKRISDIFKKADSFSIQYINDCLNEMDNNNLHAVDGYFATLGAVNTPTMQRENLFALIQNAYTDISDLLDTPYPENKNLAQDKTNVAKVKALLDAIKSLQHFVKPLLGMGDESDKDERFYGELASLWTELDTVTPLYNMIRNYMTRKPYSEKKIKLNFENPQLLGGWDANKEKDYATIILRRNGMYYLAIMDKDSKKLLGKTMPSDGECYEKMVYKLLPGANKMLPKVFFAKSRINDFKPSKKIVENYNNGTHKKGKNFNINDCHDLIDYFKQSIDKHEDWSKFGFNFSDTSTYEDLSGFYREVEQQGYKLSFTNISVSFIDKLVDEGKMYLFQIYNKDFSDYSKGTPNMHTLYWKALFDERNLADVVYKLNGQAEMFYRKKSIDYTHPTHPANHPIQNKNKDNKKKESVFEYDLVKDRRYTVDKFLFHVPINMNFKSVGSENINQQVREYLQQADDTHIIGIDRGERHLLYLVVIDMQGNIKEQFTLNEIVNEYNGNTYRTNYHDLLDTREEERLTARQSWQTIENIKELKEGYLSQVVHKITQLMVKYHAVVVLEDLNKGFMRGRQKVEKQVYQKFEKMLIDKLNYLVDKKADAAQSGGLLNAYQLTSKFDSFQKLGKQSGFLFYIPAWNTSKIDPVTGFVNLLDTRYQNTEKSKAFFSKFDAIRYNADKDWFEFNLDYDKFGTKAEGTRTKWILCTQGNRICRNADKNPQWDNPKIDLTRELKSLFEHYNINICGNLKEEICSQTDKAFFTGLLHILKLTLQMRNSITGTETDYLVSPVADENGVFYDSRSCGDRLPENADANGAYNIARKGLMLIGQIKETKDLANFKYDISNKAWLNFAQQKPYKNE

SEQ ID NO: 1562 - protein, 1274 aa, Unknown
  Description of Unknown: uncultivated organism sequence
  Category: MG75 effectors
  Description: MG75-48 effector
MAKNFEDFKRLYPLSKTLRFEAKPIGATLDNIIKSGLLDEDEHRAASYVKMKKLIDEYHKVFIDRVLDNGCLPLKNEGQNNSLTEYYESYVSKSQNEDAKKAFEENQQNLRSIVAKKLTDDKAYANLFGKNLIESYKDKEDKKKIIDSDLIQFICTAEATQLDSMSQDEAKEIVKEFWGFTTYFVGFFDNRKNMYTAEEKSTGIAYRLINENLPKFIDNMEAFKKAIARPEIQANMEELYSNFSEYLNVESIQEMFLLDYYNMLLTQKQIDVYNAIIGGKTDDEHDVKIKGINEYINLYNQQHKDDKLPKLKALFKQILSDRNAISWLPEEFNSDQEVLNAIKDCYERLSENVLGDKVLKSLLGSLSDYTLDGIFIRNDLQLTDISQKMFGNWGVIQNAIMQNIKRVAPARKHKESEEDYEKRIAGIFKKADSFSISYINDCLNEADPNNAYFVENYFATFGAVNTPTMQRENLFALVQNAYTEVASLLHSDYPTAKHLAQDKANVAKIKALLDAIKSLQHFVKPLLGKGDESDKDERFYGELASLWAELDTVTPLYNMIRNYITRKPYSQKKIKLNFENPQLLGGWDANKEKDYATIILRRNGLYYLAIMNKESKKLLGKAMPSDGECYEKMVYKLLPGANKMLPKVFFAKSRMEDFKPSKELVEKYNNGTHKKGKNFNIQDCHNLIDYFKQSINKHEDWGKFGFNFSDTSTYEDLSGFYREVEQQGYKLSFARVSVSYINQLVEEGKMYLFQIYNKDFSEYSKGTPNMHTLYWKALFDERNLADVVYKLNGQAEMFYRKKSIENTHPTHPANHPILNKNKDNKKKESLFDYDLIKDRRYTVDKFMFHVPITMNFKSSGSENINQDVKAYLRHADDMHIIGIDRGERHLLYLVVIDLQGNIKEQYSLNEIVNEYNGNTYHTNYHDLLDVREEERLKARQSWQTIENIKELKEGYLSQVIHKITQLMVKYHAIVVLEDLNMGFMRGRQKVEKQVYQKFEKMLIDKLNYLVDKKADASVSGGWLNAYQLTSKFDSFQKLGKQSGFLFYIPAWNTSKIDPVTGFVNLLDARYQNVEKAKAFFSKFDAIRYNKDKDWFEFNLDYDKFGKKAEGTRTKWTLCTRGMRIDTFRNKEKNSQWDNQEVDLTAEMKSLLEHYYIDIHGNLKDAISAQTDKAFFTGLLHILKLTLQMRNSITGTETDYLVSPVADENGIFYDSRSCGEELPENADANGAYNIARKGLMLIEQIKGAEDLGNLKFDISNKAWLNFAQQKPYKNG

SEQ ID NO: 1563 - protein, 1274 aa, Unknown
  Description of Unknown: uncultivated organism sequence
  Category: MG75 effectors
  Description: MG75-49 effector
MAKNFEDFKRLYPLSKTLRFEAKPIGATLDNIVKSGLLDEDEHRAASYVKVKKLIDEYHKVFIDRVLDDGCLPLENKGNNNSLAEYYESYVSRAQDEDAKKKFKEIQQNLRSVIAKKLTEDKAYANLFGNKLIESYKDKEDKKKIIDSDLIQFINTAESTQLDSMSQDEAKELVKEFWGFVTYFYGFFDNRKNMYTAEEKSTGIAYRLVNENLPKFIDNIEAFNRAITRPEIQENMGVLYSDFSEYLNVESIQEMFQLDYYNMLLTQKQIDVYNAIIGGKTDDEHDVKIKGINEYINLYNQKHKDDKLPKLKSLFKQILSDRNAISWLPEEFNSDQEVLNAIKDCYERLSENVLGDKVLKSMLGSLADYSLDGIFIRNDLQLTDISQKMFGNWSVIQNAIMQNIKHVAPARKHKESEEEYENRIAGIFKKADSFSISYIDACLNETDPNNAYFVENYFATLGAVDTPTMQRENLFALVQNAYTEITALLHSDYPTEKNLAQDKANVAKIKALLDAIKSLQHFVKPLLGKGDESDKDERFYGELASLWAELDTMTPLYNMIRNYMTRKPYSQKKIKLNFENPQLLGGWDANKEKDYATIILRRNGLYYLAIMNKDSKKLLGKAMPSDGECYEKMVYKLLPGANKMLPKVFFAKSRMEDFKPSKELVEKYNNGTHKKGKNFNIQDCHNLIDYFKQSIDKHEDWSKFGFKFSDTSTYEDLSGFYREVEQQGYKLSFARVSVSYINQLVEEGKMYLFQIYNKDFSEYSKGTPNMHTLYWKALFDERNLADVVYKLNGQAEMFYRKKSIENTHPTHPANHPILNKNKDNNKKESLFEYDLIKDRRYTVDKFMFHVPITMNFKSSGSENINQDVKAYLCHADDMHIIGIDRGERHLLYLVVIDLQGNIKEQFSLNEIVNDYNGNTYHTNYHDLLDVREDERLKARQSWQTIENIKELKEGYLSQVIHKITQLMVKYHAIVVLEDLNMGFMRGRQKVEKQVYQKFEKMLIEKLNYLVDKKADASVSGGLLNAYQLTSKFDSFQKLGKQSGFLFYIPAWNTSKIDPVTGFVNLLDTRYQNVEKAKSFFSKFDAIRYNKDKEWFEFNLDYDKFGKKAEGTRTKWTLCTRGMRIDTFRNKEKNSQWDNQEVDLTAEMKSLLEHYYIDIHSNLKDAISAQTDKAFFTGLLHILKLTLQMRNSITGTETDYLVSPVVDENGIFYDSRSCGDELPENADANGAYNIARKGLMMIEQIKDAKDLDNLKFDISNKAWLNFAQQKPYKNG

SEQ ID NO: 1564 - protein, 1271 aa, Unknown
  Description of Unknown: uncultivated organism sequence
  Category: MG75 effectors
  Description: MG75-50 effector
MKFDDFKKLYSLSKTLRFESKPVGSTLKNIIESGLLEEDEHRAQSYVKVKKLIDEYHKVFIDRVLNDGCLTIENKGKKDSLEEYYESYMSKSNDENVSKTFKDIQENLRSVIAKKLTDDKAYANLFGKNLIESYKDKDDKNKIIDSDLIQFINTAEPSQLDSMSQDEAKELVKEFWGFTTYFVGFFDNRKNMYTSEEKSTGIAYRLVNENLPKFIDNMEAFKKAIAKPEIQANIEELYSNFAEYLNVESIQEMFQLDYYNMLLTQKQIDVYNAIIGGKTDEDHDVKIKGINEYINLYNQQHKDEKLPKLKALFKQILSDRNAISWLPEEFNSDQEVLDAIKDCYERLSENVLGDKVLKSLLCSLSDYNLNGIFVRNDLQLTDISQKMFGNWSVIQNAIMQNIKNVAPARKRKESEEDYEKRISDIFKKADSFSIQYINDCLNEMDDNNLHAVDGYFATLGAVNTPTMQRENLFALIQNAYTDISDLLDTPYPENKNLAQDKTNVAKVKALLDAIKSLQHFVKPLLGMGDESDKDERFYGELASLWTELDTVTPLYNMIRNYMTRKPYSEKKIKLNFENPQLLGGWDANKEKDYATIILRRNGMYYLAIMDKDSKKLLGKTMPSDGECYEKMVYKLLPGANKMLPKVFFAKSRINDFKPSKKIVENYNNGTHKKGKNFNINDCHDLIDYFKQSIDKHEDWSKFGFNFSDTSTYEDLSGFYREVEQQGYKLSFTNISVSFIDKLVDEGKMYLFQIYNKDFSDYSKGTPNMHTLYWKALFDERNLADVVYKLNGQAEMFYRKKSIDYTHPTHPANHPIQNKNKDNKKKESVFEYDLVKDRRYTVDKFLFHVPITMNFKSVGSENINQQVREYLQQADDTHIIGIDRGERHLLYLVVIDMQGNIKEQFTLNEIVNEYNGSTYRTNYHDLLDTREEERLTARQSWQTIENIKELKEGYLSQVIHKITQLMVKYHAVVVLEDLNKGFMRGRQKVEKQVYQKFEKMLIDKLNYLVDKKADAAQSGGLLNAYQLTSKFDSFQKLGKQSGFLFYIPAWNTSKIDPVTGFVNLLDTRYQNTEKAKAFFSKFDAIRYNADKDWFEFNLDYDKFGTKAEGTRTTWTLCTQGNRICTFRNAEKNSQWDNQEVDLTGELKSLFEHYNINICGNLKEEICSQTEKAFFTGLLHILKLTLQMRNSITGTETDYLVSPVADENGVFYDSRSCGDRLPENADANGAYNIARKGLMLIGQIKETKDLADFKYDISNKAWLNFAQQKPYKK

SEQ ID NO: 1565 - protein, 1219 aa, Unknown
  Description of Unknown: uncultivated organism sequence
  Category: MG75 effectors
  Description: MG75-51 effector
MIDEYHKVFIDRVLNDGCLTIENKGKQDSLEEYFESYISKSNDENANKAFKEIQGNLRSLIANKLTKDKGYANLFGKNLIESYKDKDDTKKIIDSDLIQFINTAEPSKLDSMSQDEAKELVKEFRGFTTYFVGFFDNRKNMYTSEEKSTGIAYRLVNENLPKFIDNMEAFKKAIAKPEIQANMEELYSNFAEYLNVESIQEMFKLDYYNMLLTQKQIDVYNAIIGGKTDEDHDVKIKGINEYINLYNQQHKDEKLPKLKALFKQILSDRNAISWLPEEFNSDQDVLNAIKDCYERLSENVLGDKVLKSLLCSLSDYNLNGIFVRNDLQLTDISQKTFGNWSVIQNAIMQNIKNVAPARKRKESEEDYEKRISDIFKKADSFSIQYINDCLNEMDNNNLHAVDGYFATLGAVNTPTMQRENLFALIQNAYTDISDLLDTPYPENKNLAQDKTNVAKVKALLDAIKSLQHFVKPLLGMGDESDKDERFYGELASLWTELDTVTPLYNMIRNYMTRKPYSEKKIKLNFENPQLLGGWDANKEKDYATIILRRNGMYYLAIMDKDSKKLLGKTMPSDGECYEKMVYKLLPGANKMLPKVFFAKSRINDFKPSKKIVENYNNGTHKKGKNFNINDCHDLIDYFKQSIDKHEDWSKFGFNFSDTSTYEDLSGFYREVEQQGYKLSFTNISVSFIDKLVDEGKMYLFQIYNKDFSDYSKGTPNMHTLYWKALFDERNLADVVYKLNGQAEMFYRKKSIDYTHPTHPANHPIQNKNKDNKKKESVFEYDLVKDRRYTVDKFLFHVPINMNFKSVGSENINQQVREYLQQADDTHIIGIDRGERHLLYLVVIDMQGNIKEQFTLNEIVNEYNGNTYRTNYHDLLDTREEERLTARQSWQTIENIKELKEGYLSQVVHKITQLMVKYHAVVVLEDLNKGFMRGRQKVEKQVYQKFEKMLIDKLNYLVDKKADAAQSGGLLNAYQLTSKFDSFQKLGKQSGFLFYIPAWNTSKIDPVTGFVNLLDTRYQNTEKSKAFFSKFDAIRYNADKDWFEFNLDYDKFGTKAEGTRTKWILCTQGNRICRNADKNPQWDNPKIDLTRELKSLFEHYNINICGNLKEEICSQTDKAFFTGLLHILKLTLQMRNSITGTETDYLVSPVADENGVFYDSRSCGDRLPENADANGAYNIARKGLMLIGQIKETKDLANFKYDISNKAWLNFAQQKPYKNE

SEQ ID NO: 1566 - protein, 1235 aa, Unknown
  Description of Unknown: uncultivated organism sequence
  Category: MG75 effectors
  Description: MG75-52 effector
METFSGFTNLYPLSKTLRFRLIPVGETLKHFIGSGILEEDQHRAESYVKVKAIIDDYHRAYIENSLSGFELPLESTGKFNSLEEYYLYHNIRNKTEKNQKSLSTVRFNLRKQIVKQLTKNELYKRIYKQNLIKKDLIDFVKNEPDANEKIALISEFRNFTVYFKGFHENRRNMYLDEEKSTSIAFRLIHENLPKFIDNMEVFAKIQNTSISENFDVIQKELCPELVTLCEMFKLGYFNKTLSQKQINAYNTVIGELNKYLNHYNQQHKQEKLPKMKLLFKQILSDRESTSWLPERFANDGQVIGAIVNFWNTIHDTVLAEGGLKTIIASLGSYSLEGIFLKNDLQLTDVSQKATGSWSKITAAIKQKLEDMNPQTKKESYETYQGRIDKLFKFYKSFSLAFINECLRGEYKIEDYFLKLGAVNSSSLQKENHFSHILNTYTDVKEVIGFYSESTDTKLIRDNGSIQKIKLFLDAVKDLQAYVKPLLGNGDETGKDERFYGDLIEYWSQLDLITPLYNMVRNYVTQKPYSVDKIKLNFRNPTLLDGWDLNQETANTSVILRRDGKYYLAIMNNKSRKVFLKPSGTGKDCYEKMEYKLIPGAYKMLPKVFFAKSKINKFMPDEYLLSNYKKGTHKKNNANFDLDDCHTLIDFFKRSLNKHEDWKNFDFKFSDTSTYTDINNFYKEIDNQAYKLSFRPVPSDFVDKLVEEGKIFLFWIYNKDFSGHSKGTPNMHTLYWRMLFDERNLEDVVYSLNGGAEVFFRKASINVSHPTHPANIPIKKKNLKHKGEERILKYDLIKDKRYTIDQFQFHVPITMNFKVAGNGNININQKAIDYLRSASDTHIIGIDRGERNLLYLVVIDGNGKICEQFSLNEIEVEYNGEKYSTNYHDLLNVKENERKQARQSWQSIANIKDLKEGYLSQVIHKISELIVKYNAIVVLEDLNAGFMRGRQKVEKQVYQKFEKKLIEKLNYLVFKKQSSDLPGGLMHAYQLANKFESFNTLGKQSGFLFYIPAWNTSKMDPVTGFVNLFDVKYESVDKAKSFFSKFDSIRYNVERDMFEWKFNYGEFTKKAEGAKTDWTVCSYGNRIITFRNPDKNSQWDNKEINLTENIKLLFERFGIDLSSNLKDEIMERTEKEFFIELISLFKLVLQMRNSWTGTDIDYLVSPVCNENGEFFDSRNVDETLPQNADANGAYNIARKGMILLDKIKKNNGEKKLALSITNREWLSFAQGCCKNG

SEQ ID NO: 1567 - protein, 1275 aa, Unknown
  Description of Unknown: uncultivated organism sequence
  Category: MG75 effectors
  Description: MG75-53 effector
MAKNFEDFKRLYPLSKTLRFEAKPIGATLDNIVKSGLLDEDEHRAASYVKVKKLIDEYHKVFIDRVLADGCLPLENEGHNNSLTEYYDSYVSKSQNEDAKKVFEENQQNLRSIIAKKLTEDKAYSNLFGTKLIESYKDKADKAKIIDSELIQFINTAESTQLDSMSQDEAKKLVKEFWGFTTYFVGFFDNRKNMYTAEEKSTGIAYRLVNENLPKFIDNMEAFKKAIARPEIQANMGELYSNFSEYLNVESVPEMFQLDYYNMLLTQKQIDVYNAIIGGKTDDEHDVKIKGINEYINLYNQQHKDDKLPKLKALFKQILSDRNAISWLPEEFNSDQEVLNAIKDCYERLSENVLGDKVLKSLLGSLADYSLDGIFIRNDLQLTDISQKMFGNWGVIQNAIMQNIKHVAPARKHKESEEDYEKRIAGIFKKADSFSISYINDCLNEADPNNAYFVENYFATLGAVDTPTMQRENLFALVQNAYTEMTALLHSDYPTEKKLAQDKANVAKIKALLDAIKSLQHFVKPLLGKGDESDKDERFYGELALLWAELETVTPLYNMIRNYMTRKPYSQKKIKLNFENPQLLGGWDANKEKDYATIILRRNGLYYLAIMNKDSKKLLGKAMPSDGECYEKMVYKLLPGANKMLPKVFFAKSRMEDFKPSKELVEKYNNGTHKKGKNFNIQDCHNLIDYFKQSIDKHEDWSKFGFNFSDTSTYEDLSGFYREVEQQGYKLSFTRVSVSFIDQLVEEGKMYLFQIYNKDFSEYSKGTPNMHTLYWKALFDERNLADVVYKLNGQAEMFYRKKSIENTHPTHPANHPILNKNKDNKKKESLFGYDLIKDRRYTVDKFMFHVPITMNFKSSGSENINQDVKAYLRHADDMHIIGIDRGERHLLYLVVIDLQGNIKDQFSLNEIVNDYNGNTYHTNYHDLLDVREEERLKARQSWQTIENIKELKEGYLSQVIHKITQLMVRYHAIVVLEDLSKGFMRSRQKVEKQVYQKFEKMLIDKLNYLVDKKTDVSTPGGLLNAYQLTCKSDSSQKLGKQSGFLFYIPAWNTSKIDPVTGFVNLLDTHSLNSKEKIKAFFSKFDAIRYNKDKKWFEFNLDYDKFGKKAEDTRTKWTLCTRGMRIDTFRNKEKNSQWDNQEVDLTTEMKSLLEHYYIDIHGNLKDAISTQTDKAFFTGLLHILKLTLQMRNSITGTETDYLVSPVADENGIFYDSRSCGDQLPENADANGAYNIARKGLMLIEQIKNAEDLNNVKFDISNKAWLNFAQQKPYKNG

SEQ ID NO: 1568 - protein, 1274 aa, Unknown
  Description of Unknown: uncultivated organism sequence
  Category: MG75 effectors
  Description: MG75-54 effector
MIKEFEDFKRLYPIQKTLRFEAKPIGSTLEHLVKSGILDEDEHRAASYVRVKKLIDEYHKAFIDRVLNDGCLPFKNKGEKNSIEEYYESYTSKDKEEDSKKRFKEIQQNLRSIIVNKLTKDKAYANLFGNYLIESHKDKEDKKTMIDSDLIQFIKDADSLELGSMSKDEAIELVKEFWSFTTYFVGFYDNRKNMYSAEEKSTAIAYRLINENLPKFIDNMEAFKKIISRPEIQANTEQLYSDFAEYLNVESIQEMFQLDYYDLLLTQKQIDVYNAIIGGKTDEKHDIKTKGINEYINLYNQQHKEDKLPKLKVLFKQILSDRNAISWLPEEFNSDQEMLISIKDCYERLCINVLGDKVLKSLLSSLDDYELEGIFLQNDQQLTNISQKIFGSWSVIQEAITRNIKNTAPARKHKETEEDYEKRIFSIFKQASSFSIKYIDDCLYDLDKNNINTIENYFATLGAENTPEIQRENLFAIIKNAYTDVAGLLCSAYPTEKNLSQDENHVAKIKALLDAIKSLQHFVKPLLGNGDEHDKDERFYGELVSLWTELDTVTPLYNMVRNRITQKPYSQKKIKLNFENPQLLGGWDANKEKDYSCIILRREGMYYLAIMDKDSRKLLGKEMPSDGECYEKMVYKLLPGANKMLPKVFFAKSRIEEFMPSEQIIEKYNNGTHKKGKDFNITDCHNLIDYFKQSINKHEDWSKFGFTFSETSTYEDLSGFYREVEQQGYKLSFTNVSASYINSLVDEGKMYLFQIYNKDFSEYSKGTPNMHTLYWKALFDEQNLADVIYKLNGQAEIFYRKKSIDATHPTHPANRPVQNKNKDNKKKESLFEYDLIKDRRYSVDKFMFHVPITMNFKSSGSENINQQVKEYLQLANDTHIIGIDRGERHLLYLVVIDMHGNIKEQFSLNEIVNTYKGNIYHTNYHDLLEAREEERLKARQSWQTIENIKELKEGYLSQVVHKITQLMVKYHAIVVLEDLNMGFMRGRQKVEKQVYQKFEKMLIDKLNYLVNKQANITEAGGLLNAYQLTSKFDSFQKLGKQSGFLFYIPAWNTSKIDPVTGFVNLLDTRYQNVEKAKAFFSKFDAIRFNQDKDWFEFNLDYNKFGEKAEGTRTRWTLCTQGKRIYTFRNEDKNSQWDNIEIDLTSEMKSLLELYHIDIQGNLKEAINSQTDKSFFTKLIHLLKLTLQIRNSITRTETDYLISPVADEDGEFYDSRSCGPELPKNADANGAYNIARKGLMLIRQIKEAKELDKIKFDISNKAWLNFAQQKPYKND

SEQ ID NO: 1569 - protein, 957 aa, Unknown
  Description of Unknown: uncultivated organism sequence
  Category: MG75 effectors
  Description: MG75-55 effector
MAKNFEDFKRLYSLSKTLRFEAKPIGATLDNIVKSGLLDEDEHRAASYVKVKKLIDEYHKVFIDRVLANGCLPLKNEGHNNSLTEYYDNYVSKSQNEDAKKTFEENQQNLRSIIAKKLTEDKAYANLFGKNLLESYKDKTDKTKIIDSDLFKFINTAESTQLDSMSQDEAKELVKEFWGFITYFYGFFDNRKNMYTSEDKSTGIAYRLINENLPKFIDNMEAFNTAVTRPEIQANMDELYSNFSEYLNVESIQEMFQLDYYNMLLTQKQIDVYNAIIGGKTDDEHDVKIKGINEYINLYNQKHKDDKLPKLKALFKQILSDRNAISWLPEEFNSDQEVLNAIKDCYERLSENVLGDKVLKSLLGSLADYSLDGIFIRNDLQLTDISQKMFGNWGVIQNAIMQDIKHVAPARKHKESEEDYEKRIAGIFKKADSFSISYINDCLNEADPNNAYFVENYFATLGAVDTPTMQRENLFALVQNAYTEITALLHSDYPTEKNLAQDKANVAKIKALLDAIKSLQHFVKPLLGKGDESDKDERFYGELASLWTELDTVTPLYNMIRNYMTRKPYSQKKIKLNFENPQLLGGWDVNKEKDYATIILRRNGLYYLAIMNKDSKKLLGKAMPSDGECYEKMVYKLLPGANKMLPKVFFAKSRMEDFKPSKELVEKYNNGTHKKGKNFNIQDCHNLIDYFKQSIDKHEDWSKFGFKFSDTSTYEDFSGFYREVEQQGYKLSFARVSVSYINQLVEEGKMYLFQIYNKDFSEYSKGTPNMHTLYWKALFDERNLADVVYKLNGQAEMFYRKKSIENTHPTHPANHPILNKNKDNKKKESLFDYDLIKDRRYTVDKFMFHVPITMNFKSVGSENINQDVKAYLRHADDMHIIGIDRGERHLLYLVVIDLQGNIKEQYSLNEIVNEYNGNTYHTNYHDLLDVREEERLKARQSWQTIENIKELKEGYLS

SEQ ID NO: 1570 - protein, 1270 aa, Unknown
  Description of Unknown: uncultivated organism sequence
  Category: MG75 effectors
  Description: MG75-56 effector
MEFDDFKRLYPLSKTLRFEAKPIGATLKNIIKSGLLEEDEHRAQSYVKVKKLIDEYHKVFIDRVLNDGCLTIENKGKQDSLEEYFESYISKSNDENANKAFKEIQGNLRSLIANKLTKDKGYANLFGNKLIESYKDKDDTKKIIDSDLIQFINTAEPSKLDSMSQDEAKELVKEFRGFTTYFVGFFDNRKNMYTSEEKSTGIAYRLVNENLPKFIDNMEAFKKAIAKPEIQANMEELYSNFAEYLNVESIQEMFKLDYYNMLLTQKQIDVYNAIIGGKTDEDHDVKIKGINEYINLYNQQHKDEKLPKLKALFKQILSDRNAISWLPEEFNSDQDVLNAIKDCYERLSENVLGDKVLKSLLCSLSDYNLNGIFVRNDLQLTDISQKTFGNWSVIQNAIMQNIKNVAPARKRKESEEDYEKRISDILKKADSFSIQYINDCLNEMDNNNLHAVDGYFATLGAVNTPTMQRENLFALIQNAYTDISDLLDTPYPENKNLAQDKTNVAKVKALLDAIKSLQHFVKPLLGMGDESDKDERFYGELASLWTELDTVTPLYNMIRNYMTRKPYSEKKIKLNFENPQLLGGWDANKEKDYATIILRRNGMYYLAIMDKDSKKLLGKTMPSDGECYEKMVYKLLPGANKMLPKVFFAKSRINDFKPSKKIVENYNNGTHKKGKNFNINDCHNLIDYFKQSIDKHEDWSKFGFNFSDTSTYEDLSGFYREVEQQGYKLSFTNISVSFIDKLVDEGKMYLFQIYNKDFSDYSKGTPNMHTLYWKALFDERNLADVVYKLNGQAEMFYRKKSIDYTHPTHPANHPIQNKNKDNKKKESVFEYDLVKDRRYTVDKFLFHVPITMNFKSVGSENINQQVREYLQQADDTHIIGIDRGERHLLYLVVIDMQGNIKEQFTLNEIVNEYNGNTYRTNYHDLLDTREEKRLTARQSWQTIENIKELKEGYLSQVVHKITQLMVKYHAVVVLEDLNKGFMRGRQKVEKQVYQKFEKMLIDKLNYLVDKKADAAQSGGLLNAYQLTSKFDSFQKLGKQSGFLFYIPAWNTSKIDPVTGFVNLLDTRYQNTEKSKAFFSKFDAIRYNADKDWFEFNLDYDKFGTKAEGTRTKWILCTQGNRICRNADKNPQWDNPKIDLTRELKSLFEHYNINICGNLKEEICSQTDKAFFTGLLHILKLTLQMRNSITGTETDYLVSPVADENGVFYDSRSCGDRLPENADANGAYNIARKGLMLIGQIKETKDLANFKYDISNKAWLNFAQQKPYKNE

SEQ ID NO: 1571 - protein, 1292 aa, Unknown
  Description of Unknown: uncultivated organism sequence
  Category: MG75 effectors
  Description: MG75-57 effector
MNRKTKYQKPKTESKIKSMIKEFEDFKRLYPIQKTLRFEAKPIGSTLEHLVKSGILDEDEHRAASYVRVKKLIDEYHKAFIDRVLNDGCLPFKNKGEKNSIEEYYESYTSKDKEEDSKKRFKEIQQNLRSIIVNKLTKDKAYANLFGNYLIESHKDKEDKKTMIDSDLIQFIKDADSLELGSMSKDEAIELVKEFWSFTTYFVGFYDNRKNMYSAEEKSTAIAYRLINENLPKFIDNMEAFKKIISRPEIQANTEQLYSDFAEYLNVESIQEMFQLDYYDLLLTQKQIDVYNAIIGGKTDEKHDIKTKGINEYINLYNQQHKEDKLPKLKVLFKQILSDRNAISWLPEEFNSDQEMLISIKDCYERLCINVLGDKVLKSLLSSLDDYELEGIFLQNDQQLTNISQKIFGSWSVIQEAITRNIKNTAPARKHKETEEDYEKRIFSIFKQASSFSIKYIDDCLYDLDKNNINTIENYFATLGAENTPEIQRENLFAIIKNAYTDVAGLLCSAYPTEKNLSQDENHVAKIKALLDAIKSLQHFVKPLLGNGDEHDKDERFYGELVSLWTELDTVTPLYNMVRNRITQKPYSQKKIKLNFENPQLLGGWDANKEKDYSCIILRREGMYYLAIMDKDSRKLLGKEMPSDGECYEKMVYKLLPGANKMLPKVFFAKSRIEEFMPSEQIIEKYNNGTHKKGKDFNITDCHNLIDYFKQSINKHEDWSKFGFTFSETSTYEDLSGFYREVEQQGYKLSFTNVSASYINSLVDEGKMYLFQIYNKDFSEYSKGTPNMHTLYWKAPFDEQNLADVIYKLNGQAEIFYRKKSIDATHPTHPANRPVQNKNKDNKKKESLFEYDLIKDRRYSVDKFMFHVPITMNFKSSGSENINQQVKEYLQLANDTHIIGIDRGERHLLYLVVIDMHGNIKEQFSLNEIVNTYKGNIYHTNYHDLLEAREEERLKARQSWQTIENIKELKEGYLSQVVHKITQLMVKYHAIVVLEDLNMGFMRGRQKVEKQVYQKFEKMLIDKLNYLVNKQANITEAGGLLNAYQLTSKFDSFQKLGKQSGFLFYIPAWNTSKIDPVTGFVNLLDTRYQNVEKAKAFFSKFDAIRFNQDKDWFEFNLDYNKFGEKAEGTRTRWTLCTQGKRIYTFRNEDKNSQWDNIEIDLTSEMKSLLELYHIDIQGNLKEAINSQTDKSFFTKLIHLLKLTLQIRNSITRTETDYLISPVADEDGEFYDSRSCGPELPKNADANGAYNIARKGLMLIRQIKEAKELDKIKFDISNKAWLNFAQQKPYKND

SEQ ID NO: 1572 - protein, 1272 aa, Unknown
  Description of Unknown: uncultivated organism sequence
  Category: MG75 effectors
  Description: MG75-58 effector
MKFDDFKKLYSLSKTLRFEAKPVGSTLKNIIESGLLEEDEHRAQSYVKVKKLIDEYHKVFIDRVLNDGCLTIENKGKKDSLEEYYESYMSKSNDENVSKTFKEIQENLRSVIAKKLTDNNAYANLFGNKLIESYKDKDEKNKIIDSDLIQFINTAEPSQLDSMSQDEAKELVKEFWGFTTYFVGFFDNRKNMYTSEEKSTGIAYRLVNENLPKFIDNMEAFKKAIAKPEIQANMEELYSNFAEYLNVESIQEMFQLDYYNMLLTQKQIDVYNAIIGGKTDEEHDVKIKGINEYINLYNQQHKDEKLPKLKALFKQILSDRNAISWLPEEFNSDQEVLNAIDDCYKRLSENVLGDKVLKSLLCSLDDYNLDGIFVRNDLQLTDISQKMFGNWSVIQNAIMQNIKNVAPARKRKESEEDYEKRISDIFKKADSFSIQYINDCLNEMDDNNLHAVDGYFATLGAVNTPAMQRENLFALIQNAYTDISNLLETPYPENKNLAQDKTNVAKVKALLDAIKSLQHFVKPLLGKGDESDKDERFYGELASLWTELDTVTPLYNMIRNYMTRKPYSEKKIKLNFENPQLLGGWDANKEKDYATIILRRNGMYYLAIMDKDSKKLLGKTMPSDGECYEKMVYKLLPGANKMLPKVFFAKSRINDFKPSKLIVENYNNGTHKKGKNFNINDCHNLIDYFKQSIDKHEDWSKFGFNFSDTSTYEDLSGFYREVEQQGYKLSFTNVSVSFIDKLVDEGKMYLFQIYNKDFSDFSKGTPNMHTLYWKALFDERNLADVVYKLNGQAEMFYRKKSINNTHPTHPANHPIQNKNKDNKKKESVFEYDLIKDRRYTVDKFLFHVPITMNFKSVGSENINQQVREYLQQADDTHIIGIDRGERHLLYLVVIDMQGNIKEQFTLNEIVNEYNGNTYRTNYHDLLDTREEERLTARQSWQTIENIKELKEGYLSQVVHKITQLMVKYHAVVVLEDLNKGFMRGRQKVEKQVYQKFEKMLIDKLNYLVDKKADAAQSGGLLNAYQLTSKFDSFQKLGKQSGFLFYIPAWNTSKIDPVTGFVNLLDTRYQNTEKAKAFFSRFDAIRYNANKDWFEFYLDYDKFCTKAEGTRTRWTLCTQGSRISTFRNADKNSQWDNQKVDLTREIKSLFNYYHINICGNLKEEICSQTDKAFFTGLLHMLKLTLQMRNSITGTETDYLISPVADENGTFYDSRSCGDTLPKNADANGAYNIARKGLMFIGQIKKTKDLANFKYDISNKAWLNFAQQKPYKNE

SEQ ID NO: 1573 - protein, 1274 aa, Unknown
  Description of Unknown: uncultivated organism sequence
  Category: MG75 effectors
  Description: MG75-59 effector
MAKNFEDFKRLYPLSKTLRFEAKPIGATLDNIIKSGLLDEDEHRAASYVKMKKLIDEYHKVFIDRVLDNGCLPLEDKGDNNSLAEYYESYVSKAQDEDAIKKFKEIQQNLCSIIAKKLTDDKAYANLFGNKLIESYKDKADKTKIIDSDLIQFINTAESTQLVSMSQDEAKELVKEFWGFTTYFEGFFKNRKNMYTPEEKSTGIAYRLINENLPKFIDNMEAFKKAITRPEIQANMEELYSDFSEYLNVESIQEMFQLDYYNMLLTQKQIDVYNAIIGGKTDDEHDVKIKGINEYINLYNQQHKDDKLPKLKALFKQILSDRNAISWLPEEFNSDQEVLNAIKDCYERLAENVLGDKVLKSLLCSLSDYTLDGIFIRNDLQLTDISQKMFGNWGVIQNAIMQNIKRVAPARKHKESEEDYEKRIAGIFKKADSFSISYINDCLNEADSNNAYFVENYFATFGAVNTPTMQRENLFALVQNAYTEVASLLHSDYPTAKHLAQDKANVAKIKALLDAIKSLQHFVKPLLGKGDESDKDERFYGELASLWAELDTVTPLYNMIRNYITRKPYSQKKIKLNFENPQLLGGWDANKEKDYATIILRRNGLYYLAIMNKESKKLLGKAMPSDGECYEKMVYKLLPGANKMLPKVFFAKSRMEDFKPSKELVEKYNNGTHKKGKNFNIQDCHNLIDYFKQSISKHEDWGKFGFNFSDTSTYEDLSGFYREVEQQGYKLSFARVSVSYINQLVEEGKMYLFQIYNKDFSEYSKGTPNMHTLYWKALFDERNLADVVYKLNGQAEMFYRKKSIENTHPTHPANHPILNKNKDNKKKESLFEYDLIKDRRYTVDKFMFHVPITMNFKSVGSENINQGVKEYLHHADDMHIIGIDRGERHLLYLVVIDLQGNIKEQYSLNEIVNEYNGNTYHTNYHDLLDAREDERLKARQSWQTIENIKELKEGYLSQVIHKITQLMVKYHAIVVLEDLNMGFMRGRQKVEKQVYQKFEKMLIDKLNYLVDKKADASVSGGWLNAYQLTSKFDSFQKLGKQSGFLFYIPAWNTSKIDPVTGFVNLLDARYQNVEKAKAFFSKFDAIRYNKDKDWFEFNLDYDKFGKKAEGTRTKWTLCTRGMRIDTFRNKEKNSQWDNQEVDLTAEMKSLLEHYYIDIHGNLKDAISAQTDKAFFTGLLHILKLTLQMRNSITGTETDYLVSPVADENGIFYDSRSCGEELPENADANGAYNIARKGLMLIEQIKGAEDLGNLKFDISNKAWLNFAQKKPYKNG

SEQ ID NO: 1574 - protein, 1275 aa, Unknown
  Description of Unknown: uncultivated organism sequence
  Category: MG75 effectors
  Description: MG75-60 effector
MAKNFEDFKRLYSLSKTLRFEAKPIGATLDNIVKSGLLDEDEHRAASYVKVKKLIDEYHKVFIDRVLANGCLPLKNEGHNNSLTEYYDNYVSKSQNEDAKKTFEENQQNLRSIIAKKLTEDKAYANLFGKNLLESYKDKTDKTKIIDSDLFKFINTAESTQLDSMSQDEAKELVKEFWGFITYFYGFFDNRKNMYTSEDKSTGIAYRLINENLPKFIDNMEAFNTAVTRPEIQANMDELYSNFSEYLNVESIQEMFQLDYYNMLLTQKQIDVYNAIIGGKTDDEHDVKIKGINEYINLYNQKHKDDKLPKLKALFKQILSDRNAIFWLPEEFNSDQEVLNAIKDCYERLSENVLGDKVLKSLLGSLADYSLDGIFIRNDLQLTDISQKMFGNWGVIQNAIMQDIKHVAPARKHKESEEDYEKRIAGIFKKADSFSISYINDCLNEADPNNAYFVENYFATLGAVDTPTMQRENLFALVQNAYTEITALLHSDYPTEKNLAQDKANVAKIKALLDAIKSLQHFVKPLLGKGDESDKDERFYGELASLWTELDTVTPLYNMIRNYMTRKPYSQKKIKLNFENPQLLGGWDVNKEKDYATIILRRNGLYYLAIMNKDSKKLLGKAMPSDGECYEKMVYKLLPGANKMLPKVFFAKSRMEDFKPSKELVEKYNNGTHKKGKNFNIQDCHNLIDYFKQSIDKHEDWSKFGFKFSDTSTYEDFSGFYREVEQQGYKLSFARVSVSYINQLVEEGKMYLFQIYNKDFSEYSKGTPNMYTLYWKALFDERNLADVVYKLNGQAEMFYRKKSIENTHPTHPANHPILNKNKDNKKKESLFDYDLIKDRRYTVDKFMFHVPITMNFKSVGSENINQDVKAYLRHADDMHIIGIDRGERHLLYLVVIDLQGNIKEQYSLNEIVNEYNGNTYHTNYHDLLDVREEERLKARQSWQTIENIKELKEGYLSQVIHKITQLMVGYHAIVVLEDLSKGFMRSRQKVEKQVYQKFEKMLIDKLNYLVDKKTDVSTPGGLLNAYQLTCKSDSSQKLGKQSGFLFYIPAWNTSKIDPVTGFVNLLDTHSLNSKEKIKAFFSKFDAIRYNKDKKWFEFNLDYDKFGKKAEDTRTKWTLCTRGMRIGTFRNKEKNSQWDNQEVDLTTEMKSLLEHYYIDIHGNLKDAISTQTDKAFFTGLLHILKLTLQMRNSITGTETDYLVSPVADENGIFYDSRSCGDQLPENADANGAYNIARKGLMLIEQIKNAEDLNNVKFDISNKAWLNFAQQKPYKNG

SEQ ID NO: 1575 - protein, 1245 aa, Unknown
  Description of Unknown: uncultivated organism sequence
  Category: MG75 effectors
  Description: MG75-61 effector
METFSGFTNLYPLSKTLRFRLIPVGETLKHFIDSGILEEDQHRAESYVKVKAIIDDYHRAYIENSLSGFELPLESTGKFNSLEEYYLYHNIRNKTEEIQNLSSKVRTNLRKQVVVQLTKNEIFKRIDKKELIQSDLIDFVKNEPDANEKIALISEFRNFTVYFKGFHENRRNMYSDEEKSTSIAFRLIHENLPKFIDNMEVFAKIQNTSILENFDAIQKELCPELVTLCEMFKLGYFNKTLSQKQIDAYNTVIGGKTTSEGKKIKGLNEYINLYNQQHKQEKLPKMKLLFKQILSDRESASWLPEKFENDSQVVGAMVNFWNTIHDTVLAEGGLKTIIASLGSYGLEGIFLKNDLQLTDISQKATGSWSKISSEIKQKIEVMNPQKKKESYESYQERIDKLFKSYKSFSLAFINECLRGEYKIEDYFLKLGAVNSSSLQKENHFSHILNAYTDVKEAIGFYSESTDTKLIQDNDSIQKIKQFLDAVKDLQAYVKPLLGNGDETGKDERFYGDLIEYWSLLDLITPLYNMVRNYVTQKPYSVDKIKINFQNPTLLNGWDLNKETDNTSVILRRDGKYYLAIMNNKSRKVFLKYPSGTDGNCYEKMEYKLLPGANKMLPKVFFSKSRINEFMPNERLLSNYEKGTHKKSGICFSLDDCHTLIDFFKKSLDKHEDWKNFGFKFSDTSTYEDMSGFYKEVENQGYKLSFKPIDATYVDQLVDEGKIFLFQIYNKDFSEHSKGTPNMHTLYWKMLFDETNLGDVVYKLNGEAEVFFRKASINVSHPTHPANIPIKKKNLKHKDEERILKYDLIKDKRYTVDQFQFHVPITMNFKADGNGNINQKAIDYLCSASDTHIIGIDRGERNLLYLVVIDGNGKICEQFSLNEIEVEYNGEKYSTNYHDLLNVKENERKQARQSWQSIANIKDLKEGYLSQVIHKISELMVKYNAIVVLEDLNAGFMRGRQKVEKQVYQKFEKKLIEKLNYLVFKKQSSDLPGGLMHAYQLANKFESFNALGKQSGFLFYIPAWNTSKMDPVTGFVNLFDVKYESVDKAKSFFSKFDSMRYNVERDMFEWKFNYGEFTKKAEGTKTDWTVCSYGNRIITFRNPDKNSQWDNKEINLTENIKLLFERFGIDLSSNLKDEIMQRTEKEFFIELISLFKLVLQMRNSWTGTDIDYLVSPVCNENGEFFDSRNVDETLPQNADANGAYNIARKGMILLDKIKKSNGEKKLALSITNREWLSFAQGCCKNG

SEQ ID NO: 1576 - protein, 1274 aa, Unknown
  Description of Unknown: uncultivated organism sequence
  Category: MG75 effectors
  Description: MG75-62 effector
MDKKFEDFKRLYPLSKTLRFEAKPIGSTLDNIIKSGLLDEDEHRAVSYVKVKKLIDEYHKSFIDRVLDEGCLPFENNGEKDSLEEYYESYKLKSNDENANKTFKEIQQNLRSVIANKLTDDKAYANLFGNKLIESYKDKEDKKKTIDSDLIQFINTAEPSQLDSMSQDEAKELVKEFWGFTTYFVGFFDNRKNMYTSEEKSTGIAYRLVNENLPKFIDNMEAFKKVIAKSEIQANIEELYSNFAEYLNVESIQEMFQLDYYNMLLTQKQIDVYNAIIGGKTDEKHDVKIKGINEYINLYNQQHKDEKLPKLKALFKQILSDRNAISWLPEEFNDDQEVLNAIKDCYERLSENVLGNKVLKSLLCSLADYNLDDIFIRNDLQLTDISQKMFGNWSVIQDAIIQNIKNVAPARKRKESEEDYEKRISGIFKKADSFSILYINSCLNEMDDNSLHAVDGYFATLGAVNTPTMQRENLFALIQNAYTDISDLLNTKYPANKNLAQDKTNVAKVKALLDAIKSLQHFVKPLLGKGDESDKDERFYGELASLWTELDTVTPLYNMIRNYMTRKPYSEKKIKLNFENPQLLGGWDANKEKDYSTIILRRNGMYYLAIMNKDSRRLLGKAMPSDGECYEKMVYKLLPGANKMLPKVFFAKSRIDDFKPNIQIVENYNNGTHKKRKNFNIQDCHDLIDFFKQSIKKHEDWSKFSFNFSDTSTYEDLSGFYREVEQQGYKLSFMNVSVSFIDKLVDEGKMYLFQIYNKDFSEYSKGTPNMHTLYWKALFDERNLADVVYKLNGQAEMFYRKKSIDYTHPTHPANHPILNKNKDNKKKESLFEYDLIKDRRYTVDKFLFHVPITMNFKSVGSENINQQVREYLQQADDTHIIGIDRGERHLLYLVVIDMQGNIKEQFTLNEIVNEYNGNTYRTNYHDLLDIREEERLAARQSWQTIENIKELKEGYLSQVIHKITQLMVKYHAIVVLEDLNMGFMRGRQKVEKQVYQKFEKMLIDKLNYLVDKKADATQPGGILNAYQLTSKFDSFQKLGKQSGFLFYIPAWNTSKIDSVTGFVNLLDTRYQNTEKAKVFFSKFDAIRYNEEKDWFEFYLDYDKFGSKAEGTRTKWTLCTQGKRIRTFRNPDKNSQWDNQEVDLTREMKSLFEHYHINICGNLKEEICSQTDKAFFTGLLHVLKLTLQMRNSITGTETDYLVSPVADEEGNFYDSRYCNITLPKNADANGAYNIARKGLMLVKQIKAATDLANFKYDISNKAWLNFAQQKPYKNE

SEQ ID NO: 1577 - protein, 1321 aa, Unknown
  Description of Unknown: uncultivated organism sequence
  Category: MG75 effectors
  Description: MG75-63 effector
MEFDDFKRLYPLSKTLRFEAKPIGATLNNIIKSGLLEEDEHRAQSYVKVKKLIDEYHKVFIDRVLDDGCLTIENKGKKDSLEEYYESYMSKSNDENVSKTFKEIQENLRSVIAKKLTDDNAYANLFGNKLIESYKDKDDKKKIIDSDLIQFINTAEPSKLDSMSQDEAKELVKEFWGFTTYFEGFHKNRKNMYTSEEKSTGIAYRLVNENLPKFIDNMEAFKKAIAKPEIQANMEELYSNFAEYLNVESIQEMFQLDYYNMLLTQKQIDDYNAIIGGKTDEDHDVKIKGINEYINLYNQQHKDEKLPKLKALFKQILSDRNAISWLPEEFNSDQDVLNAIKDCYERLSENVLGDKVLKSLLCSLSDYNLNGIFVRNDLQLTDISQKMFGNWNVIQNAIMQNFFFKKVAPARKRKESEEDYEKRISDIFKKTDSFSIQYINDCLNEMDDNNLHAVDGYFATLGAVNTPTMQRENLFALIQNAYTDISDLLDTPYPENKNLAQDKTNVAKVKALLDAIKSLQHFVKPLLGKGDESDKDERFYGELASLWTELDTVTLLFNMVHNYMTRKPYSQKKIKLNYKNTQLLAGWDANKEKEHAAIILRRNGMYYLAIMDKDSKNLLDKAMPSDGECYEKMVYKQFDISKQLPKCTTELKRVRKALVEDAKRSCLLSDSKDWNKPLNVTRKLWELNNYVWDKKKADWVLRKKENETRPKKFHKKYLELTSDKNGYNQAKNDWIKFTKEFLSSYKKVEDYDIHYKKRYNSVDELYKQLNSDFYTISFTYVSVSFIDKLVNEGKMYLFKIYNKDFSNYSKGTPNMHTLYWKALFDERNLADVVYKLNGEAEMFYRKKSINNTHPTHPANHPIQNKNKDNKKKESVFEYDLVKDYRYTEDKFLFHVPITMNFKSVGSENINQQVKEYLQQADDTHIIGIDRGERHLLYLVVIDMEGNIKEQFSLNEIVNEYNGNTYRTNYHDLLDVCADKRLKASQSWQTIENIKELKEGYLSQAIHKITQLMVKYHAVVVLEDLNKGFMRGRQKVEKQVYQKFEKMLIDKLNYLVDKKADAAQSGGLLNAYQLTSKFDSFQKLGKQSGFLFYIPAWNTSKIDPVTGFVNLFDTRYTNADKALEFFSKFDAIRYNEEKDWFEFEFDYDKFTQKAHGTRTKWTLCTYGMRLRSFKNPAKQYNWDFEVVVLTDEFKRILGEAGIDIHENLKDAIRNLEGKRRKYLEPLMQFMKLLLQLRNSRKNPEEDYILSPVADENGVFYDSRSCGDKLPENADANGAYNIARKGLMLIRQIKEAKELDKVKFDISNKAWLNFAQQKPYKNE

SEQ ID NO: 1578 - protein, 1275 aa, Unknown
  Description of Unknown: uncultivated organism sequence
  Category: MG75 effectors
  Description: MG75-64 effector
MAKNFEDFKRLYSLSKTLRFEAKPIGATLDNIVKSGLLDEDEHRAASYVKVKKLIDEYHKVFIDRVLANGCLPLKNEGHNNSLTEYYDNYVSKSQNEDAKKTFEENQQNLRSIIAKKLTEDKAYANLFGKNLLESYKDKTDKTKIIDSDLFKFINTAESTQLDSMSQDEAKELVKEFWGFITYFYGFFDNRKNMYTSEDKSTGIAYRLINENLPKFIDNMEAFNTAITRPEIQANMDELYSNFSEYLNVESIQEMFQLDYYNMLLTQKQIDVYNAIIGGKTDDEHDVKIKGINEYINLYNQKHKDDKLPKLKALFKQILSDRNAISWLPEEFNSDQEVLNAIKDCYERLSENVLGDKVLKSLLGSLADYSLDGIFIRNDLQLTDISQKMFGNWGVIQNAIMQDIKHVAPARKHKESEEDYEKRIAGIFKKADSFSISYINDCLNEADPNNAYFVENYFATLGAVDTPTMQRENLFALVQNAYTEITALLHSDYPTEKNLAQDKANVAKIKALLDAIKSLQHFVKPLLGKGDESDKDERFYGELASLWTELDTVTPLYNMIRNYMTRKPYSQKKIKLNFENPQLLGGWDVNKEKDYATIILRRNGLYYLAIMNKDSKKLLGKAMPSDGECYEKMVYKLLPGANKMLPKVFFAKSRMEDFKPSKELVEKYNNGTHKKGKNFNIQDCHNLIDYFKQSIDKHEDWSKFGFKFSDTSTYEDLSGFYREVEQQGYKLSFARVSVSYINQLVEEGKMYLFQIYNKDFSEYSKGTPNMHTLYWKALFDERNLADVVYKLNGQAEMFYRKKSIENTHPTHPANHPILNKNKDNKKKESLFEYDLIKDRRYTVDKFMFHVPITMNFKSVGSENINQDVKAYLRHADDMHIIGIDRGERHLLYLVVIDLQGNIKEQYSLNEIVNEYNGNTYHTNYHDLLDVREEERLKARQSWQTIENIKELKEGYLSQVIHKITQLMVGYHAIVVLEDLSKGFMRSRQKVEKQVYQKFEKMLIDKLNYLVDKKTDVSTPGGLLNAYQLTCKSDSSQKLGKQSGFLFYIPAWNTSKIDPVTGFVNLLDTHSLNSKEKIKAFFSKFDAIRYNKDKKWFEFNLDYDKFGKKAEDTRTKWTLCTRGMRIDTFRNKEKNSQWDNQEVDLTTEMKSLLEHYYIDIHGNLKDAISTQTDKAFFTGLLHILKLTLQMRNSITGTETDYLVSPVADENGIFYDSRSCGDQLPENADANGAYNIARKGLMLIEQIKNAEDLNNVKFDISNKAWLNFAQQKPYKNG

SEQ ID NO: 1579 - protein, 1274 aa, Unknown
  Description of Unknown: uncultivated organism sequence
  Category: MG75 effectors
  Description: MG75-65 effector
MAKNFEDFKRLYPLSKTLRFEAKPIGATLDNIVKSGLLDEDEHRAASYVKVKKLIDEYHKVFIDRVLADGCLPLKNEGHNNSLTEYYDSYVSKSQNEDAKKAFEENQQNLRSIIAKKLIEDKAYANLFGKNLIESYKDKEDKKKIIDSELIQFICTAEATQLDSMSQDEAKEIVKEFWGFTTYFVGFFDNRKNMYTAEEKSTGIAYRLINENLPKFIDNMEAFKKAIARPEIQANMEELYSNFSEYLNVESIQEMFQLDYYNMLLTQKQIDVYNAIIGGKTDDEHDVKIKGINEYINLYNQQHKDDKLPKLKSLFKQILSDRNAISWLPEEFNSDQEVLNAIKDCYERLAENVLGDKVLKSLLGSLADYSLDGIFIRNDLQLTDISQKMFGNWGVIQNAIMQNIKHVAPARKHKESEEDYEKRIAGIFKKADSFSISYINDCLNEADSNNAYFVENYFAAFGAVNTPTMQRENLFSLVQNAYTEVAALLHSDYPTAKHLAQDKANVAKIKALLDAIKSLQHFVKPLLGKGDESDKDERFYGELASLWAELDTVTPLYNMIRNYMTRKPYSQKKIKLNFENPQLLGGWDANKEKDYATIILRRDGLYYLAIMNKESKKLLGKAMPSDGECYEKMVYKLLPGANKMLPKVFFAKSRMEDFKPSKELVEKYNNGTHKKGKNFNIQDCHNLIDYFKQSISKHEDWGKFGFNFSDTSTYEDLSGFYREVEQQGYKLSFARVSVSYISQLVEEGKMYLFQIYNKDFSEYSKGTPNMHTLYWKALFDERNLADVVYKLNGQAEMFYRKKSIENTYPTHPANHPILNKNKDNKKKESLFDYDLIKDRRYTVDKFMFHVPITMNFKSSGSENINQDVKAYLRHADDMHIIGIDRGERHLLYLVVIDLQGNIKEQYSLNEIVNEYNGNTYHTNYHDLLDVREEERLKARQSWQTIENIKELKEGYLSQVIHKITQLMVKYHAIVVLEDLNMGFMRGRQKVEKQVYQKFEKMLIDKLNYLVDKKADASVSGGLLNAYQLTSKFDSFQKLGKQSGFLFYIPAWNTSKIDPVTGFVNLLDTRYQNVEKAKVFFSKFDAIRYNKDKDWFEFNLDYDKFGKKAEGTRTKWALCTRGMRIDTFRNKEKNSQWDNQEVDLTAEMKSLLEHYYIDIHGNLKDAISAQTDKAFFTGLLHILKLTLQMRNSITGTETDYLVSPVADENGIFYDSRSCGDELPENADANGAYNIARKGLMMIEQIKDAKDLDNLKFDISNKSWLNFAQQKPYKNE

SEQ ID NO: 1580 - protein, 1089 aa, Unknown
  Description of Unknown: uncultivated organism sequence
  Category: MG75 effectors
  Description: MG75-66 effector
MAKNFEDFKRLYPLSKTLRFEAKPIGATLDNIVKSGLLDEDEHRAASYVKVKKLIDEYHKVFIDRVLADGCLPLKNEGHNNSLTEYYDSYVSKSQNEDAKKAFEENQQNLRSIIAKKLIEDKAYANLFGKNLIESYKDKEDKKKIIDSELIQFICTAEATQLDSMSQDEAKEIVKEFWGFTTYFVGFFDNRKNMYTAEEKSTGIAYRLINENLPKFIDNMEAFKKAIARPEIQANMEELYSNFSEYLNVESIQEMFQLDYYNMLLTQKQIDVYNAIIGGKTDDEHDVKIKGINEYINLYNQQHKDDKLPKLKSLFKQILSDRNAISWLPEEFNSDQEVLNAIKDCYERLAENVLGDKVLKSLLGSLADYSLDGIFIRNDLQLTDISQKMFGNWGVIQNAIMQNIKHVAPARKHKESEEDYEKRIAGIFKKADSFSISYINDCLNEADSNNAYFVENYFAAFGAVNTPTMQRENLFSLVQNAYTEVAALLHSDYPTAKHLAQDKANVAKIKALLDAIKSLQHFVKPLLGKGDESDKDERFYGELASLWAELDTVTPLYNMIRNYMTRKPYSQKKIKLNFENPQLLGGWDANKEKDYATIILRRDGLYYLAIMNKESKKLLGKAMPSDGECYEKMVYKLLPGANKMLPKVFFAKSRMEDFKPSKELVEKYNNGTHKKGKNFNIQDCHNLIDYFKQSISKHEDWGKFGFNFSDTSTYEDLSGFYREVEQQGYKLSFARVSVSYISQLVEEGKMYLFQIYNKDFSEYSKGTPNMHTLYWKALFDERNLADVVYKLNGQAEMFYRKKSIENTHPTHPANHPILNKNKDNKKKESLFDYDLIKDRRYTVDKFMFHVPITMNFKSSGSENINQDVKAYLRHADDMHIIGIDRGERHLLYLVVIDLQGNIKEQYSLNEIVNEYNGNTYHTNYHDLLDVREEERLKARQSWQTIENIKELKEGYLSQVIHKITQLMVKYHAIVVLEDLNMGFMRGRQKVEKQVYQKFEKMLMDKLNYLVDKKADASVSGGLLNAYQLTSKFDSFQKLGKQSGFLFYIPAWNTSKIDPVTGFVNLLDTRYQNVEKAKVFFSKFDAIRYN

SEQ ID NO: 1581 - protein, 1250 aa, Unknown
  Description of Unknown: uncultivated organism sequence
  Category: MG75 effectors
  Description: MG75-67 effector
MISLNYFQNQYAVAKTLCLELRPIGKTMEYIISSGILKEDEHRNESYKLVKKIIDDYHKAYIELSLSRFELKITSCSKNDALEDFYCQYLANSQEEKDKNIFKKTQDNLRKQIAKHLTQGEAYKRIDKKELIQEDLLEFVAADPDAANKKILINEFRDFTTYFTGFYENRKNMYSEEAQSTAIAYRIIHENLPKFIDNMGTFKQLMQSSITDILPQIFDNFKKDLEVSSIQEIFDLNYFNKVLTQKQIDIYNAIIGGKSLNENSRIQGLNEYINLYNQQHKENKLPLLKLLFKQILSDRNSLSWLPEAFETDKQVLHAVRKCYANLKESVLHEAGLVQLLSSLPSYDSTRIYIRNDQALTTISQKLFGDWGIIPHAIKERLKKDISAKRKETEEAYLERIEKAFKQADSYTIAYINDSLKEIGVDKKNIEDYFIHLGAICAEGQEQENILQRIASAYSQAQPLLEEKVPVHKNLMQDKDSVELIKSLLDELKNLQHFIKPLLGKGSESDKDERFYGEFVGLWNELDQITTLYNKVRNYVTRKPYSTEKFKINFQNATLLKGWDRNKERDNTSIILRKNGLYYLAIMRKEYNKVFEKYPAGTEGNCYEKMEYKLLPGANKMLPKVFFSKSRINEFNPSPQLLQNYQMGTHKKGDQFKKEDCHALIDFFKTSIEKHEDWKNFNFQFSPTSVYEDMSGFYREVEQQGYKLVFRSIDAEYIDKLVEEGKIFLFQIYNKDFSPFSKGTPNLHTLYWKMLFDERNLNNVVYKLNGEAEIFFRKKSITYTNPTHPAEIPIKNKNVQNKKKESVFRYDLIKNHRFTIDSFQFHVPITMNFKNAGLSNLNEQVYTYLRENKDAHIIGIDRGERHLLYLVVIDRYGRIVKQFSLNEIVNEYHGNTYTTNYHDLLDKREEARQQARQSWQSIENIKELKEGYLSQVVHKIANLMVEYHAIVVLEDLNIGFMRGRQKVEKQVYQKFEKMLIDKLNYLVDKKKAPEADGGLLKAFQLTNQFESFQKLGKQSGFLFYVPAWNTSKIDPCTGFTNLLDTRYENIAKAQKFFRTFDAIRYNAVKDYFELELDYDKFHKRAEGTQTKWTLCTYGTRIKTFRNPENNNQWDNVEINLTEEFKKLFKQFEINLSGDLQQAICAQTEKSFFESLLRLLKLTLQMRNSITGTDVDYLLSPVQNAEGYFYDSRKGDKSLPANADANGAYNIARKGLWVIQQIKQTPQGQKAKLSISNKEWLKFAQEKPYLKD

SEQ ID NO: 1582 - protein, 1245 aa, Unknown
  Description of Unknown: uncultivated organism sequence
  Category: MG75 effectors
  Description: MG75-68 effector
METFSGFTNLYPLSKTLRFRLIPVGETLKHFIGSGILEEDQHRAESYVKVKAIIDDYHRTYIENSLSGFELPLESTGKFNSLEEYYLYHNIRNKTEEIQNLSSKVRTNLRKQVVTQLTKNEIFKRIDKKELIQSDLIDFVKNEPDANEKIALISEFRNFTVYFKGFHENRRNMYSDEEKSTSIAFRLIHENLPKFIDNMEVFAKIQNTSISENFDAIQKELCPELVTLCEMFKLGYFNKTLSQKQIDAYNTVIGGKTTSEGKKIKGLNEYINLYNQQHKQEKLPKMKLLFKQILSDRESASWLLEKFENDSQVVGAMVNFWNTIHDTVLAEGGLKTIIASLGSYGLEGIFLKNDLQLTDISQKATGSWSKISSEIKQKIEAMNPQKKKESYESYQERIDKLFKSYKSFSLAFVNECLRGEYKIEDYFLKLGAVNSSLLQKENHFSHILNTYTDVKEVIGFYSESTDTKLIQDNDSIQKIKQFLDAVKDLQAYVKPLLGNSDETGKDERFYGDLIEYWSLLDLITPLYNMVRNYVTQKPYSVDKIKINFQNPTLLNGWDLNKEMDNTSVILRRDGKYYLAIMNNKSRKVFLKYPSGTDRNCYEKMEYKLLPGANKMLPKVFFSKSRINEFMPNERLLSNYEKGTHKKSGTCFSLDDCHTLIDFFKKSLNKHEDWKNFGFKFSDTSTYEDMSGFYKEVENQGYKLSFKPIDATYVDQLVDEGKIFLFQIYNKDFSEHSKGTPNMHTLYWKMLFDETNLGDVVYKLNGEAEVFFRKASINVSHPTHPANIPIKKKNLKHKDEERILKYDLIKDKRYTVDQFQFHVPITMNFKANGNGNINQKAIDYLRSASDTHIIGIDRGERNLLYLVVIDGNGKICEQFSLNEIEVEYNGEKYSTNYHDLLNVKENERKQARQSWQSIANIKDLKEGYLSQVIHKISELMVKYNAIVVLEDLNAGFMRGRQKVEKQVYQKFEKKLIEKLNYLVFKKQSSDLPGGLMHAYQLANKFESFNTLGKQSGFLFYIPAWNTSKMDPVTGFVNLFDVKYESVDKAKSFFSKFDSIRYNVERDMFEWKFNYDEFTKKAEGTKTDWTVCSYGNRIITFRNPDKNSQWDNKEINLTENIKLLFERFGIDLSSNLKDEIMERTEKEFFIELISLFKLVLQMRNSWTGTDIDYLVSPVCNENGEFFDSRNVDETLPQNADANGAYNIARKGMILLDKIKKNNGEKKLTLSITNREWLSFAQGCCKNG

SEQ ID NO: 1583 - protein, 1274 aa, Unknown
  Description of Unknown: uncultivated organism sequence
  Category: MG75 effectors
  Description: MG75-69 effector
MAKIFEDFKRLYPLSKTLRFEAKPIGATLDNIIKSGLLDEDEHRAASYVRVKKLIDEYHKVFIDRVLDNGCLPLKNEGHNNSLTEYYESYVTKSQNEDAKKVFKEIQQNLRSIIAKKLTEDKAYANLFGKNLIESYKDKTDKTKIIDSDLIKFINTAESTQLDSMSQDEAKELVKEFWGFTTYFVGFYDNRKNMYTAEEKSTGIAYRLVNENLPKFIDNMEAFKKAIARPEIQANMEELYSDFSEYLNVESVQEMFQLDYYNMLLTQKQIDVYNAIIGGKTDDEHDVKIKGINEYINLYNQQHKDDKLPKLKALFKQILSDRNAISWLPEEFNGDQEVLNAIKDCYERLSENVLGDKVLKSLLGSLSDYSLDGIFIRNDLQLTDISQKMFGNWCVIQNAIMQNIKHVAPARKHKESEEDYEKRIAGIFKKVDSFSISFINDCLNEADPNNAYFVENYFATFGAVNTPTMQRENLFALVQNAYTEVAALLHSDYLTAKHLAQDKVNVAKIKALLDAIKSLQHFVKPLLGKGDESDKDERFYGELASLWAELDTVTPLYNMIRNYMTRKPYSQKKIKLNFENPQLLGGWDANKEKDYATIILRRDGLYYLAIMNKDSKKLLGKAMPSDGECYEKMVYKLLPGANKMLPKVFFAKSRMEDFKPSKELVEKYNNGTHKKGKNFNIQDCHNLIDYFKQSISKHEDWGKFGFNFSDTSTYEDLSGFYREVEQQGYKLSFTRVSVSYISQLVEEGKMYLFQIYNKDFSEYSKGTPNMHTLYWKALFDERNLADVVYKLNGQAEMFYRKKSIENTHPTHPANHPILNKNKDNKKKESLFDYDLIKDRRYTVDKFMFHVPITMNFKSSGSENINQDVKAYLRHADDMHIIGIDRGERHLLYLVVIDLQGNIKEQYSLNEIVNEYNGNTYHTNYHDLLDVREEERLKARQSWQTIENIKELKEGYLSQVIHKITQLMVKYHAIVVLEDLNMGFMRGRQKVEKQVYQKFEKMLIDKLNYLVDKKADASVSGGLLNAYQLTSKFDSFQKLGKQSGFLFYIPAWNTSKIDPITGFVNLLDTRYQNVEKAKVFFSKFDAIRYNKDKDWFEFNLDYDKFGKKAEGTRTKWTLCTRGMRIDTFRNKEKNSQWDNQEVDLTAEMKSLLEHYYIDIYGNLKDAISAQTDKAFFTGLLHILKLTLQMRNSITGTETDYLVSPVADENGIFYDSRSCGDELPENADANGAYNIARKGLMMIEQIKDAKDLDNLKFDISNKSWLNFAQQKPYKNE

SEQ ID NO: 1584 - protein, 1264 aa, Unknown
  Description of Unknown: uncultivated organism sequence
  Category: MG75 effectors
  Description: MG75-70 effector
MNFEQFTHLYPLSKTLRFELRPVGATLARIKEGGFLENDNHRAESYKKVKKLIDEYHKHFIEQALGDFSLTENETEGSKCLNSYLETYIQLYRSSRIEDAEKKAFEKVQAEMRKLIAKTLKGSEAYKRLFKQELIKEDLITFLRTHGGTVADEELVEEFKNFTTYFTGFYENRENMYSEEEKSTAISYRLVNENLPIFVDNMAAFAIIAQVPEVRAKLDVLQKDLGVELDGTTIDELFTLPFFNKVLTQKQIVVYNAAIGGKVSDSHSKGESHIKGINQIVNLYNQQHKDARLPKLKMLYKQILSDREALSWLPEKFDKDADLLKAIHDGYERLVSDGVLENLRTLLESIADYQTEGIFITNDQQLTRISQKMFGEWSFISEAILCALKKKVPQKRNECDEKYEERIDKMLKNYGGFSIRFIDDCVAAYVNTLDDEERKKRFIPTMEAYFATLGAFDTEEGQTINFFSRIQNARDALQGLLDSAYPERRALIQDKENGALLKELLDAILALMHFVKPLLGKNENGKDERFYGELMQIWDEFDSFVPLYNMSRNYLTQKPYSEEKYKLNFENSQLLKGWDLNKEADNTSIILRKDGLFYLAIMNKKHNKLFARELPADGDCYDKMDYKLLPGPNKMFPKVFFSKSRIAEFAPSEHIMDVYRKGSFKKGDTFNLQDCHDLIDFFKASILKHEDWRQFEFKFSETEQYDDISGFYREVEAQGYKVTFRQVSVSYIDRLVNEGKLYLFQIYNKDFSSYSKGTPNMHTLYWRALFDERNLSDVVYKLNGEAEVFYRKKSIEAHPTHPANRPIKNKNKLNDKEESLFAYDLIKDRRYSKDKFSLHVPITMNFKSVGGPNINDDVVEFLRTNENLHFIGIDRGERHLLYLTVIDSHGHILEQRTLNDVVNNYQGKDYHTDYHDLLETRERQRQEARSSWKAIENIKDLKEGYLAQVVHQIAQLMVKYHAIVVLEDLNGGFMRGRQKVERSVYQQFEKKLIDKLNYLVDKKSDAHAPGGLMNAYQLANQFKSFKSMGRQSGFIFYIPAWNTSKIDPVTGFTNLFDTRYKNVHDAQQFFSKFKSIRYNETADRFEFKFSYSDFTRKAEGSRTDWTVCTYGTRIKTFRDPQKNNEWTSKEVVLTEEFKKFFAAYGMDIHSNLKDSIAAHDEKAFFEQLLVLMRLTLQIRNSKSGTDVDYLLSPVADENGVFFDSRSCGNSLPQDADANGAYNIARKGLMLVRQMREAKDLKKFKADMTNRNWLKFAQEKPYLND

SEQ ID NO: 1585 - protein, 1275 aa, Unknown
  Description of Unknown: uncultivated organism sequence
  Category: MG75 effectors
  Description: MG75-71 effector
MAKNFEDFKRLYPLSKTLRFEAKPIGATLDNIIKSGLLDEDEHRAASYVKMKKLIDEYHKVFIDRVLDNGCLPLEDKGDNNSLAEYYESYVSKAQDEDAIKKFKEIQQNLCSIIAKKLTDDKAYANLFGNKLIESYKDKADKTKIIDSDLIQFINTAESTQLVSMSQDEAKELVKEFWGFTTYFEGFFKNRKNMYTPEEKSTGIAYRLINENLPKFIDNMEAFKKAITRPEIQANMEELYSDFSEYLNVESIQEMFQLDYYNMLLTQKQIDVYNAIIGGKTDDEHDVKIKGINEYINLYNQQHKDDKLPKLKALFKQILSDRNAISWLPEEFNSDQEVLNAIKDCYERLAENVLGDKVLKSLLCSLSDYTLDGIFIRNDLQLTDISQKMFGNWGVIQNAIMQNIKRVAPARKHKESEEDYEKRIAGIFKKADSFSISYINDCLNEADPNNAYFVENYFATFGAVNTPTMKRENLFALVQNAYTEVASLLHSDYPTAKHLAQDKANVAKIKALLDAIKSLQHFVKPLLGKGDESDKDERFYGELASLWAELDTVTPLYNMIRNYITRKPYSQKKIKLNFENPQLLGGWDANKEKDYATIILRRNGLYYLAIMNKESKKLLGKAMPSDGECYEKMVYKLLPGANKMLPKVFFAKSRMEDFKPSKELVEKYNTGTHKKGKNFNIQDCHNLIDYFKQSISKHEDWGKFGFNFSDTSTYEDLSGFYREVEQQGYKLSFARVSVSYINQLVEEGKMYLFQIYNKDFSEYSKGTPNMHTLYWKALFDERNLADVVYKLNGQAEMFYRKKSIENTHPTHPANHPILNKNKDNKKKESLFEYDLIKDRRYTVDKFMFHVPITMNFKSSGSENINQDVKAYLRHADDMHIIGVDRGERHLLYLVVIDLQGNIKEQYSLNEIVNEYNGNTYHTNYHDLLDVREDERLKARQSWQTIENIKELKEGYLSQVIHKITQLMVKYHAIVVLEDLNKGFMRGRQKVEKQVYQKFEKMLIDKLNYLVDKKADASVSGGLLNAYQLTSKFDSFQKLGKQSGFLFYIPAWNTSKIDPVTGFVNLLDTHSLNSKEKIKAFFSKFDAIRYNKDKDWFEFNLDYDKFGKKAEGTRTKWTLCTRGMRIDTFRNKEKNSQWDNQEVDLTAEMKSLLEHYYIDIHGNLKDAISAQTDKAFFTGLLHILKLTLQMRNSITGTETDYLVSPVADENGIFYDSRSCGDELPENADANGAYNIARKGLMMIEQIKEVKDLDNLKFDISNKSWLNFAQQKPYKNE

SEQ ID NO: 1586 - protein, 439 aa, Unknown
  Description of Unknown: uncultivated organism sequence
  Category: MG75 effectors
  Description: MG75-72 effector
MIKDKRYTVDQFQFHVPITMNFKADGNGNINQKAIDYLCSASDTHIIGIDRGERNLLYLVVIDGNGKICEQFSLNEIEVEYNGEKYSTNYHDLLNVKENERKQARQSWQSIANIKDLKEGYLSQVIHKISELMVKYNAIVVLEDLNAGFMRGRQKVEKQVYQKFEKKLIEKLNYLVFKKQSSDLPGGLMHAYQLANKFESFNALGKQSGFLFYIPAWNTSKMDPVTGFVNLFDVKYESVDKAKSFFSKFDSMRYNVERDMFEWKFNYGEFTKKAEGTKTDWTVCSYGNRIITFRNPDKNSQWDNKEINLTENIKLLFERFGIDLSSNLKDEIMQRTEKEFFIELISLFKLVLQMRNSWTGTDIDYLVSPVCNENGEFFDSRNVDETLPQNADANGAYNIARKGMILLDKIKKSNGEKKLALSITNREWLSFAQGCCKNG

SEQ ID NO: 1587 - protein, 1274 aa, Unknown
  Description of Unknown: uncultivated organism sequence
  Category: MG75 effectors
  Description: MG75-73 effector
MARIFEDFKRLYPLSKTLRFEAKPIGATLDNIVKSGLLDEDEHRAESYVKVKKLIDEYHKVFIDRVLDNGCLPLKNEGHNNSLTEYYDSYVSKSQNEDAKKAFEENQQNLRSIIAKKLTEDKAYANLFGKNLIESYKDKTDKTKIIDSDLIQFINTAESTQLNSMSQDEAKELVKEFWGFTTYFVGFFDNCKNMYTAEEKSTGIAYRLINENLPKFIDNMEAFKKAIARPEIQANMEELYSNFSEYLNVESIQEMFLLDYYNMLLTQKQIDVYNAIIGGKTDDEHDVKIKGINEYINLYNQQHKDDKLPKLKALFKQILSDRNAISWLPEEFNSDQEVLNAIKDCYERLSENVLGDKVLKSLLGSLADYSLDGIFIRNDLQLTDISQKMFGNWGVIQNAIMQNIKRVAPARKHKESEEDYEKRIAGIFKKADSFSISYINDCLNEADPNNAYFVENYFATFGAVNTPTMQRENLFALVQNAYTEVASLLHSYYPAEKKLAQDKANVAKIKALLDAIKSLQHFVKPLLGKGDESDKDERFYGELASLWAELDTVTPLYNMIRNYITRKPYSQKKIKLNFENPQLLGGWDANKEKDYATIILRRNGLYYLAIMDKDSRKLLGKAMPSDGECYEKMVYKLLPGANKMLPKVFFAKSRMDDFKPSKELIEKYNNGTHKKGKNFDIQDCHNLIDYFKQSIDKHEDWSKFGFNFSDTSTYEDLSGFYREVEQQGYKLSFARVSVSYINQLVEEGKMYLFQIYNKDFSEYSKGTPNMHTLYWKALFDERNLADVVYKLNGQAEMFYRKKSIENTHPTHPANHPILNKNKDNKKKESLFEYDLIKDRRYTVDKFMFHVPITMNFKSVGSENINQGVKEYLHHADDMHIIGIDRGERHLLYLVVIDLQGNIKEQYSLNEIVNEYNGNTYHTNYHDLLDAREDERLKARQSWQTIENIKELKEGYLSQVIHKITQLMVKYHAIVVLEDLNMGFMRGRQKVEKQVYQKFEKMLIDKLNYLVDKKADASVSGGLLNAYQLTSKFDSFQKLGKQSGFLFYIPAWNTSKIDPVTGFVNLLDARYQNVEKAKAFFSKFDAIRYNKDKDWFEFNLDYDKFGKKAEGTRTKWILCTRGMRIDTFRNKEKNSQWDNQEVDLTAELKSLLEHYYIDIHGNLKEAISAQTDKAFFTGLLHILKLTLQMRNSITGTETDYLVSPVADENGIFYDSRSCGEQLPENADANGAYNIARKGLMMIEQIKNAEDLGNLKFDISNKAWLNFAQQKPYKNG

SEQ ID NO: 1588 - protein, 1203 aa, Unknown
  Description of Unknown: uncultivated organism sequence
  Category: MG75 effectors
  Description: MG75-74 effector
MTIENKGKKDSLEEYYESYMSKSNDENVSKTFKEIQENLRSVIAKKLTDDNAYANLFGNKLIESYKDKDEKNKIIDSDLIQFINTAEPSQLDSMSQDEAKELVKEFWGFTTYFVGFFDNRKNMYTSEEKSTGIAYRLVNENLPKFIDNMEAFKKAIAKPEIQASMEELYSNFAEYLNVESIQEMFQLDYYNMLLTQKQIDVYNAIIGGKTDEEHDVKIKGINEYINLYNQQHKDEKLPKLKALFKQILSDRNAISWLPEEFNSDQEVLNAIDDCYKRLSENVLGDKVLKSLLCSLDDYNLDGIFVRNDLQLTDISQKMFGNWSVIQSAIMQNIKNVAPARKRKESEEDYEKRISDIFKKADSFSIQYINDCLNEMDNNNLHAVDGYFATLGAVNTPTMQRENLFALIQNAYTDISNLLETPYPENKNLAQDKTNVAKVKALLDAIKSLQHFVKPLLGKGDESDKDERFYGELASLWTELDTVTPLYNMIRNYMTRKPYSEKKIKLNFENPQLLGGWDANKEKDYATIILRRNGMYYLAIMDKDSKKLLGKTMPSNGECYEKMVYKLLPGANKMLPKVFFAKSRINDFKPSKLIVENYNNGTHKKGKNFNINDCHNLIDYFKQSIDKHEDWSKFGFNFSDTSTYEDLSGFYREVEQQGYKLSFTNVSVSFIDKLVDEGKMYLFQIYNKDFSDFSKGTPNMHTLYWKALFDERNLADVVYKLNGQAEMFYRKKSINNTHPTHPANHPIQNKNKDNKKKESVFEYDLIKDRRYTVDKFLFHVPITMNFKSVGSENINQQVREYLQQADDTHIIGIDRGERHLLYLVVIDMQGNIKEQFTLNEIVNEYNGNTYRTNYHDLLDTREEERLTARQSWQTIENIKELKEGYLSQVVHKITQLMVKYHAVVVLEDLNKGFMRGRQKVEKQVYQKFEKMLIDKLNYLVDKKADAAQSGGLLNAYQLTSKFDSFQKLGKQSGFLFYIPAWNTSKIDPVTGFVNLLDTRYQNTEKAKAFFSRFDAIRYNANKDWFEFYLDYDKFCTKAEGTRTRWTLCTQGSRISTFRNAEKNSQWDNLEVDLTREMKSLFEHYHINICGNLKEEICLQTDKAFFTGLLHMLKLTLQMRNNITGTETDYLISPVADENGTFYDSRSCGDTLPKNADANGAYNIARKGLMFIGQIKETKDLANFKYDISNKAWLNFAQQKPYKNE

SEQ ID NO: 1589 - protein, 1245 aa, Unknown
  Description of Unknown: uncultivated organism sequence
  Category: MG75 effectors
  Description: MG75-75 effector
METFSGFTNLYPLSKTLRFRLIPVGETLKHFIDSGILEEDQHRAESYVKVKAIIDDYHRAYIENSLSGFELPLESMGKFNSLEEYYLYHNIRNKTEEIQNLSSKVRTNLRKQVVTQLTKNEIFKRIDKKELIQSDLIDFVKNEPDANEKIALISEFRNFTVYFKGFHENRKNMYSDEEKSTSIAFRLIHENLPKFIDNMEVFAKIQNTSISENFDAIQKELCPELVTLCEMFKLGYFNKTLSQKQIDAYNTVIGGKTTSEGKKIKGLNEYINLYNQQHKQEKLPKMKLLFKQILSDRESVSWLPEKFENDSQVVGAMVNFWNTIHDTVLAEGGLKTIIASLGSYGLEGIFLKNDLQLTDISQKATGSWGKISSEIKQKIEVMNPQKKKESYETYQERIDKIFKSYKSFSLAFINECLRGEYKIEDYFLKLGAVNSSSLQKENHFSHILNAYTDVKEAIGFYSESTDTKLIQDNDSIQKIKQFLDAVKDLQAYVKPLLGNGDETGKDERFYGDLIEYWSLLDLITPLYNMVRNYVTQKPYSIDKIKINFQNPTLLNGWDLNKETDNTSVILRRDGKYYLAIMNNKSRKVFLKYPSGTDRNCYEKMEYKLLPGANKMLPKVFFSKSRINEFMPNERLLSNYEKGTHKKSGTCFSLDDCHTLIDFFKKSLDKHEDWKNFGFKFSDTSIYEDMSGFYKEVENQGYKLSFKPIDATYVDQLVDEGKIFLFQIYNKDFSEHSKGTPNMHTLYWKMLFDETNLGDVVYKLNGEAEVFFRKASINVSHPTHPANIPIKKKNLKHKDEERILKYDLIKDKRYTVDQFQFHVPITMNFKADGNGNINQKAIDYLRSASDTHIIGIDRGERNLLYLVVIDGNGKICEQFSLNEIEVEYNGEKYSTNYHDLLNVKENERRQARQSWQSIANIKDLKEGYLSQVIHKISELMVKYNAIVVLEDLNAGFMRGRQKVEKQVYQKFEKKLIEKLNYLVFKKQSFDLPGGLMHAYQLANKFESFNTLGKQSGFLFYIPAWNTSKMDPVTGFVNLFDVKYESVDKAKSFFSKFDSIRYNVERDMFEWKFNYGEFTKKAEGTKTDWTVCSYGNRIITFRNPDKNSQWDNKEINLTENIKLLFERFGIDFSSNLKDEIMQRTEKEFFIELISLFKLVLQMRNSWTGTDIDYLVSPVCNENGEFFDSRNVDETLPQNADANGAYNIARKGMILLDKIKKGNGEKKLALSITNREWLSFAQGCCKNG

SEQ ID NO: 1590 - protein, 1274 aa, Unknown
  Description of Unknown: uncultivated organism sequence
  Category: MG75 effectors
  Description: MG75-76 effector
MAKNFEDFKRLYPLSKTLRFEAKPIGATLDNIIKSGLLDEDEHRAASYVKMKKLIDEYHKVFIDRVLDNGCLPLKNEGQNNSLTEYYESYVSKSQNEDAKKAFEENQQNLRSIVAKKLTDDKAYANLFGKNLIESYKDKEDKKKIIDSDLIQFICTAEATQLDSMSQDEAKEIVKEFWDFTTYFVGFFDNRKNMYTAEEKSTGIAYRLINENLPKFIDNMEAFKKAIARPEIQANMEELYSNFSEYLNVESIQEMFLLDYYNMLLTQKQIDVYNAIIGGKTDDEHDVKIKGINEYINLYNQQHKDDKLPKLKDLFKQILSDRNAISWLPEEFNSDQEVLNAIKDCYERLSENVLGDKVLKSLLGSLSDYTLDGIFIRNDLQLTDISQKMFGNWGVIQNAIMQNIKRVAPARKHKESEEDYEKRIAGIFKKADSFSISYINDCLNEADPNNAYFVENYFATFGAVNTPTMQRENLFALVQNAYTEVASLLHSDYPTAKHLAQDKANVAKIKALLDAIKSLQHFVKPLLGKGDESDKDERFYGELASLWAELDTVTPLYNMIRNYITRKPYSQKKIKLNFENPQLLGGWDANKEKDYATIILRRNGLYYLAIMNKESKKLLGKAMPSDGECYEKMVYKLLPGANKMLPKVFFAKSRMEDFKPSKELVEKYNNGTHKKGKNFNIQDCHNLIDYFKQSINKHEDWGKFGFNFSDTSTYEDLSGFYREVEQQGYKLSFARVSVSYINQLVEEGKMYLFQIYNKDFSEYSKGTPNMHTLYWKALFDERNLADVVYKLNGQAEMFYRKKSIEKTHPTHPANHPILNKNKDNKKKESLFDYDLIKDRRYTVDKFMFHVPITMNFKSVGSENINQGVKEYLHHADDMHIIGIDRGERHLLYLVVIDLQGNIKEQYSLNEIVNEYNGNTYHTNYHDLLDAREDERLKARQSWQTIENIKELKEGYLSQVIHKITQLMVKYHAIVVLEDLNMGFMRGRQKVEKQVYQKFEKMLIDKLNYLVDKKADASVSGGWLNAYQLTSKFDSFQKLGKQSGFLFYIPAWNTSKIDPVTGFVNLLDARYQNVEKAKAFFSKFDAIRYNKDKDWFEFNLDYDKFGKKTEGTRTKWTLCTRGMRIDTFRNKEKNSQWDNQEVDLTAEMKSLLEHYYIDIHGNLKDAISAQTDKAFFTGLLHILKLTLQMRNSITGTETDYLVSPVADENGIFYDSRSCGEELPENADANGAYNIARKGLMLIEQIKGAEDLGNLKFDISNKAWLNFAQKKPYKNG

SEQ ID NO: 1591 - protein, 1272 aa, Unknown
  Description of Unknown: uncultivated organism sequence
  Category: MG75 effectors
  Description: MG75-77 effector
MEFDDFKRLYPLSKTLRFEAKPIGATLKNIIKSGLLEEDEHRAQSYVKVKKLIDEYHKAFIDRVLNEGCLTIENKGNKDSLEEYYESYMSKSNDENVSKTFKEIQENLRSVIAKRLTDDKAYANLFGKNLIESYKDKEEKNKIIDSDLIQFINTAEPSQIDSMSQDEAKELVKEFWGFTTYFVGFFDNRKNMYTSEEKSTGIAYRLVNENLPKFIDNMEAFKKAIAKPEIQANMEELYSNFAEYLNVESIQEMFQLDYYDMLLTQKQIDVYNAIIGGKTDEDHDVKIKGINEYINLYNQQHKDEKLPKLKALFKQILSDRNAISWLPEEFNSDQEVLDAIKDCYERLSENVLGYKVLKSLLCSLSDYNLNGIFVRNDLQLTDISQKMFGNWSVIQNAIMQNIKNIAPARKRKESEEDYEKRISDIFKKADSFSIQYINDCLNEMDNNNLHAVDGYFATLGAVNTPTMQRENLFALIQNAYTDISDLLDTPYPQNKNLAQDKTNVAKVKVLLDAIKSLQHFVKPLLGMGDESDKDERFYGELASLWTELDTVTPLYNMIRNYMTRKPYSEKKIKLNFENPQLLGGWDANKEKDYATIILRRNGMYYLAIMDKDSKKLLGKTMPSDGECYEKMVYKLLPGANKMLPKVFFAKSRINDFKPSKKIVENYNNGTHKKGKNFNINDCHDLIDYFKQSIDKHEDWSKFGFNFSDTSTYEDLSGFYREVEQQGYKLSFTNISVSFIDKLVDEGKMYLFQIYNKDFSDYSKGTPNMHTLYWKALFDERNLADVVYKLNGQAEMFYRKKSIDYTYPTHPANHPIQNKNKDNKKKESVFEYDLVKDRRYTVDKFLFHVPITINFKSVGSENINQQVREYLQQADDTHIIGIDRGERHLLYLVVIDMQGNIKEQFTLNEIVNEYNGNTYRTNYHDLLDTREEERLTARQSWQTIENIKELKEGYLSQVIHKITQLMVKYHAVVVLEDLNKGFMRGRQKVEKQVYQKFEKMLIDKLNYLVDKKADATQSGGLLNAYQLTSKFDSFQKLGKQSGFLFYIPAWNTSKIDPVTGFVNLLDTRYQNTEKAKAFFSKFDAIRYNADKDWFEFNLDYDKFGTKAEGTRTTWTLCTQGNRICTFRNAEKNSQWDNQEVDLTGELKSLFEHYNINICGNLKEEICSQTDKAFFTGLLHILKLTLQMRNSITGTETDYLVSPVADENGVFYDSRSCGDQLPENADANGAYNIARKGLMLIREIKKAKELGKVKYDISNKAWLNFAQQKPYKNE

SEQ ID NO: 1592 - protein, 1274 aa, Unknown
  Description of Unknown: uncultivated organism sequence
  Category: MG75 effectors
  Description: MG75-78 effector
MAKNFEDFKRLYPLSKTLRFEAKPIGVTLDNIVKSGLLDEDEHRAASYVKVKKLIDEYHKVFIDRVLADGCLPLKNEGHNNSLTEYYDNYVSKSQNEDAKKAFEENQQNLRSIIAKKLTEDKAYANLFGKNLIESYKDKTDKTKIIDSDLFNFINTAESTQLDSMSQDAAKEIVKEFWGFTTYFVGFFDNRKNMYTAEEKSTGIAYRLINENLPKFIDNMEAFKKAIARPEIQANMDELYSNFSEYLNVESIQEMFQLDYYNMLLTQKQIDVYNAIIGGKTDDEHDVKIKGINEYINLYNQKHKDDKLPKLKALFKQILSDRNAISWLPEEFNSDQEVLNAIKDCYERLSENVLGDKVLRSLLGSLADYSLDGIFIRNDLQLTDISQKMFGNWGVIQNAIMQNIKRIAPARKHKESEEDYEKRIAGIFKKADSFSISYINDCLNEADPNNAYFVENYFATFGAVNTPTMQRENLFALVQNAYTEVAALLHSDYPTVKNLAQDKANVSKIKVLLDAIKSLQHFVKPLLGKGDESDKDERFYGELASLWAELDTVTPLYNMIRNYMTRKPYSQKKIKLNFENPQLLGGWDANKEKDYATIILRRNGLYYLAIMNKDSKKLLGKAMPSDGECYEKMVYKLLPGANKMLPKVFFAKSRMEDFKPSKELVEKYNNGTHKKGKNFCIQDCHNLIDYFKQSIDKHEDWSKFGFNFSETSTYEDLSGFYREVEQQGYKLSFARVSVSYINQLVEEGKMYLFQIYNKDFSEYSKGTPNMHTLYWKALFDERNLADVVYKLNGQAEMFYRKKSIENTHPTHPANHPILNKNKDNKKKESLFEYDLIKDRRYTVDKFMFHVPITMNFKSSGSENINQDVKAYLRHADDMHIIGIDRGERHLLYLVVIDLQGNIKEQFSLNEIVNDYNGNTYHTNYHDLLDVREDERLKARQSWQTIENIKELKEGYLSQVIHKITQLMVKYHAIVVLEDLNMGFMRGRQKVEKQVYQKFEKMLIEKLNYLVDKKADASASGGLLNAYQLTSKFDSFQKLGKQSGFLFYIPAWNTSKIDPVTGFVNLLDTRYQNVEKAKSFFSKFDAIRYNKDKEWFEFNLDYDKFSKKAEGTRTKWTLCTRGMRIDTFRNKEKNSQWDNQKVDLTAEMKSLLEHYYIDIHGNLKDAISAQTDKAFFTGLLHILKLTLQMRNSITGTETDYLVSPVVDENGIFYDSRSCGDELPENADANGAYNIARKGLMMIEQIKDAKDLDNLKFDISNKAWLNFAQQKPYKNG

SEQ ID NO: 1593 - protein, 1274 aa, Unknown
  Description of Unknown: uncultivated organism sequence
  Category: MG75 effectors
  Description: MG75-79 effector
MAKIFEDFKRLYPLSKTLRFEAKPIGATLDNIIKSGLLDEDEHRAASYVRVKKLIDEYHKVFIDRVLDNGCLPLKNEGHNNSLTEYYESYVTKSQNEDAKKVFKEIQQNLRSIIAKKLTEDKAYANLFGKNLIESYKDKTDKTKIIDSDLIKFINTAESTQLDSMSQDEAKELVKEFWGFTTYFVGFYDNRKNMYTAEEKSTGIAYRLVNENLPKFIDNMEAFKKAIARPEIQANMEELYSDFSEYLNVESVQEMFQLDYYNMLLTQKQIDVYNAIIGGKTDDEHDVKIKGINEYINLYNQQHKDDKLPKLKALFKQILSDRNAISWLPEEFNGDQEVLNAIKDCYERLSENVLGDKVLKSLLGSLSDYSLDGIFIRNDLQLTDISQKMFGNWCVIQNAIMQNIKHVAPARKHKESEEDYEKRIAGIFKKVDSFSISFINDCLNEADPNNAYFVENYFATFGAVNTPTMQRENLFALVQNAYTEVAALLHSDYPTAKHLAQDKVNVAKIKALLDAIKSLQHFVKPLLGKGDESDKDERFYGELASLWAELDTVTPLYNMIRNYMTRKPYSQKKIKLNFENPQLLGGWDANKEKDYATIILRRDGLYYLAIMNKESKKLLGKAMPSDGECYEKMVYKLLPGANKMLPKVFFAKSRMEDFKPSKELVEKYNNGTHKKGKNFNIQDCHNLIDYFKQSISKHEDWGKFGFNFSDTSTYEDLSGFYREVEQQGYKLSFTRVSVSYISQLVEEGKMYLFQIYNKDFSEYSKGTPNMHTLYWKALFDERNLADVVYKLNGQAEMFYRKKSIENTHPTHPANHPILNKNKDNKKKESLFDYDLIKDRRYTVDKFMFHVPVTMNFKSSGSENINQDVKAYLRHADDMHIIGIDRGERHLLYLVVIDLQGNIKEQYSLNEIVNEYNGNTYHTNYHDLLDVREEERLKARQSWQTIENIKELKEGYLSQVIHKITQLMVKYHAIVVLEDLNMGFMRGRQKVEKQVYQKFEKMLIDKLNYLVDKKADASVSGGLLNAYQLTSKFDSFQKLGKQSGFLFYIPAWNTSKIDPVTGFVNLLDTRYQNVEKAKVFFSKFDAIRYNKDKDWFEFNLDYDKFGKKAEGTRTKWTLCTRGMRIDTFRNKEKNSQWDNQKVDLTAEMKSLLEHYYIDIHGNLKDAISAQTDKAFFTGLLHILKLTLQMRNSITGTETDYLVSPVADENGIFYDSRSCGDELPENADANGAYNIARKGLMLIEQIKEAKDLDNLKFDISNKSWLNFAQQKPYKNG

SEQ ID NO: 1594 - protein, 1274 aa, Unknown
  Description of Unknown: uncultivated organism sequence
  Category: MG75 effectors
  Description: MG75-80 effector
MAKNFEDFKRLYPLSKTLRFEAKPIGATLDNIVKSGLLDEDEHRAASYVKVKKLIDEYHKVFIDRVLADGCLPLENEGHNNSLAEYYDSYVSKSQNEDAKKAFEENQQNLRSIIAKKLTEDKAYANLFGKNLIESYKDKEDKKKIIDSDLIQFICTAEATQLDSMSQDEAKEIVKEFWGFTTYFVGFFDNRKNMYTVEEKSTGIAYRLINENLPKFIDNMEAFKKAIARPEIQANMEELYSNFSEYLNVESIQEMFLLDYYNMLLTQKQIDVYNAIIGGKTDDEHDVKIKGINEYINLYNQQHKDNKLPKFKALFKQILSDRNAISWLPEEFNSDQEVLNAIKDCYERLSENVLGDKVLKSLLGSLSDYTLDGIFIRNDLQLTDISQKMFGNWCVIQNAIMQNIKHVAPARKHKESEEDYEKRIAGIFKKADSFSISYINDCLNEADSNNAYFVENYFATFGAVNTPTMQRENLFSLVQNAYTEVAALLHSDYPTAKHLAQDKANVAKIKALLDAIKALQHFVKPLLGKGDESDKDERFYGELALLWAELDTVTPLYNMIRNYMTRKPYSQKKIKLNFENPQLLGGWDANKEKDYATIILRRDGLYYLAIMNKESKKLLGKAMPSDGECYEKMVYKLLPGANKMLPKVFFAKSRMEDFKPSKELVEKYNNGTHKKGKNFNIQDCHNLIDYFKQSISKHEDWGKFGFNFSDTSTYEDLSVFYREVEQQGYKLSFARVSVSYISQLVEEGKMYLFQIYNKDFSEYSKGTPNMHTLYWKALFDERNLADVVYKLNGQAEMFYRKKSIENTHPTHPANHPILNKNKDNKKKESLFDYDLIKDRRYTVDKFMFHVPITMNFKSSGSENINQDVKAYLRHADDMHIIGIDRGERHLLYLVVIDLQGNIKEQYSLNEIVNEYNGNTYHTNYHDLLDVREEERLKARQSWQTIENIKELKEGYLSQVIHKITQLMVKYHAIVVLEDLNMGFMRGRQKVEKQVYQKFEKMLIDKLNYLVDKKADAFVSGGLLNAYQLTSKFDSFQKLGKQSGFLFYIPAWNTSKIDPVTGFVNLLDTRYQNVEKAKVFFSKFDAIRYNKDKDWFEFNLDYDKFGKKAEGTKTKWTLCTRGMRIDTFRNKEKNSQWDNHEVDLTAEMKSLLEHYYIDIHGNLKDAISAQTDKVFFTGLLHILKLTLQMRNSITGTETDYLISPVADENGIFYDSRSCGDELPENADANGAYNIARKGLMMIEQIKDAKDLDNLKFDISNKSWLNFAQQKPYKNE

SEQ ID NO: 1595 - protein, 1222 aa, Unknown
  Description of Unknown: uncultivated organism sequence
  Category: MG75 effectors
  Description: MG75-81 effector
MKKLIDEYHKVFIDRVLNDGCLTIENKGKQDSLEEYFESYISKSNDENANKAFKEIQGNLRSLIANKLTKDKGYANLFGKNLIESYKDKDDTKKIIDSDLIQFINTAEPSKLDSMSQDEAKELVKEFRGFTTYFVGFFDNRKNMYTSEEKSTGIAYRLVNENLPKFIDNMEAFKKAIAKPEIQANMEELYSNFAEYLNVESIQEMFKLDYYNMLLTQKQIDVYNAIIGGKTDEDHDVKIKGINEYINLYNQQHKDEKLPKLKALFKQILSDRNAISWLPEEFNSDQDVLNAIKDCYERLSENVLGDKVLKSLLCSLSDYNLNGIFVRNDLQLTDISQKTFGNWSVIQNAIMQNIKNVAPARKRKESEEDYEKRISDIFKKADSFSIQYINDCLNEMDNNNLHAVDGYFATLGAVNTPTMQRENLFALIQNAYTDISDLLDTPYPENKNLAQDKTNVAKVKALLDAIKSLQHFVKPLLGMGDESDKDERFYGELASLWTELDTVTPLYNMIRNYMTRKPYSEKKIKLNFENPQLLGGWDANKEKDYATIILRRNGMYYLAIMDKDSKKLLGKTMPSDGECYEKMVYKLLPGANKMLPKVFFAKSRINDFKPSKKIVENYNNGTHKKGKNFNINDCHDLIDYFKQSIDKHEDWSKFGFNFSDTSTYEDLSGFYREVEQQGYKLSFTNISVSFIDKLVDEGKMYLFQIYNKDFSDYSKGTPNMHTLYWKALFDERNLADVVYKLNGQAEMFYRKKSIDYTHPTHPANHPIQNKNKDNKKKESVFEYDLVKDRRYTVDKFLFHVPINMNFKSVGSENINQQVREYLQQADDTHIIGIDRGERHLLYLVVIDMQGNIKEQFTLNEIVNEYNGNTYRTNYHDLLDTREEERLTARQSWQTIENIKELKEGYLSQVVHKITQLMVKYHAVVVLEDLNKGFMRGRQKVEKQVYQKFEKMLIDKLNYLVDKKADAAQSGGLLNAYQLTSKFDSFQKLGKQSGFLFYIPAWNTSKIDPVTGFVNLLDTRYQNTEKSKAFFSKFDAIRYNADKDWFEFNLDYDKFGTKAEGTRTKWILCTQGNRICRNADKNPQWDNPKIDLTRELKSLFEHYNINICGNLKEEICSQTDKAFFTGLLHILKLTLQMRNSITGTETDYLVSPVADENGVFYDSRSCGDRLPENADANGAYNIARKGLMLIGQIKETKDLANFKYDISNKAWLNFAQQKPYKNE

SEQ ID NO: 1596 - protein, 1245 aa, Unknown
  Description of Unknown: uncultivated organism sequence
  Category: MG75 effectors
  Description: MG75-82 effector
METFSGFTNLYPLSKTLRFRLIPVGETLKYFIGSGILEEDQHRAESYVKVKAIIDDYHRAYIENSLSGFELPLESTGKFNSLEEYYLYHNIRNKTEEIQNLSSKVRTNLRKQVVAQLTKNEIFKRIDKKELIQSDLIDFVKNEPDANEKIALISEFRNFTVYFKGFHENCRNMYSDEEKSTSIAFRLIHENLPKFIDNMEVFAKIQNTSISENFDAIQKELCPELVTLCEMFKLGYFNKTLSQKQIDAYNTVIGGKTTSEGKKIKGLNEYINLYNQQHKQEKLPKMKLLFKQILSDRESASWLPEKFENDSQVVGAIVNFWNTIHDTVLAEGGLKTIIASLGSYGLEGIFLKNDLQLTDISQKATGSWGKISSEIKQKIEVMNPQKKKESYETYQERIDKIFKSYKSFSLAFINECLRGEYKIEDYFLKLGAVNSSSLQKENHFSHILNTYTDVKEVIGLYSESTDTKLIQDNDSIQKIKQFLDAVKDLQAYVKPLLGNGDETGKDERFYGDLIEYWSLLDLITPLYNMVRNYVTQKPYSVDKIKINFQNPTLLNGWDLNKETDNTSVILRRDGKYYLAIMNNKSRKVFLKYPSGTDRNCYEKMEYKLLPGANKMLPKVFFSKSRINEFMPNERLLSNYEKGTHKKSGTCFSLDDCHTLIDFFKKSLDKHEDWKNFGFKFSDTSTYEDMSGFYKEVENQGYKLSFKPIDATYVDQLVDEGKIFLFQIYNKDFSEHSKGTPNMHTLYWKMLFDETNLGDVVYKLNGEAEVFFRKASINVSHPTHPANIPIKKKNLKHKDEERILKYDLIKDKRYTVDQFQFHVPITMNFKADGNGNINQKAIDYLRSASDTHIIGIDRGERNLLYLVVIDGNGKICEQFSLNEIEVEYNGEKYSTNYHDLLNVKENERKQARQSWQSIANIKDLKEGYLSQVIHKISELMVKYNAIVVLEDLNAGFMRGRQKVEKQVYQKFEKKLIEKLNYLVFKKQSSDLPGGLMHAYQLANKFESFNTLGKQSGFLFYIPAWNTSKMDPVTGFVNLFDVKYESVDKAKSFFSKFDSIRYNVERDMFEWKFNYGEFTKKAEGTKTDWTVCSYGNRIITFRNPDKNSQWDNKEINLTENIKLLFERFGIDLSSNLKDEIMQRTEKEFFIELISLFKLVLQMRNSWTGTDIDYLVSPVCNENGEFFDSRNVDETLPQNADANGAYNIARKGMILLDKIKKSNGEKKLALSITNREWLSFAQGCCKNG

SEQ ID NO: 1597 - protein, 1245 aa, Unknown
  Description of Unknown: uncultivated organism sequence
  Category: MG75 effectors
  Description: MG75-83 effector
MGIFSDFTNLYPLSKTLRFKLIPVGETLKHFMDSGILEEDQHRAESYVKVKAIIDDYHRAYIESALAGFELPLESTGKYNSLEEYYMYHSIRNKTEEIQNTLSKIRASLRKQIVGQLVKNEKFKRIDKKELIQDDLIDFVRNDADADEKIGLISEFRNFTVYFKGFHENRKNMYSDEEKSTSIAFRLIHENLPKFIDNMEVFAKIANTSISDDFVAVQKELCPESVTLCEMFKLGYFNKTLSQKQIDAYNTIIGGKTTSDGDKIKGLNEYINLYNQQHRQEKLPKMKLLFKQILSDKESASWLPEKFENDSQVARAILDFWNTIRDTVLAEGGLRTVVSSLGSYCLEGVFLKNDLQLADISQKATGDWGKIAAEIKVKIESTNPQKKKESYEVYQERIDKLFKSYKSFSLAFVNDCLRGEYKIEDYFVRLGAVNTDTLQKENHFARIFNAYTDVKEVLESYANSSDTQLIQDNVSIQKLKQFLDAVKELQAYVKPLLGCGDESGKDERFYGDFVEYWNQLDLITPLYNMVRNYVTRKPYSVEKIKINFQNPTLLNGWDLNKETDNTSVILRRGGKYYLAIMNSKFRKVFLEYPSGVNRDCYEKMEYKLLPGANKMLPKVFFSKSRINEFMPDDELLSNYEKGTHKKSGNCFSLDDCHALIDFFKKSLNKHEDWKNFGFKFSDTSTYTDMSGFYKEVEHQGYKLSFKPVDAGYVDGLVDEGKIFLFQIYNKDFSESSKGTPNLHTLYWRMLFDETNLGDVVYKLNGEAELFFRKASIKVSHPTHPANVPIRKKNPMHKDEERTLKYDLIKDKRYTVDQFQFHVPITMNFKSDGSGNINQKVLEYLRAASDTHIIGIDRGERNLLYLVVIDGNGKICEQFSLNEVKVEYNGEVYSTDYHELLDVKEAERKQARQSWQSIANIKELKEGYLSQVIHKIAEMIVKYHAIVVLEDLNAGFMRGRQKVEKQVYQKFEKMLIEKLNYLVFKKQPSDLPGGLMHAYQLTNKFESFSSLGKQCGFLFYIPAWNTSKMDPVTGFVNLFDVKYESVDKAKSFFSKFESIRYNAERDLFEWKFNYGDFTKKAEGSKSDWTACSYGNRIITYRNPDKNAQWDSKEINLTACIKTLFEKFGIDLSSNLKEAIMQRDEKEFFVELISLFKLVLQIRNSLTGKDIDYLMSPVCNANGDFFDSRKVDESLPQNADANGAYNIARKGMILLDKIRECVGDKKLNLAITNKEWLSFAQGYCKNG

SEQ ID NO: 1598 - protein, 1274 aa, Unknown
  Description of Unknown: uncultivated organism sequence
  Category: MG75 effectors
  Description: MG75-84 effector
MAKNFEDFKRLYPLSKTLRFEAKPIGATLDNIVKSGLLDEDEHRAASYVKVKKLIDEYHKVFIDRVLDNGCLPLEDKGDNNSLAEYYDSYVSKSQNEDAKKAFKEIQQNLRSIIAKKLTDDKAYANLFGNKLIESYKDKADKTKIIDSDLIQFIHTAESTQLDSMSQDEAKELVKEFWGFTTYFVGFFDNRKNMYTAEEKSTGIAYRLINENLPKFIDNMEAFKKAIARPEIQANMEELYSNFSEYLNVESIQEMFLLDYYNMLLTQKQIDVYNAIIGGKTDDEHDVKIKGINEYINLYNQQHKDDKLPKLKALFKQILSDRNAISWLPEEFNSDQEVLNAIKDCYERLAENVLGDKVLKSLLGSLADYSLDGIFIRNDLQLTDISQKMFGNWGVIQNAIMQNIKHVAPARKHKESEEDYEKRIAGIFKKADSFSISYINDCLNEADPNNAYFVENYFATFGAINTPTMQRENLFALVQNAYTEVAALLHSDYPTVKHLAQDKANVSKIKALLDAIKSLQHFVKPLLGKGDESDKDERFYGELASLWAELDTVTPLYNMIRNYMTRKPYSQKKIKLNFENPQLLGGWDANKEKDYATIILRRNGLYYLAIMNKDSKKLLGKAMPSDGECYEKMVYKLLPGANKMLPKVFFAKSRMEDFKPSKELVEKYNNGTHKKGKNFCIQDCHNLIDYFKQSIDKHEDWSKFGFNFSETSTYEDLSGFYREVEQQGYKLSFARVSVSYINQLVEEGKMYLFQIYNKDFSEYSKGTPNMHTLYWKALFAERNLADVVYKLNGQAEMFYRKKSIENTHPTHPANHPILNKNKDNKKKESLFEYNLIKDRRYTVDKFMFHVPITMNFKSSGSENINQDVKAYLRYADDMHIIGIDRGERHLLYLVVIDLQGNIKEQVSLNEIVNDYNGNTYHTNYHDLLDVREDERLKARQSWQAIENIKELKEGYLSQVIHKITQLMVKYHAIVVLEDLNMGFMRGRQKVEKQVYQKFEKMLIDKLNYLVDKKADVSVSGGLLNAYQLTSKFDSFQKMGKQSGFLFYIPAWNTSKIDPITGFVNLLDTRYQNVEKAKVFFSKFDAIRYNKDKDWFEFNLDYDKFGKKAEGTRTKWALCTRGMRIDTFRNKEKNSQWDNQEVDLTAEMKSLLEHYYIDIHGNLKDAISAQTDKAFFTGLLHILKLTLQMRNSITGTETDYLVSPVADENGIFYDSRSCGDELPENADANGAYNIARKGLMMIEQIKEAKDLDNLKFDISNKSWLNFAQQKPYKNG

SEQ ID NO: 1599 - protein, 1272 aa, Unknown
  Description of Unknown: uncultivated organism sequence
  Category: MG75 effectors
  Description: MG75-85 effector
MKFDDFKKLYSLSKTLRFEAKPVGSTLKNIIESGLLEEDEHRAQSYVKVKKLIDEYHKVFIDRVLNDGCLTIENKGKKDSLEEYYESYMSKSNDENVSKTFKEIQENLRSVIAKKLTDNNAYANLFGNKLIESYKDKDEKNKIIDSDLIQFINTAEPSQLDSMSQDEAKELVKEFWGFTTYFVGFFDNRKNMYTSEEKSTGIAYRLVNENLPKFIDNMEAFKKAIAKPEIQTNMEELYSNFAEYLNVESIQEMFQLDYYNMLLTQKQIDVYNAIIGGKTDEEHDIKIKGINEYINLYNQQHKDEKLPKLKALFKQILSDRNAISWLPEEFNSDQEVLNAINDCYKRLSENVLGDKVLKSLLCSLDDYNLDGIFVRNDLQLTDISQKMFGNWSVIQSAIMQNIKNVAPARKRKESEEDYEKRISDIFKKADSFSIQYINDCLNEMDNNNLHAVDGYFATLGAVNTPTMQRENLFALIQNAYTDISNLLETPYPENKNLAQDKTNVAKVKALLDAIKSLQHFVKPLLGKGDESDKDERFYGELASLWTELDTVTPLYNMIRNYMTRKPYSEKKIKLNFENPQLLGGWDANKEKDYATIILRRNGMYYLAIMDKDSKKLLGKTMPSDGECYEKMVYKLLPGANKMLPKVFFAKSRINDFKPSKLIVENYNNGTHKKGKNFNINDCHNLIDYFKQSIDKHEDWSKFGFNFSDTSTYEDLSGFYREVEQQGYKLSFTNVSVSFIDKLVDDGKMYLFQIYNKDFSDFSKGTPNMHTLYWKALFDERNLADVVYKLNGQAEMFYRKKSINNTHPTHPANHPIQNKNKDNKKKESVFEYDLIKDRRYTVDKFLFHVPITMNFKSVGSENINQQVREYLQQADDTHIIGIDRGERHLLYLVVIDMQGNIKEQFTLNEIVNEYNGNTYRTNYHDLLDTREEERLTARQSWQTIENIKELKEGYLSQVIHKITQLMVKYHAVVVLEDLNKGFMRGRQKVEKQVYQKFEKMLIDKLNYLVDKKADAAQSGGLLNAYQLTSKFDSFQKLGKQSGFLFYIPAWNTSKIDPVTGFVNLLDTRYQNTEKAKAFFSRFDAIRYNANKDWFEFYLDYDKFCTKAEGTRTRWTLCTQGSRISTFRNAEKNSQWDNLEVDLTREMKSLFEHYHINICGNLKEEICLQTDKAFFTGLLHMLKLTLQMRNSITGTETDYLISPVADENGTFYDSRSCDATLPKNADANGAYNIARKGLMFIGQIKETKDLANFKYDISNKAWLNFAQQKPYKNE

SEQ ID NO: 1600 - protein, 1319 aa, Unknown
  Description of Unknown: uncultivated organism sequence
  Category: MG75 effectors
  Description: MG75-86 effector
MAKIFEDFKRLYPLSKTLRFDAKPVGATLDNIVKSGLLEEDEHRAASYVRVKKLIDEYHKVFIDRVLDNGCLPLENKGENNSLAEYYDSYVSKSQNEDAKKAFEENQQNLRSIIAKKLTGDKAYANLFGKNLIESYKDKKDKKKIIDSDLIQFINTADSTQLDSMTQVEAKELVKEFWGFVTYFYGFFDNRKNMYTAEKKSTGIAYRLINENLPKFIDNMEAFKKVIARPEIQANMEELYSDFSEYLNVESIQEMFQLDYYDMLLTQKQIDVYNAIIGGKTDDEHDVKIKGINEYINLYNQQHKDTRLPKLKALFKQILSDRNAISWLPEEFNSDQEVLNAIKDCYERLSENVLGDKVLKSLLGSLADYSLEGIFIRNDLQLTDVSQKMFGNWGVIQNAIMQNIKHVAPARKHKESEEEYEKRIAGIFKKADSFSISYLNDCLNEADPNNAYFVENYFATFGAVNTPTMQRENLFALVQNKYTEVAALLHSDYPTAKHLAQDKANVAKIKALLDAIKSLQHFVKPLLGKGDESDKDERFYGELASLWAELETVTPLYNMIRNYMTRKPYSQKKIKLNFENPQLLDGWDANKEKDYATIILRRNGLYYLAIMGKDSKNLLGKAMPSDGECYEKMVYKQFDISKQLPKCTTELKHVRKALVEDAKRSCLLSDFNNWNKPLNVTRKLWELNNFVWDKKKEDWVLRKKDNETRPKKFHKKYLELTSDKKGYNQAKNDWIKFIKEFLSSYKKVEAYDIHYKKRYNSVDELYKQLNGDLYAISFTYVSASFIEQLVSEGKMYLFQIYNKDFSEYSKGTPNMHTLYWKALFDERNLADVVYKLNGQAEMFYRKKSIENTHPTHPANHPILNKNKDNKKKESLFDYDLIKDRRYTVDKFMFHVPITMNFKSSGSENINQDVKAYLRHADDMHIIGIDRGERHLLYLVVIDLQGNIKEQYSLNEIVNEYNGNTYHTNYHDLLDVREEERLKARQSWQTIENIKELKEGYLSQVIHKITQLMVKYHAIVVLEDLNMGFMRGRQKVEKQVYQKFEKMLIDKLNYLVDKKADASVSGGLLNAYQLTSKFDSFQKMGKQSGFLFYIPAWNTSKIDPVTGFVNLLDTRYQNVEKAKVFFSKFDAIRYNKDKDWFEFNLDYDKFGKKAEGTRTKWALCTRGMRIDTFRNKEKNSQWDNQEVDLTAEMKSLLEHYYIDIHGNLKDAISAQTDKTFFTGLLHILKLTLQMRNSITGTETDYLVSPVADENGIFYDSRSCGDELPENADANGAYNIARKGLMMIEQIKDAKDLNNLKFDISNKAWLNFAQQKPYKNG

SEQ ID NO: 1601 - protein, 1274 aa, Unknown
  Description of Unknown: uncultivated organism sequence
  Category: MG75 effectors
  Description: MG75-87 effector
MAKIFEDFKRLYPLSKTLRFEAKPIGATLDNMVKSGLLDEDEHRAASYVKVKKLIDEYHKVFIDRVLDNGCLPLKNEGHNNSLTEYYESYVTKSQNEDAKKVFKEIQQNLRSIIAKKLTEDKAYANLFGKNLIESYKDKTDKTKIIDSDLIKFINTAESTQLDSMSQDEAKELVKEFWGFTTYFVGFYDNRKNMYTAEEKSTGIAYRLVNENLPKFIDNMEAFKKAIARPEIQANMEELYSDFSEYLNVESVQEMFQLDYYNMLLTQKQIDVYNAIIGGKTDDEHDVKIKGINEYINLYNQQHKDDKLPKLKALFKQILSDRNAISWLPEEFNGDQEVLNAIKDCYERLSENVLGDKVLKSLLGSLADYSLEGIFIRNDLQLTDVSQKMFGNWGVIQNAIIQNIKHVAPARKHKESEEEYEKRIAGIFKKADSFSISYINDCLNEADPNNAYFVENYFATQGAVDTPTMQRENLFALVQNAYTEVAALLHSDYPTAKNLAQDKADVAKIKALLDAIKSLQHFVKPLLGKGDESDKDERFYGELTSLWSELDTVTPLYNMIRNYMTRKPYSQKKIKLNFENPQLLGGWDANKEKDYATIILRRNGLYYLAIMNKDSKKLLGKAMPSDGECYEKMVYKLLPGANKMLPKVFFTKSRMGDFKPSKELIEKYNNGTHKKGKNFNIQDCHNLIDYFKQSISKHEDWGKFGFNFSDTSTYEDLSGFYREVEQQGYKLSFARVSVSYISQLVEEGKMYLFQIYNKDFSEYSKGTPNMHTLYWKALFDECNLADVVYKLNGQAEMFYRKKSIENTHPTHPANHPIQNKNKDNKKKESLFDYDLIKDRRYTVDKFMFHVPITMNFKSSGSENINQDVKAYLRHADDMHIIGIDRGERHLLYLVVIDLQGNIKEQFSLNEIVNEYNGNTYHTNYHDLLDVREEERLKARQSWQTIENIKELKEGYLSQVIHKITQLMVKYHAIVVLEDLNMGFMRGRQKVEKQVYQKFEKMLIDKLNYLVDKKADASVSGGLLNAYQLTSKFDSFQKLGKQSGFLFYIPAWNTSKIDPITGFVNLLDTRYQNVEKAKVFFSKFDAIRYNKDKDWFEFNLDYDKFGKKAEGTRTKWTLCTRGMRIDTFRNKEKNSQWDNQEVDLTAEMKSLLEHYYIDIHGNLKDAISAQTDKAFFTGLLHILKLTLQMRNSITGTETDYLVSPVADENGIFYDSRSCGDELPENADANGAYNIARKGLMMIEQIKDAKDLDNLKFDISNKSWLNFAQQKPYKNE

SEQ ID NO: 1602 - protein, 1274 aa, Unknown
  Description of Unknown: uncultivated organism sequence
  Category: MG75 effectors
  Description: MG75-88 effector
MAKIFEDFKRLYPLSKTLRFEAKPIGATLDNMVKSGLLDEDEHRAASYVKVKKLIDEYHKVFIDRVLDNGCLPLKNEGHNNSLTEYYESYVTKSQNEDAKKVFKEIQQNLRSIIAKKLTEDKAYANLFGKNLIESYKDKTDKTKIIDSDLIKFINTAESTQLDSMSQDEAKELVKEFWGFTTYFVGFYDNRKNMYTAEEKSTGIAYRLVNENLPKFIDNMEAFKKAIARPEIQANMEELYSDFSEYLNVESVQEMFQLDYYNMLLTQKQIDVYNAIIGGKTDDEHDVKIKGINEYINLYNQQHKDDKLPKLKALFKQILSDRNAISWLPEEFNGDQEVLNAIKDCYERLSENVLGDKVLKSLLGSLADYSLEGIFIRNDLQLTDVSQKMFGNWGVIQNAIIQNIKHVAPARKHKESEEEYEKRIAGIFKKADSFSISYINDCLNEADPNNAYFVENYFATQGAVDTPTMQRENLFALVQNAYTEVAALLHSDYPTAKNLAQDKADVAKIKALLDAIKSLQHFVKPLLGKGDESDKDERFYGELTSLWSELDTVTPLYNMIRNYMTRKPYSQKKIKLNFENPQLLGGWDANKEKDYATIILRRNGLYYLAIMNKDSKKLLGKAMPSDGECYEKMVYKLLPGANKMLPKVFFAKSRMGDFKPSKELIEKYNNGTHKKGKNFNIQDCHNLIDYFKQSISKHEDWGKFGFNFSDTSTYEDLSGFYREVEQQGYKLSFARVSVSYISQLVEEGKMYLFQIYNKDFSEYSKGTPNMHTLYWKALFDECNLADVVYKLNGQAEMFYRKKSIENTHPTHPANHPIQNKNKDNKKKESLFDYDLIKDRRYTVDKFMFHVPITMNFKSSGSENINQDVKAYLRHADDMHIIGIDRGERHLLYLVVIDLQGNIKEQFSLNEIVNEYNGNTYHTNYHDLLDVREEERLKARQSWQTIENIKELKEGYLSQVIHKITQLMVKYHAIVVLEDLNMGFMRGRQKVEKQVYQKFEKMLIDKLNYLVDKKADASVSGGLLNAYQLTSKFDSFQKLGKQSGFLFYIPAWNTSKIDPITGFVNLLDTRYQNVEKAKVFFSKFDAIRYNKDKDWFEFNLDYDKFGKKAEGTRTKWTLCTRGMRIDTFRNKEKNSQWDNQEVDLTAEMKSLLEHYYIDIHGNLKDAISAQTDKAFFTGLLHILKLTLQMRNSITGTETDYLVSPVADENGIFYDSRSCGDELPENADANGAYNIARKGLMMIEQIKDAKDLDNLKFDISNKSWLNFAQQKPYKNE

SEQ ID NO: 1603 - protein, 1271 aa, Unknown
  Description of Unknown: uncultivated organism sequence
  Category: MG75 effectors
  Description: MG75-89 effector
MEFNDFKRLYPLSKTLRFEAKPIGSTLNNIIKSGLLEEDEHRAQSYVKVKKLIDEYHKVFIDRVLDDGCLTIENKDKKNSLEEYYESYMSKSNDENVSKTFKEIQENLRSVIAKKLTDDNAYANLFGNKLIESYKDKDDKKKIIDSDLIQFINTAEPSQLDSMSQDEAKELVKEFWGFTTYFVGFFDNRKNMYTSEEKSTGIAYRLVNENLPKFIDNMEAFKKAIAKPEIQANMGELYSNFAEYLNVESIQEMFQLDYYNMLLTQKQIDVYNAIIGGKTDEDHDVKIKGINEYINLYNQQHKDEKLPKLKALFKQILSDRNAISWLPEEFNSDKEVLNAIKDCYERLSENVLGDKVLKSLLCSLSDYNLNGIFVRNDLQLTDISQKMFGNWSVIQNAIMQNIKNVAPARKRKESEEDYEKRISDIFKKADSFSIQYINDCLNEMDNNNLHAVDGYFATLGAVNTPTMQRENLFALIQNAYTDISDLLDTPYPENKNLAQDKTNVAKVKALLDAIKSLQHFVKPLLGMGDESDKDERFYGELASLWTELDTVTPLYNMIRNYMTRKPYSEKKIKLNFENPQLLGGWDANKEKDYATIILRRNGMYYLAIMDKDSKKLLGKTMPSDGECYEKMVYKLLPGANKMLPKVFFAKSRINDFKPSKKIVENYNNGTHKKGKNFNINDCHDLIDYFKQSIDKHEDWSKFGFNFSDTSTYEDLSGFYREVEQQGYKLSFTNVSASFIDKLVDEGKMYLFQIYNKDFSDYSKGTPNMHTLYWKALFDERNLADVVYKLNGQAEMFYRKKSIDYTHPTHPANHPIQNKNKDNKKKESVFEYDLVKDRRYTVDKFLFHVPITMNFKSVGSENINQQVREYLQQADDTHIIGIDRGERHLLYLVVIDMQGNIKEQFTLNEIVNEYNGNTYRTNYHDLLDTREEERLTARQSWQTIENIKELKEGYLSQVVHKITQLMVKYHAVVVLEDLNKGFMRGRQKVEKQVYQKFEKMLIDKLNYLVDKKADATQSGGLLNAYQLTSKFDSFQKLGKQSGFLFYIPAWNTSKIDPVTGFVNLLDTRYLNTEKAKAFFSKFDAIRYNADKDWFEFNLDYDKFGTKAEGTRTTWTLCTQGNRICTFRNAEKNSQWDNQEIDLTREMKSLFEHYHINICGNLKEEICSQTDKAFFTGLLHILKLTLQMRNSITGTETDYLVSPVADENGVFYDSRSCGDTLPKNADANGAYNIARKGLMLIGQIKETKDLANFKYDISNKAWLNFAQQKPYKK

SEQ ID NO: 1604 - protein, 1264 aa, Unknown
  Description of Unknown: uncultivated organism sequence
  Category: MG75 effectors
  Description: MG75-90 effector
MNFEQFTHLYPLSKTLRFELRPVGATLARIKEGGFLENDNHRAESYKKVKKLIDEYHKHFIEQALGDFSLTENETEGSKCLNSYLETYIQLYRSSRIEDAEKKAFEKVQAEMRKLIAKTLKGSEAYKRLFKQELIKEDLTAFLRTHGGTVADEELVEEFKNFTTYFTGFYENRENMYSEEEKSTAISNRLVNENLPKFVDNMAAFAIIAQVPEVRAMLDVMQKDLGAELDGTTIDELFTLPFFNKVLTQKQIAVYNAVIGGKVRDSHSKGESHIKGINQIVNLYNQQHKDARLPKLKMLYKQILSDREALSWLPEKFDKDADLLKAIHDGYERLASDGVLENLRTLLESMADYQAEGIFITNDQQLTRISQKMFGEWSFISEAILCVLKKEVPQKRNECDEKYEERIDKMLKNHGGFSIRFIDDCVAAYVNTLDDEEQKKRFIPTVEAYFATLGAFDTEEEQTVNFFSRIQNARDALQGLLDSAYPEGRALIQDKENGALLKELLDAILALMHFVKPLLGKNENGKDERFYGELMQIWDEFDSFVPLYNMSRNYLTQKPYSEEKYKLNFENSQLLKGWDLNKEADNTSIILRKDGLFYLAIMNKKHNKLFARELPADGDCYDKMDYKLLPGPNKMFPKVFFSKSRIAEFAPSEHIMDVYRKGSFKKGDTFNLQDCHDLIDFFKASILKHEDWRQFEFKFSETEQYDDISGFYREVEAQGYKVTFRQVSVSYIDRLVNEGKLYLFQIYNKDFSSYSKGTPNMHTLYWRALFDERNLSDVVYKLNGEAEVFYRKKSIEAHPTHPANRPIKNKNKLNDKVESLFAYDLIKDRRYSEDKFSLHVPITMNFKSIGGPNINDDVVEFLRTNENLHFIGIDRGERHLLYLTVIDSHGHILEQRTLNDVVNNYQGKDYHTDYHDLLETRERQRQEARSSWKAIENIKDLKEGYLAQVVHQIAQLMVKYHAIVVLEDLNGGFMRGRQKVERSVYQQFEKKLIDKLNYLVDKKTDAHAPGGLMNAYQLANQFKSFKSMGRQSGFIFYIPAWNTSKIDPVTGFTNLFDTRYKNVHDAQQFFSMFKSIRYNETADRFEFRFSYSDFTRKAEGSRTDWTVCTYGTRIKTFRDPQKNNEWTSKEVVLTEEFKKFFASYGVDIHSNLKDSIAAHDEKAFFEQLLALMRLTLQIRNSKSGTDVDYLLSPVADENGVFFDSRSCGNSLPQDADANGAYNIARKGLMLVRQMREAKDLKKFKADMTNRNWLKFAQEKPYLND

SEQ ID NO: 1605 - protein, 1246 aa, Unknown
  Description of Unknown: uncultivated organism sequence
  Category: MG75 effectors
  Description: MG75-91 effector
MMETFSDFTNLYPLSKTLRFRLIPVGKTLRHFIDSGILEEDQHRAESYVKVKAIIDDYHRSYIESSLSAFELPVESMGKSNSLEEYYLYHNIRNKTEDIQNALSKVRNNLRKQIVAQLTKNEMFKRIDKKELIQNDLIDFVKNEPDANEKIALISEFRNFTVYFKGFHENRKNMYSDEEKSTSIAFRLIHENLPKFIDNMEVFAKIQNTSISEKFDAIQKELCPDSVAFVDMFKLGYFNRTLSQRQIDAYNTVISGRTTAEGEKIKGLNEYINLYNQQHKQEKLPKMKLLFKQILSDRESASWLPEKLENDKQVVGALVDFWNAIHDTVLAEGGLKTVISSLVSYSLEGIFLKNDLQLTDVSQKATGSWSKIPAAIKQKLEAMNPQKKKESYEGYQERIDKIFKSYKSFSLAFINECLHGEYKIEDYFIKLGAINTDLLQKENHFSHILNTYTDIKEVIESYSESTDTKLIRDNGSIQKIKQFLDAVKDLQSYVKPLLGNGDETGKDERFYGDFVEYWNQLDLITPLYNMVRNYVTQKNYSIEKIKINFQNPTLLNGWDLNKETDNTSVILRRDGKYYLAIMNSKFRKVFLKYPSGSDRNCYEKMEYKLLPGANKMLPKVFFSKSRIQEFMPDERLLSNYEKGTHKKTGNCFSLTDCHALIDFFKKSLNKHEDWKNFGFKFSNTSTYTDMSGFYKEVENQGYKLSFKPVDAVYVDQLVDEGKIFLFQIYNKDFSEHSKGTPNMHTLYWKMLFDETNLGDVVYKLNGEAEVFFRKASIKVSSPTHPANVPIKKKNPKHKDEERLLKYDLIKDKRYTVDQFQFHVPITMNFKSDGNGNINQKVVEYLRSASNIHIIGIDRGERNLLYLVVIDGSGKICEQFSLNEIKVEHNGETYSTNYHDLLDIKENERKQARQSWQSIANIKELKEGYLSQVIHKISELMVKYNAIVVLEDLNTGFMRGRQKVEKQVYQKFEKMLIEKLNYLVFKKQPSDSCGGLMHAYQLTNKFEGFNKLGKQSGFLFYIPAWNTSKMDPMTGFVNLFDLKYESIDKAKSFFSKFDSIRYNVERDMFEWKFNYDEFTKKAEGTKTNWTVCSYGNRIITFRNPNKNSQWDNKEINLTENIKLLFERFGIDLSSNLKDEIMQRTEKEFFIELISLFKLVLQMRNSWTGTDIDYLVSPVCNEKGEFFDSRNVDKALPQNADANGAYNIARKGLILLDRIKESTSDKKLNFSITNKEWLSFVQGCCKNG

SEQ ID NO: 1606 - protein, 1274 aa, Unknown
  Description of Unknown: uncultivated organism sequence
  Category: MG75 effectors
  Description: MG75-92 effector
MAKIFEDFKRLYPLSKTLRFEAKPIGATLDNIIKSGLLDEDEHRAASYVRVKKLIDEYHKVFIDRVLDNGCLPLKNEGHNNSLTEYYESYVTKSQNEDAKKVFKEIQQNLRSIIAKKLTEDKAYANLFGKNLIESYKDKTDKTKIIDSDLIKFINTAESTQLDSMSQDEAKELVKEFWGFTTYFVGFYDNRKNMYTAEEKSTGIAYRLVNENLPKFIDNMEAFKKAIARPEIQANMEELYSDFSEYLNVESVQEMFQLDYYNMLLTQKQIDVYNAIIGGKTDDEHDVKIKGINEYINLYNQQHKDDKLPKLKALFKQILSDRNAISWLPEEFNGDQEVLNAIKDCYERLSENVLGDKVLKSLLGSLADYSLDGIFIRNDLQLTDISQKMFGNWGVIQNAIMQNIKHVAPARKHKESEEDYEKRIAGIFKKADSFSISYINDCLNEADPNNAYFVENYFATFGAVNTPTMQRENLFALIQNAYTEVAALLHSDYPIAKHLAQDKANVAKIKALLDAIKSLQHFVKPLLGKGDESDKDERFYGELASLWAELDMVTPLYNMIRNYMTRKPYSQKKIKLNFENPQLLGGWDANKEKDYATIILRRDGLYYLAIMNKESKKLLGKAMPSDGECYEKMVYKLLPGANKMLPKVFFAKSRMEDFKPSKELVEKYNNGTHKKGKNFNIQDCHNLIDYFKQSISKHEDWGKFGFNFSDTSTYEDLSGFYREVEQQGYKLSFARVSVSYISQLVEEGKMYLFQIYNKDFSEYSKGTPNMHTLYWKALFDERNLADVVYKLNGQAEMFYRKKSIENTHPTHPANHPILNKNKDNKKKESLFDYDLIKDRRYTVDKFMFHVPITMNFKSSGSENINQDVKAYLRHTDDMHIIGIDRGERHLLYLVVIDLQGNIKEQYSLNEIVNEYNGNTYHTNYHDLLDVREEERLKARQSWQTIENIKELKEGYLSQVIHKITQLMVKYHAIVVLEDLNMGFMRGRQKVEKQVYQKFEKMLIDKLNYLVDKKADASVSGGLLNAYQLTSKFDSFQKLGKQSGFLFYIPAWNTSKIDPVTGFVNLLDTRYQNVEKAKVFFSKFDAIRYNKDKDWFEFNLDYDKFGKKAEGTRTKWTLCTRGMRIDTFRNKEKNSQWDNQEVDLTAEMKSLLEHYYIDIHGNLKDAISAQTDKAFFTGLLHILKLTLQMRNSITGTETDYLVSPVADENGIFYDSRSCGDELPENADANGAYNIARKGLMLIEQIKEAKDLDNLKFDISNKSWLNFAQQKPYKNE

SEQ ID NO: 1607 - protein, 1264 aa, Unknown
  Description of Unknown: uncultivated organism sequence
  Category: MG75 effectors
  Description: MG75-93 effector
MNFEQFTHLYPLSKTLRFELRPVGATLAKIKEGGFLENDNHRAESYKKVKKLIDEYHKHFIEQALGDFSLTENETEGSKCLNSYLETYIQLYRSSRIEDAEKKAFEKVQAEMRKFIAKTLKGSEAYKRLFKQELIKEDLTAFLRTHGGTVADEELVEEFKNFTTYFTGFYENRENMYSEEEKSTAISYRLVNENLPKFVDNMAAFAIIAQVPEVRAMLDVMQKDLGAELDGTTIDELFTLPFFNKVLTQKQIAVYNAVIGGKVSDSHSKGESHIKGINQIVNLYNQQHKDARLPKLKMLYKQILSDREALSWLPEKFDKDADLLKAIHDGYERLASDGVLENLRTLLESMADYQAEGIFITNDQQLTRISQKMFGEWSFISEAILCALKKDVPQKRNECDEKYEERIDKMLKNHGGFSIRFIDDCVAAYVNTLDDEEQKKRFIPTVEAYFATLGAFDTEEEQTVNFFSRIQNARDALQGLLDSAYPEGRALIQDKENGALLKELLDAILALMHFVKPLLGKNENGKDERFYGELMQIWDEFDSFVPLYNMSRNYLTQKPYSEEKYKLNFENSQLLKGWDLNKEADNTSIILRKDGLFYLAIMNKKHNKLFARELPTDGDCYEKMDYKLLPGPNKMFPKVFFSKSRKAEFAPSEHIMDIYKKGSFKKGETFNLQDCHDLIDFFKASILKHEDWRQFEFKFSETEQYDDISGFYREVEAQGYKVTFRQVSVSYIDRLVNEGKLYLFQIYNKDFSSYSKGTPNMHTLYWRALFDERNLSDVVYKLNGEAEVFYRKKSIEAHPTHPANRPIKNKNKLNDKEKSLFAYDLIKDRRYSEDKFSLHVPITMNFKSVGGPNINDDVVEFLRTNENLHFIGIDRGERHLLYLTVIDSHGHILEQRTLNDVVNNYQGKDYHTDYHDLLETRERQRQEARSSWKAIENIKDLKEGYLAQVVHQIAQLMVKYHAIVVLEDLNGGFMRGRQKVERSVYQQFEKKLIDKLNYLVDKKTDAHAPGGLMNAYQLANQFKSFKSMGRQSGFIFYIPAWNTSKIDPVTGFTNLFDTRYKNVHDAQQFFSAFKSIRYNETADRFEFKFSYSDFTRKAEGSRTDWTVCTYGTRIKTFRDPQKNNEWTSKEVVLTEEFKKFFAAYHVDIHSNLKDSIAAHDEKAFFEQLLALMRLTLQIRNSKSGTDVDYLLSPVADENGVFFDSRSCGNSLPQDADANGAYNIARKGLMLVRQMREAKDLKKFKADMTNRNWLKFAQEKPYLND

SEQ ID NO: 1608 - protein, 1321 aa, Unknown
  Description of Unknown: uncultivated organism sequence
  Category: MG75 effectors
  Description: MG75-94 effector
MEFDDFKRLYPLSKTLRFEAKPIGATLKNIIKSGLLEEDEHRAQSYVKVKKLIDEYHKAFIDRVLNEGCLTIENKGNKDSLEEYYESYMSKSNDENVSKTFKDIQENLRSVIANKLTKDKGYANLFGNKLIESYKDKDDTKKIIDSDLIQFINTAEPSKLDSMSQDEAKELVKEFWGFTTYFEGFHKNRKNMYTSEEKSTGIAYRLVNENLPKFIDNMEAFKKAIAKPEIQANMEELYSNFAEYLNVESIQEMFQLDYYNMLLTQKQIDVYNAIIGGKTDEENDVNIKGINQYINIYNQHHKDEKLPKLKALFKQILSDRNAISWLPEEFNSDQDVLNAIKDCYERLSENVLGDKVLKSLLCSLSDYNLNGIFVRNDLQLTDISQKMFGNWNVIQNAIMQNFFFKKVAPARKRKESEEDYEKRISDIFKKTDSFSIQYINDCLNEMDDNNLHAVDGYFATLGAVNTPTMQRENLFALIQNAYTDISDLLDTPYPENKNLAQDKTNVAKVKALLDAIKSLQHFVKPLLGKGDESDKDERFYGELASLWTELDTVTLLFNMVHNYMTRKPYSQKKIKLNYKNTQLLAGWDANKEKEHAAIILRRNGMYYLAIMDKDSKNLLDKAMPSDGECYEKMVYKQFDISKQLPKCTTELKRVRKALVEDAKRSCLLSDSKDWNKPLNVTRKLWELNNYVWDKKKADWVLRKKENETRPKKFHKKYLELTSDKKGYNQAKNDWIKFTKEFLSSYKKVEDYDIHYKKRYNSVDELYKQLNSDFYTISFTYVSVSFIDKLVNEGKMYLFKIYNKDFSNYSKGTPNMHTLYWKALFDERNLADVVYKLNGEAEMFYRKKSINNTHPTHPANHPIQNKNKDNKKKESVFEYDLVKDYRYTEDKFLFHVPITMNFKSVGSENINQQVKEYLQQADDTHIIGIDRGERHLLYLVVIDMEGNIKEQFSLNEIVNEYNGNTYRTNYHDLLDVCADKRLKASQSWQTIENIKELKEGYLSQAIHKITQLMVKYHAVVVLEDLNKGFMRGRQKVEKQVYQKFEKMLIDKLNYLVDKKADAAQSGGLLNAYQLTSKFDSFQKLGKQSGFLFYIPAWNTSKIDPVTGFVNLFDTRYTNADKALEFFSKFDAIRYNEEKDWFEFEFDYDKFTQKAHGTRTKWTLCTYGMRLRSFKNPAKQYNWDSEVVALTDEFKRILGEAGIDIHENLKDAICNLEGKRRKYLEPLMQFMKLLLQLRNSRKNPEEDYILSPVADENGVFYDSRSCGDKLPENADANGAYNIARKGLMLIRQIKEAKEFGKVKYDISNKAWLNFAQQKPYKNE

SEQ ID NO: 1609 - protein, 1027 aa, Unknown
  Description of Unknown: uncultivated organism sequence
  Category: MG75 effectors
  Description: MG75-95 effector
MAKNFEDFKRLYSLSKTLRFEAKPIGATLDNIVKSGLLDEDEHRAASYVKVKKLIDEYHKVFIDRVLDDGCLPLENKGNNNSLAEYYESYVSRAQDEDAKKKFKEIQQNLRSVIAKKLTEDKAYANLFGNKLIESYKDKEDKKKIIDSDLIQFINTAESTQLDSMSQDEAKELVKEFWGFVTYFYGFFDNRKNMYTAEEKSTGIAYRLVNENLPKFIDNIEAFNRAITRPEIQENMGVLYSDFSEYLNVESIQEMFQLDYYNMLLTQKQIDVYNAIIGGKTDDEHDVKIKGINEYINLYNQKHKDDKLPKLKSLFKQILSDRNAISWLPEEFNSDQEVLNAIKDCYERLSENVLGDKVLKSMLGSLADYSLDGIFIRNDLQLTDISQKMFGNWSVIQNAIMQNIKHVAPARKHKESEEEYENRIAGIFKKADSFSISYIDACLNETDPNNAYFVENYFATLGAVDTPTMQRENLFALVQNAYTEITALLHSDYPTEKTLAQDKANVAKIKALLDAIKSLQHFVKPLLGKGDESDKDERFYGELASLWAELDTMTPLYNMIRNYMTRKPYSQKKIKLNFENPQLLGGWDANKEKDYATIILRRNGLYYLAIMNKDSKKLLGKAMPSDGECYEKMVYKLLPGANKMLPKVFFAKSRMEDFKPSKELVEKYNNGTHKKGKNFNIQDCHNLIDYFKQSIDKHEDWSKFGFKFSDTSTYEDLSGFYREAEQQGYKLSFARVSVSYINQLVEEGKMYLFQIYNKDFSEYSKGTPNMHTLYWKALFDERNLADVVYKLNGQAEMFYRKKSIENTHPTHPANHPILNKNKDNNKKESLFEYDLIKDRRYTVDKFMFHVPITMNFKSSGSENINQDVKAYLCHADDMHIIGIDRGERHLLYLVVIDLQGNIKEQFSLNEIVNDYNGNTYHTNYHDLLDVREDERLKARQSWQTIENIKELKEGYLSQVIHKITQLMVKYHAIVVLEDLNMGFMRGRQKVEKQVYQKFEKMLIEKLNYLVDKKADASVSGGLLNAYQ

SEQ ID NO: 1610 - protein, 1274 aa, Unknown
  Description of Unknown: uncultivated organism sequence
  Category: MG75 effectors
  Description: MG75-96 effector
MAKNFEDFKRLYPLSKTLRFEAKPIGATLDNIVKSGLLEEDEHRAASYVKVKKLIDEYHKVFIDRVLADGCLPLENEGHNNSLAEYYDSYVSKSQNEDAKKAFEENQQNLRSIIAKKLTEDKAYANLFGKNLIESYKDKTDKTKIIDSDLIQFINTAESTQLNSMSQDEAKELVKEFWGFTTYFVGFFDNRKNMYTAEEKSTGIAYRLINENLPKFIDNMEAFKKAIARPEIQANMEELYSNFSEYLNVESIQEMFLLDYYNMLLTQKQIDVYNAIIGGKTDDEHDVKIKGINEYINLYNQQHKDDKLPKLKALFKQILSDRNVISWLPEEFNSDQEVLNAIKDCYERLSDNVLGDKVLKSLLGSLADYSLDGIFIRNDLQLTDISQKMFGNWGVIQNAIMQNIKHVAPARKHKESEEDYEKRIAGIFKKADSFSISYINDCLNEADSNNAYFVENYFATFGAVNTPTMQRENLFSLVQNAYTEVAALLHSDYPTAKHLAQDKANVAKIKALLDAIKSLLHFVKPLLGKGDESNKDERFYGELASLWAELDTVTPLYNMIRNYMTRKPYSQKKIKLNFENPQLLGGWDANKEKDYATIILRRDGLYYLAIMNKESKKLLGKAMPSDGECYEKMVYKLLPGANKMLPKVFFAKSRMEDFKPSKELVEKYNNGTHKKGKNFNIQDCHNLIDYFKQSISKHEDWGKFGFNFSDTSTYEDLSGFYREVEQQGYKLSFARVSVSYISQLVEEGKMYLFQIYNKDFSEYSKGTPNMHTLYWKALFDERNLADVVYKLNGQAEMFYRKKSIENTHPTHPANHPILNKNKDNKKKESLFDYDLIKDRRYTVDKFMFHVPITMNFKSSGSENINQDVKAYLRHADDMHIIGIDRGERHLLYLVVIDLQGNIKEQYSLNEIVNEYNGNTYHTNYHDLLDVREDERLKARQSWQTIENIKELKEGYLSQVIHKITQLMVKYHAIVVLEDLNKGFMRGRQKVEKQVYQKFEKMLIDKLNYLVDKKADASVSGGLLNAYQLTSKFDSFQKLGKQSGFLFYIPAWNTSKIDPITGFVNLLDTRYQNVEKAKVFFSKFDAIRYNKDKDWFEFNLDYDKFGKKAEGTRTKWTLCTRGMRIDTFRNKEKNSQWDNHEVDLTAEMKSLLEHYYIDIHGNLKDAISAQTDKAFFTGLLHILKLTLQMRNSITGTETDYLVSPVADENGIFYDSRSCGDELPENADANGAYNIARKGLMMIEQIKEAKDLDNLKFDISNKSWLNFAQQKPYKNG

SEQ ID NO: 1611 - protein, 772 aa, Unknown
  Description of Unknown: uncultivated organism sequence
  Category: MG75 effectors
  Description: MG75-97 effector
MEFNDFKRLYPLSKTLRFEAKPIGSTLNNIIKSGLLEEDEHRAQSYVKVKKLIDEYHKVFIDRVLDDGCLTIENKDKKNSLEEYYESYMSKSNDENVSKTFKEIQENLRSVIAKKLTDDNAYANLFGNKLIESYKDKDDKKKIIDSDLIQFINTAEPSQLDSMSQDEAKELVKEFWGFTTYFVGFFDNRKNMYTSEEKSTGIAYRLVNENLPKFIDNMEAFKKAIAKPEIQANMGELYSNFAEYLNVESIQEMFQLDYYNMLLTQKQIDVYNAIIGGKTDEDHDVKIKGINEYINLYNQQHKDEKLPKLKALFKQILSDRNAISWLPEEFNSDKEVLNAIKDCYERLSENVLGDKVLKSLLCSLSDYNLNGIFVRNDLQLTDISQKMFGNWSVIQNAIMQNIKNVAPARKRKESEEDYEKRISDIFKKADSFSIQYINDCLNEMDNNNLHAVDGYFATLGAVNTPTMQRENLFALIQNAYTDISDLLDTPYPENKNLAQDKTNVAKVKALLDAIKSLQHFVKPLLGMGDESDKDERFYGELASLWTELDTVTPLYNMIRNYMTRKPYSEKKIKLNFENPQLLGGWDANKEKDYATIILRRNGMYYLAIMDKDSKKLLGKTMPSDGECYEKMVYKLLPGANKMLPKVFFAKSRINDFKPSKKIVENYNNGTHKKGKNFNINDCHDLIDYFKQSIDKHEDWSKFGFNFSDTSTYEDLSGFYREVEQQGYKLSFTNVSASFIDKLVDEGKMYLFQIYNKDFSDYSKGTPNMHTLY

SEQ ID NO: 1612 - protein, 1272 aa, Unknown
  Description of Unknown: uncultivated organism sequence
  Category: MG75 effectors
  Description: MG75-98 effector
MEFNDFKRLYPLSKTLRFEAKPIGSTLNNIIKSGLLEEDEHRAQSYVKVKKLIDEYHKVFIDRVLDDGCLTIENKDKKNSLEEYYESYMSKSNDENVSKTFKEIQENLRSVIAKKLTDDNAYANLFGNKLIESYKDKDDKKKIIDSDLIQFINTAEPSQLDSMSQDEAKELVKEFWGFTTYFVGFFDNRKNMYTSEEKSTGIAYRLVNENLPKFIDNMEAFKKAIAKPEIQANMGELYSNFAEYLNVESIQEMFQLDYYNMLLTQKQIDVYNAIIGGKTDEDHDVKIKGINEYINLYNQQHKDEKLPKLKALFKQILSDRNAISWLPEEFNSDKEVLNAIKDCYERLSENVLGDKVLKSLLCSLSDYNLNGIFVRNDLQLTDISQKMFGNWSVIQNAIMQNIKNVAPARKRKESEEDYEKRISDIFKKADSFSIQYINDCLNEMDNNNLHAVDGYFATLGAVNTPTMQRENLFALIQNAYTDISDLLDTPYPENKNLAQDKTNVAKVKALLDAIKSLQHFVKPLLGMGDESDKDERFYGELASLWTELDTVTPLYNMIRNYMTRKPYSEKKIKLNFENPQLLGGWDANKEKDYATIILRRNGMYYLAIMDKDSKKLLGKTMPSDGECYEKMVYKLLPGANKMLPKVFFAKSRINDFKPSKKIVENYNNGTHKKGKNFNINDCHDLIDYFKQSIDKHEDWSKFGFNFSDTSTYEDLSGFYREVEQQGYKLSFTNVSASFIDKLVDEGKMYLFQIYNKDFSDYSKGTPNMHTLYWKALFDERNLADVVYKLNGQAEMFYRKKSIDYTHPTHPANHPIQNKNKDNKKKESVFEYDLVKDRRYTVDKFLFHVPITMNFKSVGSENINQQVREYLQQADDTHIIGIDRGERHLLYLVVIDMQGNIKEQFTLNEIVNEYNGNTYRTNYHDLLDTREEERLTARQSWQTIENIKELKEGYLSQVVHKITQLMVKYHAVVVLEDLNKGFMRGRQKVEKQVYQKFEKMLIDKLNYLVDKKADATQSGGLLNAYQLTSKFDSFQKLGKQSGFLFYIPAWNTSKIDPVTGFVNLLDTRYLNTEKAKAFFSKFDAIRYNADKDWFEFNLDYDKFGTKAEDTRTTWTLCTQGNRICTFRNAEKNSQWDNQEIDLTREMKSLFEHYHINICGNLKEEICSQTDKAFFTGLLHILKLTLQMRNSITGTETDYLVSPVADENGVFYDSRSCGDMLPKNADANGAYNIARKGLMLIGQIKETKDLANFKYDISNKAWLNFAQQKPYKNE

SEQ ID NO: 1613 - protein, 1211 aa, Unknown
  Description of Unknown: uncultivated organism sequence
  Category: MG75 effectors
  Description: MG75-99 effector
MLICLVSRCSKLFYTISRCYFHIESTFSGASISFVLSHIARYAPSPEENSCIPITHFQCKNNFEHLLNKLIESYKDKEDKKKIIDSDLIQFINCANSSQLNGMSEDEAKELVKEFWGFTTYFEGFHTNRKNMYTAEEESTAIAHRLVNENLPKFIDNMDVFKKAVAKPEIQANIEELYANFAAYLNVESIQEMFQLDYYNMLLTQKQIDVYNAIIGGKTDEDHDVKIKGINEYINLYNQQHKNEKLPKLKVLFKQILSDRNAISWLPEEFNDDQEVLNAIKHCYERLSENVLGDKVLKSLLCSLGDYNLDGIFVRNDAQLTDISQKMFGDWGVIQNAIIQNIKNVAPARKRKESEEDYEKRISDIFKKADSFSLRYINDCLNEMDEKNPYTVQWYFSTLGAVNTPTMQRENLFALIQNAYTDISDLLNSQYPTDKNLSQDKTNVAKVKALLDAIKSLQHFVKPLLGRGDESDKDERFYGELASLWTELDTVTPLYNMVRNYMTRKPYSEKKIKLNFENPQLLGGWDANKEKDYASIILRRNGLYYLAIMNKESKKLLGKTMPSDGECYEKMVYKLLPGANKMLPKVFFSKSKIDYFKPSKQIVENYNNDTHKKGKNFNINDCHDLIDFFKQSIDIHEDWSKFGFKFSDTSTYKDLSGFYREVEQQGYKLSFTKVSVSFIDKLVDDGKMYLFQIYNKDFSKYSKGTPNMHTLYWKALFDERNLADVVYKLNGQAEMFYRKKSIVYTHPTHPANHPILNKNKENKKKESVFEYDLVKDRRYTVDKFLLHVPITMNFKSVGSENINQQVREYLQQAEDTHIIGIDRGERHLLYLVVIDMQGNIKEQYTLNEIVNEYNGNTYRTNYYDLLNTREEERLTARQSWQTIENIKELKEGYLSQVIHKITQLMVKYHAVVVLEDLNKGFMRGRQKVEKQVYQKFEKMLIDKLNYLVDKKADAAQLGGLLNAYQLTSKFDSFQKLGKQSGFLFYIPAWNTSKIDPVTGFVNLLDTRYQNTEKAKAFFSKFDAIRYNADKDWFEFYLDYDKFGTKAEGTRTKWTLCTQGYRIRTFRNADKNSQWDNQDVDLTKELKALFEIYHINIGGNLKEGICSQTDKAFFTGLLHILKLTLQMRNSITGTETDYLVSPVADENGVFYDSRSCGDTLPKNADANGAYNIARKGLMLIEQIKETKDLANFKYDISNKAWLNFAQQKPYEK

SEQ ID NO: 1614 - protein, 1254 aa, Unknown
  Description of Unknown: uncultivated organism sequence
  Category: MG75 effectors
  Description: MG75-100 effector
MKKNMKRKFDDFIHLYSLSKTLRFEARPIGDTLRNFKKNGLLERDKHRAESYVKVKKLIDEYHKAFIDRVLNGSVLNYVNKGKYDSLTEYYDLYSVPRKDEASQKHFKAIQQHLRQQIVKKLTDDKDYKHLFGKELLESYKDKGDKKKLNEADLVQFINAANPKQLHTLSKKEAIDLVQEFSGFTTYFNEFHKNRKNMYSAEEKSTGIAYRLINENLPKFIDNMKSFKKIVDIPEMKDNLKQIHEYFVDYLNVENIHEMFQLDYYNQLLTQKQIDVYNAIIGGKTDNEHKEKIKGINEYVNLYNQTHKDAKLPKLKVLFKQILSDRNAISWLPEEFKDDQEVLNAIKDCYARLSKNVLGDNILKELLCSLAEYDTKGIFLRNDLQLTDISQKMFGNWSVIPSAIKNDKDVAFKKQDSFSIDYIDACLDKFVDNNTHTIEGYFATLGAVDTQTTQLENIFAQIKNAYTGIESLLNSAYPEDKNLSQDKDNVAKIKLFLDALMSLMHFVKPLLGKGDESNKDEKFYGDFTLLWTELETVVPLYNMVRNYMTRKPYSKSKIKLNFDNSQLLGGWDANKESDYASILLRRDGKYYLAIVDKDSKKLLGKSMPSDGECYEKMVYKLLPGANKMLPKVFFATSRIKDFKPSEQLLENYNKGTHKKGVNFSISDCHALIDYFKQSINKHEDWKNFNFNFSETSTYEDLSAFYREVEQQGYKITFTNVSVAFIDKLVKEGKMYLFQIYNKDFSEYSKGTPNMHTLYWKALFDDRNLKDVVYKLNGQAEMFFREKSIKVSTIHPANCPIQNKNKDNKKKESIFEYSLIKDRRYTVDKFMFHVPITMNFKSADTENINLPVREYLQTSDDTHIIGIDRGERHLIYLVVIDLQGNIVEQYTLNDIVNEYNGNTYRTNYHDLLDAREHDQLKARQNWQTIENIKELKEGYLSQVIHKITQLMIKYHAIVVLEDLNKGFMRGRQKVGKQVYQKFEKMLIDKLNFLVDKKADIESVGGLLNAYQLTNKLESFKNLGKQSGFLFYIPACNTSNIDPVTGFVNLLDTRSQNAKAFFDKFDSIRYNKEKDWFEFALDYNNFGNKAEGTRTKWTLCTQGKRIKTFRNAEKNSNWDYQIIDLTIELKQLFAHYNIDINGNLKKAISNQTEKTFFVELMQLLKLTLQMRNSITNTETDYLVSPVADENGNFYDSRKCGSSLPENADANGAFNIARKGLMIIEQIKASDDLSKLKFDISNKSWLNFAQQKPYKHE

SEQ ID NO: 1615 - protein, 1250 aa, Unknown
  Description of Unknown: uncultivated organism sequence
  Category: MG75 effectors
  Description: MG75-101 effector
MKRKFDDFIHLYSLSKTLRFEARPIGDTLRNFKKNGLLERDKHRAESYVKVKKLIDEYHKVFIDRVLNGSVLNYVNKGKYDSLTEYYDLYSVPRKDEASQKHFKAIQQHLRQQIVKKLTDDKDYKHLFGKELLESYKDKGDKKKLNEADLVQFINAANPKQLHTLSKKEAIDLVQEFSGFTTYFNEFHKNRKNMYSAEEKSTGIAYRLINENLPKFIDNMKSFKKIVDIPEMKDNLKQIHEYFVDYLNVENIHEMFQLDYYNQLLTQKQIDVYNAIIGGKTDNEHKEKIKGINEYVNLYNQTHKDAKLPKLKVLFKQILSDRNAISWLPEEFKDDQEVLNAIKDCYARLSKNVLGDNILKELLCSLAEYDTKGIFLRNDLQLTDISQKMFGNWSVIPSAIKNDKDVAFKKQDSFSIDYIDACLDKFVDNNTHTIEGYFATLGAVDTQTTQLENIFAQIKNAYTGIESLLNSAYPEDKNLSQDKDNVAKIKLFLDALMSLMHFVKPLLGKGDESNKDEKFYGDFTLLWTELETVVPLYNMVRNYMTRKPYSKSKIKLNFDNSQLLGGWDANKESDYASILLRRDGKYYLAIVDKDSKKLLGKSMPSDGECYEKMVYKLLPGANKMLPKVFFATSRIKDFKPSEQLLENYNKGTHKKGVNFSISDCHALIDYFKQSINKHEDWKNFNFNFSETSTYEDLSAFYREVEQQGYKITFTNVSVAFIDKLVKEGKMYLFQIYNKDFSEYSKGTPNMHTLYWKALFDDRNLKDVVYKLNGQAEMFFREKSIKVSTIHPANCPIQNKNKDNKKKESIFEYSLIKDRRYTVDKFMFHVPITMNFKSADTENINLPVREYLQTSDDTHIIGIDRGERHLIYLVVIDLQGNIVEQYTLNDIVNEYNGNTYRTNYHDLLDAREHDQLKARQNWQTIENIKEVKEGYLSQVIHKITQLMIKYHAIVVLEDLNKGFMRGRQKVGKQVYQKFEKMLIDKLNFLVDKKADIESVGGLLNAYQLTNKLESFKNLGKQSGFLFYIPAWKTSNIDPVTGFVNLLDTRSQNAKAFFDKFDSIRYNKEKDWFEFALDYNNFGNKAEGTRTKWTLCTQGKRIKTFRNAEKNSNWDYQIIDLTIELKQLFAHYNIDINGNLKKAISNQTEKTFFVELMQLLKLTLQMRNSITNTETDYLVSPVADENGNFYDSRKCGSSLPENADANGAFNIARKGLMIIEQIKASDDLSKLKFDISNKSWLNFAQQKPYKHE

SEQ ID NO: 1616 - protein, 1274 aa, Unknown
  Description of Unknown: uncultivated organism sequence
  Category: MG75 effectors
  Description: MG75-102 effector
MAKNFEDFKRLYPLSKTLRFEAKPIGATLDNIVKSGLLEEDEHRAASYVKVKKLIDEYHKVFIDRVLADGCLPLENEGHNNSLAEYYDSYVSKSQNEDAKKAFEENQQNLRSIIAKKLTEDKAYANLFGKNLIESYKDKTDKTKIIDSDLIQFINTAESTQLNSMSQDEAKELVKEFWGFTTYFVGFFDNRKNMYTAEEKSTSIAYRLINENLPKFIDNMEAFKKAIARPEIQANMGELYSNFSEYLNVESVPEMFQLDYYNMLLTQKQIDVYNAIIGGKTDDEHDVKIKGINEYINLYNQQHKDDKLPKLKALFKQILSDRNAISWLPEEFNSDQEVLNAIKDCYERLSENVLGDKVLKSLLDSLADYSLDGIFIRNDLQLTDISQKMFGNWGVIQNAIMQNIKHVAPARKHKESEEDYEKRIAGIFKKADSFSISYINDCLNEADSNNAYFVENYFATFGAVNTPTMQRENLFSLVQNAYTEVAALLHSDYPTAKHLAQDKANVAKIKALLDAIKSLLHFVKPLLGKGDESNKDERFYGELASLWAELDTVTPLYNMIRNYMTRKPYSQKKIKLNFENPQLLGGWDANKEKDYATIILRRDGLYYLAIMNKESKKLLGKAMPSDGECYEKMVYKLLPGANKMLPKVFFAKSRMEDFKPSKELVEKYNNGTHKKGKNFNIQDCHNLIDYFKQSISKHEDWGKFGFNFSDTSTYEDLSGFYREVEQQGYKLSFARVSVSYISQLVEEGKMYLFQIYNKDFSEYSKGTPNMHTLYWKALFDERNLADVVYKLNGQAEMFYRKKSIENTHPTHPANHPILNKNKDNKKKESLFDYDLIKDRRYTVDKFMFHVPITMNFKSSGSENINQDVKAYLRHADDMHIIGIDRGERHLLYLVVIDLQGNIKEQYSLNEIVNEYNGNTYHTNYHDLLDVREDERLKARQSWQTIENIKELKEGYLSQVIHKITQLMVKYHAIVVLEDLNKGFMRGRQKVEKQVYQKFEKMLIDKLNYLVDKKADASVSGGLLNAYQLTSKFDSFQKLGKQSGFLFYIPAWNTSKIDPITGFVNLLDTRYQNVEKAKVFFSKFDAIRYNKDKDWFEFNLDYDKFGKKAEGTRTKWTLCTRGMRIDTFRNKEKNSQWDNHEVDLTAEMKSLLEHYYIDIHGNLKDAISAQTDKAFFTGLLHILKLTLQMRNSITGTETDYLVSPVADENGIFYDSRSCGDELPENADANGAYNIARKGLMMIEQIKEAKDLDNLKFDISNKSWLNFAQQKPYKNG

SEQ ID NO: 1617 - protein, 1254 aa, Unknown
  Description of Unknown: uncultivated organism sequence
  Category: MG75 effectors
  Description: MG75-103 effector
MKFEDFTGLYPVSKTLRFEARPVGDTLKNIIKRGILEQDTHRAESYQKVKKLMDEYHKAFIDSVMSNFRFSCEDLEEYFVLYANKSDNDESKNKYTELQKKMRESVSKALKGDERFKKINKKELIKEDLYAFIREAGESQLVGLTREQAEELLLEFKDFSTYFGGFYQNRANMYVPDEKSTSIAYRLVNENLPRFVDNIDVFNKITSIPELRDNVKTIYDAFKEYLNVVELSNIFDVTFYSEVLTQKHIDLYNSIIGGRTDNESSKKIHGLNEYINLYNQTHKDEKLPKFKVLYKQILSDRVAVSWLPEAFSNDKETLCAIRDCYSGLEEHILGEKDLKILLESLDKFDLCGVFISNNKQLLSEISQKLYGNWKTIENAVRRHFEETSPQNVKKENEEKYRERISKIIKRYESFSIADLNEWVKKSDPDESRRIEDYFASLGVVNSENEQKEDLFSRVANVYIDVADLLFSDYPDGKRLAQDSKDVEKIKNLLDAIKELQWFVKPLNGSGDENNKDERFYGEFSMLWAELESFSLLYDKVRNYMTKKTYSQDKIKLNFANATLLKGWDRNKEVDNACVILRRNGLYYLGIMDKKYRRSFEGNYLCEGDVYEKMVYKLLPDPKKMLPKVFFSKSREKDFNPSDSILRIHKGETYKAGPQFKIEDCRELIDFYKKSISLHEDWKNFGFEFSDTSTYDDLNGFYREVEQQGYKITFKNVSVSYVEKLVGEGKLYLFQLYNKDFSSYSKGTPNIHTLYWKALFDEKNLLNVVYKLNGEAELFFRKKSINITNPTHPANVSVANKNKLNQKRESLFDYDLIKDRRYTIDKFLFHVPITMNFKSKGRPQIEQLVRGYLHSAENTHIIGIDRGERHLLYVSVIDSHGNIKEQFSLNEIINENAGNVYVTDYHALLDTKETERKEARQSWQTIENIKELKEGYLSQAVHKVTQLMIKYNAVIVLEDLNMGFMRGRQKVEKQVYQKFEKMLIDKLNYLVDKKVCVDAPGGVFHAYQLTSKFESFAKLGKQSGFLFYIPAWNTSKIDPITGFVNLFELKCDSIDRTKLFFSKFKSIRYNQRSDWFEFAFDYNDFTSKAAGTKTEWIITTHGTRIINFRNPQKNNQWDSNEVVLTDEFKSLFARYSIDFSGNLKEGITMQTDKSFFEGLLNYFKLTLQMRNSVTGTDVDYLISPVADGNGMFYDSRNCADSLPKNADANGAYNIARKGLMLIKQIKMSNDFKTVKLDITNKAWLEFAQKKPYLND

SEQ ID NO: 1618 - protein, 1274 aa, Unknown
  Description of Unknown: uncultivated organism sequence
  Category: MG75 effectors
  Description: MG75-104 effector
MAKNFEDFKRLYPLSKTLRFEAKPIGATLDNIVKSGLLDEDEHRAESYVKVKKLIDEYHKVFIDRVLDNGCLPLKNEGHNNSLTEYYDSYVSKSQNEDAKKAFEENQQNLRSIIAKKLAEDKAYANLFGKNLIESYKDKTDKTKIIDSDLIQFINTAESTQLNSMSQDEAKELVKEFWGFTTYFVGFFDNRKNMYTAEEKSTGIAYRLINENLPKFIDNMEAFKKAIARPEIQANMEELYSNFSEYLNVESIQEMFLLDYYNMLLTQKQIDVYNAIIGGKTDDEHDVKIKGINEYINLYNQQHKDDKLPKLKALFKQILSDRNAISWLPEEFNSDQEVLNAIKDCYERLSENVLGDKVLKSLLGSLADYSLDGIFIRNDLQLTDISQKMFGNWGVIQNAIMQNIKRVAPARKHKESEEDYEKRIAGIFKKADSFSISYINDCLNEADPNNAYFVENYFATFGAVNTPTMQRENLFALVQNAYTEVASLLHSYYPAEKKLAQDKANVAKIKALLDAIKSLQHFVKPLLGKGDESDKDERFYGELASLWAELDTVTPLYNMIRNYITRKPYSQKKIKLNFENPQLLGGWDANKEKDYATIILRRNGLYYLAIMDKDSRKLLGKAMPSDGECYEKMVYKLLPGANKMLPKVFFAKSRMDDFKPSKELIEKYNNGTHKKGKNFDIQDCHNLIDYFKQSIDKHEDWSKFGFNFSDTSTYEDLSGFYREVEQQGYKLSFARVSVSYINQLVEEGKMYLFQIYNKDFSEYSKGTPNMHTLYWKALFDERNLADVVYKLNGQAEMFYRKKSIENTHPTHPANHPILNKNKDNKKKESLFEYDLIKDRRYTVDKFMFHVPITMNFKSVGSENINQGVKEYLHHADDMHIIGIDRGERHLLYLVVIDLQGNIKEQYSLNEIVNEYNGNTYHTNYHDLLDAREDERLKARQSWQTIENIKELKEGYLSQVIHKITQLMVKYHAIVVLEDLNMGFMRGRQKVEKQVYQKFEKMLIDKLNYLVDKKADASVSGGLLNAYQLTSKFDSFQKLGKQSGFLFYIPAWNTSKIDPVTGFVNLLDARYQNVEKAKAFFSKFDAIRYNKDKDWFEFNLDYDKFGKKAEGTRTKWTLCTRGMRIDTFRNKEKNSQWDNQEVDLTAELKSLLEHYYIDIHGNLKEAISAQTDKAFFTGLLHILKLTLQMRNSITGTETDYLVSPVADENGIFYDSRSCGDELPENADANGAYNIARKGLMMIEQIKNAEDLGNLKFDISNKAWLNFAQQKPYKNG

SEQ ID NO: 1619 - protein, 1257 aa, Unknown
  Description of Unknown: uncultivated organism sequence
  Category: MG75 effectors
  Description: MG75-105 effector
MKYTDFTGIYSVSKTLRFELIPQGSTVENMKREGILNNDMHRADSYKEMKKLIDEYHKAFIERCLSDFSLKYDDTGKHDSLEEYFFYYEQKRNDKTKKIFEDIQVALRKQISKRFTGDTAFKRLFKKELIKEDLPSFVKNDPVKTELIKEFSDFTTYFQEFHKNRKNMYTSDAKSTAIAYRIINENLPKFIDNINAFDIVAKVPEMQEHFKTIADELRSHLQVGNDIDKMFNLQFFNKVLTQSQLDVYNAVIGGKSEGNKKIQGINEYINLYNQQHKKARLPMLKLLYKQILSDRVAISWLQDEFDNDQDMLDTIEAFYNKLNSNETGVLGEGKLKQILMGLDGYNLDGVFMRNDLQLSEVSQRLCGGWNIIKDAMTSDLKRSVQKKKKETDADFEERVSKLFSAQNSFSIAYINQCLGQAGIRCKIQDYFACLGAKEGENEAETTPDIFDQIAEAYHGAAPILNARPSSHNLAQDIEKVKAIKALLDALKRLQRFVKPLLGRGDEGDKDNFFYGDFMPIWEVLDQLTPLYNKVRNRMTRKPYSQEKIKLNFENSTLLNGWDLNKEHDNTSVILRREGLYYLGIMNKNYNKIFDANNVETIGDCYEKMIYKLLPGPNKMLPKVFFSKSRVQEFSPSKKILEIWESKSFKKGDNFNLDDCHALIDFYKDSIAKHPDWNKFNFKFSDTQSYTNISDFYRDVNQQGYSLSFTKVSVDYVNRMVDEGKLYLFQIYNKDFSPQSKGTPNMHTLYWRMLFDERNLHNVIYKLNGEAEVFYRKASLRCDRPTHPAHQPITCKNENDSKRVCVFDYDIIKNRRYTVDKFMFHVPITINYKCTGSDNINQQVCDYLRSAGDDTHIIGIDRGERNLLYLVIIDQHGTIKEQFSLNEIVNEYKGNTYCTNYHSLLEEKEAGNKKARQDWQTIESIKELKEGYLSQVIHKISMLMQRYHAIVVLEDLNGSFMRSRQKVEKQVYQKFEHMLINKLNYLVNKQYDATEPGGLLHALQLTSRMDSFKKLGKQSGFLFYIPAWNTSKIDPVTGFVNLFDTRYCNEAKAKEFFEKFDDISYNDERDWFEFSFDYRHFTNKPTGTRTQWTLCTQGTRVRTFRNPEKSNHWDNEEFDLTQAFKDLFNKYGIDIASGLKARIVNGQLTKETSAVKDFYESLLKLLKLTLQMRNSVTGTDIDYLVSPVADKDGIFFDSRTCGSLLPANADANGAFNIARKGLMLLRQIQQSSIDAEKIQLAPIKNEDWLEFAQEKPYL

SEQ ID NO: 1620 - protein, 1142 aa, Unknown
  Description of Unknown: uncultivated organism sequence
  Category: MG75 effectors
  Description: MG75-106 effector
MARIFEDFKRLYPLSKTLRFEAKPIGATLDNIVKSGLLDEDEHRAESYVKVKKLIDEYHKVFIDRVLDNGCLPLKNEGHNNSLTEYYDSYVSKSQNEDAKKAFEENQQNLRSIIAKKLTEDKAYANLFGKNLIESYKDKTDKTKIIDSDLIQFINTAESTQLNSMSQDEAKELVKEFWGFTTYFVGFFDNCKNMYTAEEKSTGIAYRLINENLPKFIDNMEAFKKAIARPEIQANMEELYSNFSEYLNVESIQEMFLLDYYNMLLTQKQIDVYNAIIGGKTDDEHDVKIKGINEYINLYNQQHKDDKLPKLKALFKQILSDRNAISWLPEEFNSDQEVLNAIKDCYERLSENVLGDKVLKSLLGSLADYSLDGIFIRNDLQLTDISQKMFGNWGVIQNAIMQNIKRVAPARKHKESEEDYEKRIAGIFKKADSFSISYINDCLNEADPNNAYFVENYFATFGAVNTPTMQRENLFALVQNAYTEVASLLHSYYPAEKKLAQDKANVAKIKALLDAIKSLQHFVKPLLGKGDESDKDERFYGELASLWAELDTVTPLYNMIRNYITRKPYSQKKIKLNFENPQLLGGWDANKEKDYATIILRRNGLYYLAIMDKDSRKLLGKAMPSDGECYEKMVYKLLPGANKMLPKVFFAKSRMDDFKPSKELIEKYNNGTHKKGKNFDIQDCHNLIDYFKQSIDKHEDWSKFGFNFSDTSTYEDLSGFYREVEQQGYKLSFARVSVSYINQLVEEGKMYLFQIYNKDFSEYSKGTPNMHTLYWKALFDERNLADVVYKLNGQAEMFYRKKSIENTHPTHPANHPILNKNKDNKKKESLFEYDLIKDRRYTVDKFMFHVPITMNFKSVGSENINQGVKEYLHHADDMHIIGIDRGERHLLYLVVIDLQGNIKEQYSLNEIVNEYNGNTYHTNYHDLLDAREDERLKARQSWQTIENIKELKEGYLSQVIHKITQLMVKYHAIVVLEDLNMGFMRGRQKVEKQVYQKFEKMLIDKLNYLVDKKADASVSGGLLNAYQLTSKFDSFQKLGKQSGFLFYIPAWNTSKIDPVTGFVNLLDARYQNVEKAKAFFSKFDAIRYKRIRTGLSLISTMTSLVKKQKVQGLSGFYAPEECVLILSEIKKKTHNGIIRKLT

SEQ ID NO: 1621 - protein, 506 aa, Unknown
  Description of Unknown: uncultivated organism sequence
  Category: MG75 effectors
  Description: MG75-107 effector
MHTLYWRMLFDERNLEDVVYSLNGGAEVFFRKASINVSHPTHPANIPIKKKNLKHKDEERILKYDLIKDKRYTIDQFQFHVPITMNFKVAGNGNININQKAIDYLRSASDTHIIGIDRGERNLLYLVVIDGNGKICEQFSLNEIEVEYNGEKYSTNYHDLLNVKENERKQARQSWQSIANIKDLKEGYLSQVIYKISELIVKYNAIVVLEDLNAGFMRGRQKVEKQVYQKFEKKLIEKLNYLVFKKQSSDLPGGLMHAYQLANKFESFNTLGKQSGFLFYIPAWNTSKMDPVTGFVNLFDVKYESVDKAKSFFSKFDSIRYNVERDMFEWKFNYGEFTKKAEGAKTDWTVCSYGNRIITFRNPDKNSQWDNKEINLTENVKLLFERFGIDLSSNLKDEIMERTEKEFFIELISLFKLVLQMRNSWTGTDIDYLVSPVCNENGEFFDSRNVDETLPQNADANGAYNIARKGMILLDKIKKNNGEKKLALSITNREWLSFAQGCCKNG

SEQ ID NO: 1622 - protein, 1274 aa, Unknown
  Description of Unknown: uncultivated organism sequence
  Category: MG75 effectors
  Description: MG75-108 effector
MAKIFEDFKRLYPLSKTLRFDAKPVGATLDNIVKSGLLEEDEHRAASYVRVKKLIDEYHKVFIDRVLDNGCLPLENKGENNSLAEYYDSYVSKSQNEDAKKAFEENQQNLRSIIAKKLTGDKAYANLFGKNLIESYKDKKDKKKIIDSDLIQFICTAEATQLDSMSQDEAKEIVKEFWGFTTYFVGFFDNRKNMYTAEEKSTGIAYRLINENLPKFIDNMEAFKKAIARPEIQANMGELYSNFSEYLNVESVPEMFQLDYYNMLLTQKQIDVYNAIIGGKTDDEHDVKIKGINEYINLYNQQHKDDKLPKLKALFKQILSDRNVISWLPEEFNSDQEVLNAIKDCYERLSENVLGDKVLKSLLGSLADYSLDGIFIRNDLQLTDISQKMFGNWGVIQNAIMQNIKHVAPARKHKESEEDYEKRIADIFKKADSFSISYINDCLNEADPNNAYFVENYFATLGAVDTPTMQRENLFALVQNAYTEVAALLHSDYPTAKNLAQDKANVSKIKALLDAIKSLQHFVKPLLGKGDESDKDERFYGELASLWAELDTVTPLYNMIRNYMTRKPYSQKKIKLNFENPQLLGGWDANKEKDYATIILRRDGLYYLAIMNKESKKLLGKAMPSDGECYEKMVYKLLPGANKMLPKVFFAKSRMEDFKPSKELVEKYNNGTHKKGKNFNIQDCHNLIDYFKQSISKHEDWGKFGFNFSDTSTYEDLSGFYREVEQQGYKLSFARVSVSYISQLVEEGKMYLFQIYNKDFSEYSKGTPNMHTLYWKALFDERNLADVVYKLNGQAEMFYRKKSIENTHPTHPANHPILNKNKDNKKKESLFDYDLIKDRRYTVDKFMFHVPITMNFKSSGSENINQDVKAYLRHADDMHIIGIDRGERHLLYLVVIDLQGNIKEQYSLNEIVNEYNGNTYHTNYHDLLDVREEERLKARQSWQTIENIKELKEGYLSQVIHKITQLMVKYHAIVVLENLNMGFMRGRQKVEKQVYQKFEKMLIDKLNYLVDKKADASVSGGLLNAYQLTSKFDSFQKLGKQSGFLFYIPAWNTSKIDPVTGFVNLLDTRYQNVEKAKVFFSKFDAIRYNKDKDWFEFNLDYDKFGKKAEGTKTKWTLCTRGMRIDTFRNKEKNSQWDNHEVDLTAEMKSLLEHYYIDIHGNLKDAISAQTDKVFFTGLLHILKLTLQMRNSITGTETDYLISPVADENGIFYDSRSCGDELPENADANGAYNIARKGLMLVEQIKGAENLDNVKFDISNKAWLNFAQQKPYKNG

SEQ ID NO: 1623 - protein, 1319 aa, Unknown
  Description of Unknown: uncultivated organism sequence
  Category: MG75 effectors
  Description: MG75-109 effector
MAKIFEDFKRLYPLSKTLRFDAKPVGATLDNIVKSGLLEEDEHRAASYVRVKKLIDEYHKVFIDRVLDNGCLPLENKGENNSLAEYYDSYVSKSQNEDAKKAFEENQQNLRSIIAKKLTGDKAYANLFGKNLIESYKDKKDKKKIIDSDLIQFINTADSTQLDSMTQVEAKELVKEFWGFVTYFYGFFDNRKNMYTAEKKSTGIAYRLINENLPKFIDNMEAFKKVIARPEIQANMEELYSDFSEYLNVESIQEMFQLDYYDMLLTQKQIDVYNAIIGGKTDDEHDVKIKGINEYINLYNQQHKDTRLPKLKALFKQILSDRNAISWLPEEFNSDQEVLNAIKDCYERLSENVLGDKVLKSLLGSLADYSLEGIFIRNDLQLTDVSQKMFGNWGVIQNAIMQNIKHVAPARKHKESEEEYEKRIAGIFKKADSFSISYLNDCLNEADPNNAYFVENYFATFGAVNTPTMQRENLFALVQNKYTEVAALLHSDYPTAKHLAQDKANVAKIKALLDAIKSLQHFVKPLLGKGDESDKDERFYGELASLWAELETVTPLYNMIRNYMTRKPYSQKKIKLNFENPQLLDGWDANKEKDYATIILRRNGLYYLAIMGKDSKNLLGKAMPSDGECYEKMVYKQFDISKQLPKCTTELKHVRKALVEDAKRSCLLSDFNNWNKPLNVTRKLWELNNFVWDKKKEDWVLRKKDNETRPKKFHKKYLELTSDKKGYNQAKNDWIKFIKEFLSSYKKVEAYDIHYKKRYNSVDELYKQLNGDLYAISFTYVSASFIEQLVSEGKMYLFQIYNKDFSEYSKGTPNMHTLYWKALFDERNLADVVYKLNGQAEMFYRKKSLENTHPTHPANHPILNKNKDNKKKESLFDYDLIKDRRYTVDKFMFHVPITMNFKSSGSENINQDVKAYLRHADDMHIIGIDRGERHLLYLVVIDLQGNIKEQYSLNEIVNEYNGNTYHTNYHDLLDVREEERLKARQSWQTIENIKELKEGYLSQVIHKITQLMVKYHAIVVLEDLNMGFMRGRQKVEKQVYQKFEKMLIDKLNYLVDKKADASVSGGLLNAYQLTSKFDSFQKMGKQSGFLFYIPAWNTSKIDPVTGFVNLLDTRYQNVEKAKVFFSKFDAIRYNKDKDWFEFNLDYDKFGKKAEGTRTKWALCTRGMRIDTFRNKEKNSQWDNQEVDLTAEMKSLLEHYYIDIHGNLKDAISAQTDKTFFTGLLHILKLTLQMRNSITGTETDYLVSPVADENGIFYDSRSCGDELPENADANGAYNIARKGLMMIEQIKDAKDLNNLKFDISNKAWLNFAQQKPYKNG

SEQ ID NO: 1624 - protein, 807 aa, Unknown
  Description of Unknown: uncultivated organism sequence
  Category: MG75 effectors
  Description: MG75-110 effector
METFSGFTNLYPLSKTLRFRLIPVGETLKHFIDSGILEEDQHRAESYVKVKAIIDDYHRAYIENSLSGFELPLESTGKFNSLEEYYLYHNIRNKTEEIQNLSSKVRTNLRKQVVVQLTKNEIFKRIDKKELIQSDLIDFVKNEPDANEKIALISEFRNFTVYFKGFHENRRNMYSDEEKSTSIAFRLIHENLPKFIDNMEVFAKIQNTSISENFDAIQKELCPELVTLCEMFKLGYFNKTLSQKQIDAYNTVIGGKTTSEGKKIKGLNEYINLYNQQHKQEKLPKMKLLFKQILSDRESASWLPEKFENDSQVVGAMVNFWNTIHDTVLAEGGLKTIIASLGSYGLEGIFLKNDLQLTDISQKATGSWSKISSEIKQKIEVMNPQKKKESYESYQERIDKLFKSYKSFSLAFINECLRGEYKIEDYFLKLGAVNSSSLQKENHFSHILNAYTDVKEAIGFYSESTDTKLIQDNDSIQKIKQFLDAVKDLQAYVKPLLGNGDETGKDERFYGDLIEYWSLLDLITPLYNMVRNYVTQKPYSVDKIKINFQNPTLLNGWDLNKETDNTSVILRRDGKYYLAIMNNKSRKVFLKYPSGTDGNCYEKMEYKLLPGANKMLPKVFFSKSRINEFMPNERLLSNYEKGTHKKSGICFSLDDCHTLIDFFKKSLDKHEDWKNFGFKFSDTSTYEDMSGFYKEVENQGYKLSFKPIDATYVDQLVDEGKIFLFQIYNKDFSEHSKGTPNMHTLYWKMLFDETNLGDVVYKLNGEAEVFFRKASINVSHPTHPANIPIKKKNLKHKEMKKEFLNMT

SEQ ID NO: 1625 - protein, 347 aa, Unknown
  Description of Unknown: uncultivated organism sequence
  Category: MG75 effectors
  Description: MG75-111 effector
MLNVKENERKQARQSWQSIANIKDLKEGYLSQVIHKISELMVKYNAIVVLEDLNAGFMRGRQKVEKQVYQKFEKKLIEKLNYLVFKKQSSDLPGGLMHAYQLANKFESFNTLGKQSGFLFYIPAWNTSKMDPVTGFVNLFDVKYESVDKAKSFFSKFDSIRYNVERDMFEWKFNYGEFTKKAEGTKTDWTVCSYGNRIITFRNPDKNSQWDNKEINLTENIKLLFERFGIDLSSNLKDEIMQRTEKEFFIELISLFKLVLQMRNSWTGTDIDYLVSPVCNENGEFFDSRNVDETLPQNADANGAYNIARKGMILLDKIKKSNGEKKLALSITNREWLSFAQGCCKNG

SEQ ID NO: 1626 - protein, 1125 aa, Unknown
  Description of Unknown: uncultivated organism sequence
  Category: MG75 effectors
  Description: MG75-112 effector
MIQFINTAEPSQLDSMSQDEAKELVKEFWGFTTYFVGFFDNRKNMYTSEEKSTGIAYRLVNENLPKFIDNMEAFKKAIAKPEIQANMEELYSNFAEYLNVESIQEMFQLDYYNMLLTQKQIDVYNAIIGGKTDEEHDVKIKGINEYINLYNQQHKDEKLPKLKALFKQILSDRNAISWLPEEFNSDQEVLNAIDDCYKRLSENVLGDKVLKSLLCSLDDYNLDGIFVRNDLQLTDISQKMFGNWSVIQNAIMQNIKNVAPARKRKESEEDYEKRISDIFKKADSFSIQYINDCLNEMDNNNLHAVDGYFATLGAVNTPTMQRENLFALIQNAYTDISNLLETPYPENKNLAQDKTNVAKVKALLDAIKSLQHFVKPLLGKGDESDKDERFYGELASLWTELDTVTPLYNMIRNYMTRKPYSEKKIKLNFENPQLLGGWDANKEKDYATIILRRNGMYYLAIMDKDSKKLLGKTMPSDGECYEKMVYKLLPGANKMLPKVFFAKSRINDFKPSKLIVENYNNGTHKKGKNFNINDCHNLIDYFKQSIDKHEDWSKFGFNFSDTSTYEDLSGFYREVEQQGYKLSFTNVSVSFIDKLVDEGKMYLFQIYNKDFSDFSKGTPNMHTLYWKALFDERNLADVVYKLNGQAEMFYRKKSINNTHPTHPANNPIQNKNKDNKKKESVFEYDLIKDRRYTVDKFLFHVPITMNFKSVGSENINQQVREYLQQADDTHIIGIDRGERHLLYLVVIDMQGNIKEQFTLNEIVNEYNGNTYRTNYHDLLDTREEERLTARQSWQTIENIKELKEGYLSQVVHKITQLMVKYHAVVVLEDLNKGFMRGRQKVEKQVYQKFEKMLIDKLNYLVDKKADAAQSGGLLNAYQLTSKFDSFQKLGKQSGFLFYIPAWNTSKIDPVTGFVNLLDTRYQNTEKAKAFFSRFDAIRYNANKDWFEFYLDYDKFCTKAEGTRTRWTLCTQGSRISTFRNAEKNSQWDNLEVDLTREMKSLFEHYHINICGNLKEEICLQTDKAFFTGLLHMLKLTLQMRNSITGTETDYLISPVADENGTFYDSRSCGDTLPKNADANGAYNIARKGLMFIGQIKETKDLANFKYDISNKAWLNFAQQKPYKNE

SEQ ID NO: 1627 - protein, 1254 aa, Unknown
  Description of Unknown: uncultivated organism sequence
  Category: MG75 effectors
  Description: MG75-113 effector
MKFEDFTGLYPVSKTLRFEAKPVGATLENIIKSGVLEDDAHRARSYKKVKKLIDEYHKVFIDSVMSKFKFKEEILEDICSLYAAKSMDDKSKDRFVKLQGEMRKDVSVAFASDDRYKTINKKELVKEDLFEFVSHADNGQLAGLTKEEAEELILEFKDFTTYFSGFHKNRSNMYVADEKTTSVAYRLVNENLPRFLYNVSVFQKVVSVPEFENKIRAIYDSFREYLCVDNLASMFETPYYNDVLSQMQIDIYNSVIGGKTDKDSSTKIQGLNECINLYNQTHRNDKLPKFKILYKQILSDRVAMSWLPDEFSDDKETLEAIRNCYDSLTDHILGERDLKTLLESLGQYDMSGVFIANGPYLADISQKLYGDWRAIEKAIRKQEAVNSPKKAKETEEEYFNRITKHIHNYDSFSIEYLNFCITESYPNDGRRVEDYFATLGAVNTDTSQRENLFSRIDNAYTNVSGLLSSEYPETKKLSQDTENVEKIKDLLDSIKELQRFVKPLMGNGNESDNDNDKRFYGELSPLWDELETFSLLYDKVRNYVTRKPYSQNKIKLNFNNATLFAGWDQNKEKDNACIILRRGGMYYLGIMNKSYRIVFENNFPCDGDCYEKMVYKLLPGANKMLPKVFFSKSRIREFNPSDRILKNYEEGTHKKGPKFKLEDCHELIDFFKASINLHEDWKKFKFKFSDTSSYEDISDFYKEVEQQGYKITFVNVSVSYIDSLVNDGKLYLFQLYNKDFSQYSKGVPNMHTLYWKALFDKANLADVVYKLNGEAELFFRKKSIDMERPTHRANISVANKNIHNIKKESIFKYDLTKDRRYTVDKFLFHVPITMNFRSEGNIAIEQQVRSYLQSAEDTHVIGIDRGERHLLYVSVIDRRGLIKEQFSLNEIINEHNGSTYATNYHDLLDAKESERRKARQSWQTIENIKDLKEGYLSQAVHKIAQLMVKYHAVVVLEDLNVGFMRGRQKVEKQVYQKFEKMLTDKLNYLVDKKLNANDPGGVFHAYQLSSVFKSAEKRGKQSGFIFYIPAWNTSKIDPVTGFVNLFDLKYENIDKAKSFFSKFQIIRYNSERDWFEFIFDYDSFNSKASGTKVGWTLTTHGDRILSFRNSEKNNQWDSRAVILTDEYKALFDKYGIDYNDNLKEAITNQTEKAFFEDLLKCLRLTLQMRNSVIGTDTDFLISPVADNNGVFYDSRICADSLPKNADANGAYNIARKGLMLIDQIKKASDVRNIKFDIANKSWLDFAQKKPYLDE

SEQ ID NO: 1628 - protein, 1269 aa, Unknown
  Description of Unknown: uncultivated organism sequence
  Category: MG75 effectors
  Description: MG75-114 effector
MYFDDFKKLYPLSKTLRFEAKPVGPTFKHIKERGLLEEDEHRAISYVKVKKLIDEYHKAFVGKALNNGCLLYESCGNKNSLIEYYETYKSKEGEARKTMKEIQKNLREMIVGAFEKEEDYANLFKGGLIEPYKSGGKHKEPDILRLINTAGFSQLAGMSQEEAKSLIKEFWRFTTYFVGFFDNRGNMYTSEEKSTGIAYRLINENLPRFIDNMEIFNKIIGKSEIQARVTELYSDFEGYLNVGSIQEMFKLDYYNALLTQKQIDVYNAIISGRTTTGPESKKIKGLNEYINLYNQQHKDGKLPKFKPLFKQILSDREALSWLPDEFVNDQEMLNAIKNCYEKLTGNILGESALKVLLGSLADYDLGGIFVRNDSQLTNISQRMFGRWDAIQNAILQDIRKTAPMRKRRESEEDYENRIDKMFKKADSFSIKYINDCIREIAVDDTLFVEDYFATLGAVNTPTIQRENLFLLVQNAFTDVADLLNSEYSAEKSLAQDSVNVSKIKALLDAIKSLQQFVRPLLGNGDENEKDERFYGEFTSLWAELDEVTLLYDMVRNRMTRKPYSQKKIKLNFANPKLLNGWDENKEKDNSCIILRRDGKYYLAVMDKKSKNLLGKPMPSDGECYEKMVYKLLPGAQKMFPKVFFAKSRIDEFKPSEHILNIYSNGTHKKGNKNFNIEDCHDLIDFFKESIRRHKDWNKFGFEFSDTSTYENVNEFYREADEQGYKLSFVNVSVAYIDKLVNEGEMYLFQIYNKDFSEYSKGTPNMHTLYWKALFDDRNLVDMVYKLNGQAELFYRKKSLDSIRPTHPANQPIKNKNKNNKKKESLFEYDLVKDRRYTVDKFMFHVPITMNFKNAGLEKINQQVREYLQQADDTHIIGIDRGERHLLYLVVIDMHGNIKEQFSLNEIVNECSGNTYHTNYHALLDAREEERLNARRSWQTIESIKELKEGYLSQVIHRITQLMVKYHAIVVLEDLSMGFMRGRQKVEKQVYQKFEKMLIDKLNYLVDKKVDVSQPGGLLNAYQLTNKFESFQSSEKQSGFVFYIPAWNTSKIDPVTGFVNLLDTRYQNVEKARAFFSKFDAIRYNKDKDWFEFGVDYDNFNKKAEGTMTKWTLCTQGVRICTFRNVEKNSQWDTQEVDLTTEMKSLFGQSQIDVNGNLKEAICSQSDKTFFMRLLHLLKLMLQMRNSITGTEIDYLVSPVADGNGNFYDSRKCDSTLPKNADANGAYNIARKGLMLLRQMKTADNLTDVKFDMTNRTWLKFAQQKPYKDE

SEQ ID NO: 1629 - protein, 1252 aa, Unknown
  Description of Unknown: uncultivated organism sequence
  Category: MG75 effectors
  Description: MG75-115 effector
MKFEDFTGLYPVSKTLRFEAKPVGATLENVIKSGVLEDDAHRARSYKKVKKLIDEYHKVFIDSVMSKFKFKEEILEDICSLYAAKSMDDKSKDRFVKLQGEMRKDVSVAFASDDRYKTINKKELVKEDLFEFVSHADNGQLAGLTKEEAEELILEFKDFTTYFSGFHKNRSNMYVADEKTTSVAYRLVNENLPRFLYNVSVFQKVVSVPEFENKIRAIYDSFREYLCVDNLASMFETSYYNDVLSQMQIDIYNSVIGGKTDKDSSTKIQGLNECINLYNQTHRNDKLPKFKILYKQILSDRVAMSWLPDEFSDDKETLEAIRNCYDSLTDHILGERDLKTLLESLGQYDMSGVFIANGPYLADISQKLYGDWRAIEKAIRKQEAVNSPKKAKETEEEYFNRITKHIHNYDSFSIEYLNFCITESYPNDGRRVEDYFATLGAVNTDTSQRENLFSRIDNAYTNVSGLLSSEYPETKKLSQDTENVEKIKDLLDSIKELQRFVKPLMGNGDESDNDKRFYGELSPLWDELETFSLLYDKVRNYVTRKPYSQNKIKLNFNNATLFAGWDQNKEKDNACIILRRGGMYYLGIMNKSYRIVFENNFPCDGDCYEKMVYKLLPGANKMLPKVFFSKSRIREFNPSDRILKNYEEGTHKKGPKFKLEDCHELIDFFKASINLHEDWKKFKFKFSDTSSYEDISDFYKEVEQQGYKITFVNVSVSYIDSLVNDGKLYLFQLYNKDFSQYSKGVPNMHTLYWKALFDKANLADVVYKLNGEAELFFRKKSIDMERPTHRANISVANKNIHNIKKESIFKYDLTKDRRYTVDKFLFHVPITMNFKSEGNIAIEQQVRSYLQSAEDTHVIGIDRGERHLLYVSVIDRRGLIKEQFSLNEIINEHNGSTYATNYHDLLDAKESERRKARQSWQTIENIKDLKEGYLSQAVHKIAQLMVKYHAVVVLEDLNVGFMRGRQKVEKQVYQKFEKMLTDKLNYLVDKKLNANDPGGVFHAYQLSSVFKSAEKRGKQSGFIFYIPAWNTSKIDPVTGFVNLFDLKYENIDKAKSFFSKFQIIRYNSERDWFEFIFDYDSFNSKASGTKVGWTLTTHGDRILSFRNSEKNNQWDSRAVILTDEYKALFDKYGIDYNDNLKEAITNQTEKAFFEDLLKCLRLTLQMRNSVIGTDTDFLISPVADNNGVFYDSRICADSLPKNADANGAYNIARKGLMLIDQIKKASDVRNIKFDIANKSWLDFAQKKPYLDE

SEQ ID NO: 1630 - protein, 762 aa, Unknown
  Description of Unknown: uncultivated organism sequence
  Category: MG75 effectors
  Description: MG75-116 effector
METFSGFTNLYPLSKTLRFRLIPVGETLKHFIGSGILEEDQHRAESYVKVKAIIDDYHRAYIENSLSGFELPLESTGKFNSLEEYYLYHNIRNKTEEIQNLSSKVRTNLRKQVVTQLTKNEIFKRIDKKELIQSDLIDFVKNEPDANEKIALISEFRNFTVYFKGFHENRRNMYSDEEKSTSIAFRLIHENLPKFIDNMEVFAKIQNTSISENFDAIQKELCPELVTLCEMFKLGYFNKTLSQKQIDAYNTVIGGKTTSEGKKIKGLNEYINLYNQQHKQEKLPKMKLLFKQILSDRESASWLPEKFENDSQVVGAMVNFWNTIHDTVLAEGGLKTIIASLGSYGLEGIFLKNDLQLTDISQKATGSWSKISSEIKQKIEVMNPQKKKESYESYQERIDKLFKFYKSFSLAFINECLRGEYKIEDYFLKLGAVNSSSLQKENHFSHILNTYTDVKEVIGFYSESTDTKLIRDNGSIQKIKLFLDAVKDLQAYVKPLLGNGDETGKDERFYGDLIEYWSLLDLITPLYNMVRNYVTQKPYSIDKIKINFQNPTLLNGWDLNKETDNTSVILRRDGKYYLAIMNNKSRKVFLKYPSGTDRNCYEKMEYKLLPGANKMLPKVFFSKSRINEFMPNERLLSNYEKGTHKKSGTCFSLDDCHTLIDFFKKSLDKHEDWKNFGFKFSDTSTYEDMSGFYKEVENQGYKLSFKPIDATYVDQLVDEGNIFYFRFITRIFLSIAKVRLICIPCIGKCYLMKQILGMWYIN

SEQ ID NO: 1631 - protein, 1274 aa, Unknown
  Description of Unknown: uncultivated organism sequence
  Category: MG75 effectors
  Description: MG75-117 effector
MAKNFEDFKRLYPLSKTLRFEAKPIGATLDNIIKSGLLDEDEHRAASYVKMKKLIDEYHKVFIDRVLDNGCLPLEDKGDNNSLAEYYESYVSKAQDEDAIKKFKEIQQNLCSIIAKKLTDDKAYANLFGNKLIESYKDKADKTKIIDSDLIQFINTAESTQLVSMSQDEAKELVKEFWGFTTYFEGFFKNRKNMYTPEEKSTGIAYRLINENLPKFIDNMEAFKKAITRPEIQANMEELYSDFSEYLNVESIQEMFQLDYYNMLLTQKQIDVYNAIIGGKTDDEHDVKIKGINEYINLYNQQHKDDKLPKLKALFKQILSDRNAISWLPEEFNSDQEVLNAIKDCYERLAENVLGDKVLKSLLCSLSDYTLDGIFIRNDLQLTDISQKMFGNWGVIQNAIMQNIKRVAPARKHKESEEDYEKRIAGIFKKADSFSISYINDCLNEADSNNAYFVENYFATFGAVNTPTMQRENLFALVQNAYTEVASLLHSDYPTAKHLAQDKANVAKIKALLDAIKSLQHFVKPLLGKGDESDKDERFYGELASLWAELDTVTPLYNMIRNYITRKPYSQKKIKLNFENPQLLGGWDANKEKDYATIILRRNGLYYLAIMNKESKKLLGKAMPSDGECYEKMVYKLLPGANKMLPKVFFAKSRMEDFKPSKELVEKYNNGTHKKGKNFNIQDCHNLIDYFKQSISKHEDWGKFGFNFSDTSTYEDLSGFYREVEQQGYKLSFARVSVSYINQLVEEGKMYLFQIYNKDFSEYSKGTPNMHTLYWKALFDERNLADVVYKLNGQAEMFYRKKSIENTHPTHPANHPILNKNKDNKKKESLFEYDLIKDRRYTVDKFMFHVPITMNFKSVGSENINQGVKEYLHHADDMHIIGIDRGERHLLYLVVIDLQGNIKEQYSLNEIVNEYNGNTYHTNYHDLLDAREDERLKARQSWQTIENIKELKEGYLSQVIHKITQLMVKYHAIVVLEDLNMGFMRGRQKVEKQVYQKFEKMLIDKLNYLVDKKADASVSGGWLNAYQLTSKFDSFQKLGKQSGFLFYIPAWNTSKIDPVTGFVNLLDARYQNVEKAKAFFSKFDAIRYNKDKDWFEFNLDYDKFGKKAEGTRTKWTLCTRGMRFDTFRNKEKNSQWDNQEVDLTAEMKSLLEHYYIDIHGNLKDAISAQTDKAFFTGLLHILKLTLQMRNSITGTETDYLVSPVADENGIFYDSRSCGEELPENADANGAYNIARKGLMLIEQIKGAEDLGNLKFDISNKAWLNFAQKKPYKNG

SEQ ID NO: 1632 - protein, 1271 aa, Unknown
  Description of Unknown: uncultivated organism sequence
  Category: MG75 effectors
  Description: MG75-118 effector
MEFDDFKRLYPLSKTLRFEAKPIGATLKNIIKSGVLEEDEHRAQSYVKVKKLIDEYHKVFIDRVLNEGCLTIENKGNKDSLEEYYESYMSKSNDENVSKTFKEIQENLRSVIAKKLTDDKAYANLFGKNLIESYKDKEDKNKIIDSDLIQFINTAEPSQIDSMSQDEAKELVKEFWGFTTYFVGFFDNRKNMYTSEEKSTGIAYRLVNENLPKFIDNMEAFKKAIAKPEIQANMEELYSNFAEYLNIESIQEMFQLDYYDMLLTQKQIDVYNAIIGGKTDEDHDVKIKGINEYINLYNQQHKDEKLPKLKALFKQILSDRNAISWLPEEFNSDQEVLDAIKDCYERLSENVLGDKVLKSLLCSLSDYNLNGIFVRNDLQLTDISQKTFGNWSVIQNAIMQNIKNVAPARKRKESEEDYEKRISDIFKKADSFSIQYINDCLNEMDDNNLHAVDGYFATLGAVNTPTMQRENLFALIQNAYTDISDLLDTPYPQNKNLAQDKTNVAKVKVLLDAIKSLQHFVKPLLGMGDESDKDERFYGELASLWTELDTVTPLYNMIRNYMTRKPYSEKKIKLNFENPQLLGGWDANKEKDYATIILRRNGMYYLAIMDKDSKKLLGKTMPSDGECYEKMVYKLLPGANKMLPKVFFAKSRINDFKPSKKIVENYNNGTHKKGKNFNINDCHDLIDYFKQSIDKHEDWSKFGFNFSDTSTYEDLSGFYREVEQQGYKLSFTNISVSFIDKLVDEGKMYLFQIYNKDFSDYSKGTPNMHTLYWKALFDERNLADVVYKLNGQAEMFYRKKSIDYTYPTHPANHPIQNKNKDNKKKESVFEYDLVKDRRYTVDKFLFHVPITINFKSVGSENINQQVREYLQQADDTHIIGIDRGERHLLYLVVIDMQGNIKEQFTLNEIVNEYNGNTYRTNYHDLLDTREEERLTARQSWQTIENIKELKEGYLSQVVHKITQLMVKYHAVVVLEDLNKGFMRGRQKVEKQVYQKFEKMLIDKLNYLVDKKADATQSGGLLNAYQLTSKFDSFQKLGKQSGFLFYIPAWNTSKIDPVTGFVNLLDTRYQNTEKAKAFFSKFDAIRYNADKDWFEFNLDYDKFGTKAEGTRTTWTLCTQGNRICTFRNAEKNSQWDNQEVDLTGELKSLFEHYNINISGNLKEEICSQTDKAFFTGLLHILKLTLQMRNSITGTETDYLVSPVADENGVFYDSRSCGDRLPENADANGAYNIARKGLMLIGQIKGTKDLANFKYDISNKSWLNFAQQKPYKK

SEQ ID NO: 1633 - protein, 1272 aa, Unknown
  Description of Unknown: uncultivated organism sequence
  Category: MG75 effectors
  Description: MG75-119 effector
MKFDDFKKLYSLSKTLRFEAKPVGSTLKNIIESGLLEEDEHRAQSYVKVKKLIDEYHKVFIDRVLNEGCLTIENKGKKDSLEEYYESYMSKSNDENVSKTFKEIQENLRSVIAKKLTDNNAYANLFGNKLIESYKDKDEKNKIIDSDLIQFINTAEPSQLDSMSQDEAKELVKEFWGFTTYFVGFFDNRKNMYTSEEKSTGIAYRLVNENLPKFIDNMEAFKKAIAKPEIQANMEELYSNFAEYLNVESIQEMFQLDYYNMLLTQKQIDVYNAIIGGKTDEEHDVKIKGINEYINLYNQQHKDEKLPKLKALFKQILSDRNAISWLPEEFNSDQEVLNAINDCYKRLSENVLGDKVLKSLLCSLDDYNLDGIFVRNDLQLTDISQKMFGNWSVIQNAIMQNIKNVAPARKRKESEEDYEKRISDIFKKADSFSIQYINDCLNEMDDNNLYAVDGYFATLGAVNTPTMQRENLFALIQNAYTDISNLLETPYPENKNLAQDKTNVAKVKALLDAIKSLQHFVKPLLGKGDESNKDERFYGELASLWTELDTVTPLYNMIRNYMTRKPYSEKKIKLNFENPQLLGGWDANKEKDYATIILRRNGMYYLAIMDKDSKKLLGKTMPSDGECYEKMVYKLLPGANKMLPKVFFAKSRINDFKPSKQIVENYNNGTHKKGKNFNINDCHNLIDYFKQSIDKHEDWSKFGFNFSDTSTYEDLSGFYREVEQQGYKLSFTNVSVSFIDKLVDEGKMYLFQIYNKDFSDFSKGTPNMHTLYWKALFDERNLADVVYKLNGQAEMFYRKKSINNTHPTHPANHPIQNKNKDNKKKESVFEYDLIKDRRYTVDKFLFHVPITMNFKSVGSENINQQVREYLQKADDTHIIGIDRGERHLLYLVVIDMQGNIKEQFTLNEIVNEYNGNTYHTNYHDLLDTREEERLTARQSWQTIENIKELKEGYLSQVIHKITQLMVKYHAVVVLEDLNKGFMRGRQKVEKQVYQKFEKMLIDKLNYLVDKKADAAQSGGLLNAYQLTSKFDSFQKLGKQSGFLFYIPAWNTSKIDPVTGFVNLLDTRYQNTEKAKAFFSRFDAIRYNANKDWFEFYLDYDKFCTKAEGTRTRWTLCTQGSRISTFRNAEKNSQWDNLEVDLTREMKSLFEHYHINICGNLKEEICLQTDKAFFTGLLHMLKLTLQMRNSITGTETDYLISPVADENGTFYDSRSCGDTLPKNADANGAYNIARKGLMFIGQIKETKDLANFKYDISNKAWLNFAQQKPYKNE

SEQ ID NO: 1634 - protein, 880 aa, Unknown
  Description of Unknown: uncultivated organism sequence
  Category: MG75 effectors
  Description: MG75-120 effector
MIQNAIMQNIKRVAPARKHKESEEDYEKRIAGIFKKADSFSISYINDCLNEADPNNAYFVENYFATFGAVNTPTMQRENLFALVQNAYTEVASLLHSYYPAEKKLAQDKANVAKIKALLDAIKSLQHFVKPLLGKGDESDKDERFYGELASLWAELDTVTPLYNMIRNYITRKPYSQKKIKLNFENPQLLGGWDANKEKDYATIILRRNGLYYLAIMDKDSRKLLGKAMPSDGECYEKMVYKLLPGANKMLPKVFFAKSRMDDFKPSKELIEKYNNGTHKKGKNFDIQDCHNLIDYFKQSIDKHEDWSKFGFNFSDTSTYEDLSGFYREVEQQGYKLSFARVSVSYINQLVEEGKMYLFQIYNKDFSEYSKGTPNMHTLYWKALFDERNLADVVYKLNGQAEMFYRKKSIENSHPTHPANHPILNKNKDNKKKESLFDYDLIKDRRYTVDKFMFHVPITMNFKSSSSENINQDVKAYLRHADDMHIIGIDRGERHLLYLVVIDLQGNIKEQYSLNEIVNEYNGNTYHTNYHDLLDVREEERLKARQSWQTIENIKELKEGYLSQVIHKITQLMVKYHAIVVLEDLNMGFMRGRQKVEKQVYQKFEKMLIDKLNYLVDKKADASVSGGLLNAYQLTSKFDSFQKLGKQSGFLFYIPAWNTSKIDPITGFVNLLDTRYQNVEKAKVFFSKFDAIRYNKDKDWFEFNLDYDKFGKKAEGTRTKWILCTRGMRIDTFRNKEKNSQWDNQEVDLTAELKSLLEHYYIDIHGNLKEAISAQTDKAFFTGLLHILKLTLQMRNSITGTETDYLVSPVADENGIFYDSRSCGEQLPENADANGAYNIARKGLMMIEQIKNAEDLGNLKFDISNKAWLNFAQQKPYKNG

SEQ ID NO: 1635 - protein, 1276 aa, Unknown
  Description of Unknown: uncultivated organism sequence
  Category: MG75 effectors
  Description: MG75-121 effector
MAKKFEDFTKLYPLSKTLCFEARPIGATKSNIIKNGLLDEDKHRAESYVKVKKLIDEYHKAFIDRVLADGCLCYKNEGNEDSLEEYYEFYSLSSKDKSDDTRKHFATIQQNLRSKIAETLTKDKAYANLFGNKLIESHKDKEDKNNIIDSDLIQFVSTATPDQLDSQSKDDATKLIKEFWGFTTYFTGFFENRKNMYTSEEKSTGIAYRLINENLPKFIDNMESFKKIMEKPEMSANMEELRANLEEYLNVESISEMFELNYYNMLLTQKQIDVYNAVIGGKTDEEQDIKTKGINEYVNLYNQQHKDAKLPKLKTLFKQILSDRNAISWLPEEFDKDQNVLNAIKDCYVRLTANVLGNNVLNSLLSTLSEYNTESIFIRNDIQLTNISQKMAGSWNYIQDAIKQDIKNVAPARKRKESEEDYEERISKNFKKADSYSIKYIDDCLNRAYKNNTYTVEGYFATLGATNTPSLQRENLFAQIANAYTNISSLLSSDYSAEKNLAQDKENVAKIKTLLDCIKSLQHFVKPLLGKGDESDKDERFYGELSMLWKELDTVTPLYNMVRNYMTRKPYSQKKIKLNFENPQLLGGWDANKEKDYASILLRRDGKYYLGIMDKESKKLLGKSMPSDGACYQKMVYKLLPGANKMLPKVFFAKSRLADFNPSKEIIENYNNGTHKKGKNFNLKDCHALIDYFKESIKKHEDWSKFGFKFSESTTYEDLSGFYHEVEQQGYKLSFTNVSASYIDKMVDEGKMYLFQIYNKDFSEYSKGTPNMHTLYWKALFDERNLADVVYKLNGQAELFYREKSIDCTHPTHPANHPILNKNKDNEKKESIFEYDLIKDRRYTVDKFMFHVPITMNFKSTGADNINQLVREHLKDADAPHIIGIDRGERHLLYLVVIDMHGNIKEQFTLNDIVNEYNGNTYRTNYHDLLDAREDVRLKARQSWQTIENIKELKEGYLSQVIHKITQLMVKYHAIVVLEDLNMGFMRGRQKVEKQVYQKFEKMLIDKLNYYVDKKANAEQAGGLLNAYQLTSKFDSFQKLGKQSGFLLYIPAWNTSKIDPVTGFVNLLDTRYQNVEKAKAFFCKFEAIRYNSNKNWFEFTIDYNNFGQKAEGTRTKWTLCTQGKRIRTFRNPEKNSEWDNQEIDLTAALKNLFAHYHIDINGNIKEAISAQSDKTFFTELLHLLKLTLQMRNSITGTETDYLISPVADDNGYFYDSRTCNDTLPKNADANGAYNIARKGLMLIEQIKKAKDIANIKFDISNKSWLNFAQQKPYKDE

SEQ ID NO: 1636 - protein, 1274 aa, Unknown
  Description of Unknown: uncultivated organism sequence
  Category: MG75 effectors
  Description: MG75-122 effector
MAKNFEDFKRLYPLSKTLRFEAKPIGATLDNIVKSGLLDEDEHRAASYVKVKKLIDEYHKVFIDRVLADGCLPLKNEGHNNSLTEYYDNYVSKSQNEDAKKAFEENQQNLRSIIAKKLTEDKAYANLFGKNLIESYKDKTDKTKIIDSDLIKFINTAESTQLDSMSQDEAKEIVKEFWGFTTYFVGFFDNRKNMYTAEEKSTGIAYRLINENLPKFIDNMEAFKKAIARPEIQANMEELYSNFSEYLNVESIQEMFLLDYYNMLLTQKQIDVYNAIIGGKTDDEHDVKIKGINEYINLYNQQHKDDKLPKLKALFKQILSDRNAISWLPEEFNSDQEVLNAIKDCYERLSENVLGDKVLKSLLGSLADYSLDGIFIRNDLQLTDISQKMFGNWGVIQNAIMQNIKHVAPARKHKESEEDYEKRIAGIFKKADSFSISYINDCLNEADPNNAYFVENYFATFGAVNTPTMQRENLFALVQNAYTEVAALLHSDYPTVKHLAQDKANVAKIKALLDAIKSLQHFVKPLLGKGDESDKDERFYGELASLWAELDTVTPLYNMIRNYMTRKPYSQKKIKLNFENPQLLGGWDANKEKDYATIILRRNGLYYLAIMDKDSRKLLGKAMPSDGECYEKMVYKLLPGANKMLPKVFFAKSRMEDFKPSKELVEKYNNGTHKKGKNFCIQDCHNLIDYFKQSIDKHEDWSKFGFNFSETSTYEDLSGFYREVEQQGYKLSFARVSVSYINQLVEEGKMYLFQIYNKDFSEYSKGTPNMHTLYWKALFDERNLADVVYKLNGQAEMFYRKKSIENTHPTHPANHPILNKNKDNKKKESLFKYDLIKDRRYTVDKFMFHVPITMNFKSSGSENINQDVKAYLRYADDMHIIGIDRGERHLLYLVVIDLQGNIKEQFSLNEIVNDYNGNTYHTNYHDLLDVREDERLKARQSWQTIENIKELKEGYLSQVIHKITQLMVKYHAIVVLEDLNMGFMRGRQKVEKQVYQKFEKMLIEKLNYLVDKKADASVSGGLLNAYQLTSKFDSFQKLGKQSGFLFYIPAWNTSKIDPVTGFVNLLDTRYQNVEKAKSFFSKFDAIRYNKDKDWFEFNLDYDKFGKKAEGTRTKWTLCTRGMRIDTFRNKEKNSQWDNQEVDLTAEMKSLLEHYYIDIHGNLKDAISAQTDKAFFTGLLHILKLTLQMRNSITGTETDYLVSPVVDENGIFYDSRSCGDTLPENADANGAYNIARKGLMMIEQLKDAKDLDNLKFDISNKAWLNFAQQKPYKNG

SEQ ID NO: 1637 - protein, 1252 aa, Unknown
  Description of Unknown: uncultivated organism sequence
  Category: MG75 effectors
  Description: MG75-123 effector
MKFEDFTGLYPVSKTLRFEAKPVGATLENVIKSGVLEDDAHRARSYKKVKKLIDEYHKVFIDSVMSKFKFKEEILEEICSLYAAKSMDDKSKDRFVKLQGEMRKDVSVAFASDDRYKTINKKELVKEDLFEFVSHADNGQLAGLTKEEAEELILEFKDFTTYFSGFHKNRSNMYVADEKTTSVAYRLVNENLPRFLYNVSVFQKVVSVPEFENKIRAIYDSFREYLCVDNLASMFETSYYNDVLSQMQIDIYNSVIGGKTDKDSSTKIQGLNECINLYNQTHRNDKLPKFKILYKQILSDRVAMSWLPDEFSDDKETLEAIRNCYDSLTDHILGERDLKTLLESLGQYDMSGVFIANGPYLADISQKLYGDWRAIEKAIRKQEAVNSPKKAKETEEEYFNRITKHIHNYDSFSIEYLNFCITESYPNDGRRVEDYFATLGAVNTDTSQRENLFSRIDNAYTNVSGLLSSEYPETKKLSQDTENVEKIKDLLDSIKELQRFVKPLMGNGDESDNDKRFYGELSPLWDELETFSLLYDKVRNYVTRKPYSQNKIKLNFNNATLFAGWDQNKEKDNACIILRRGGMYYLGIMNKSYRIVFENNFPCDGDCYEKMVYKLLPGANKMLPKVFFSKSRIREFNPSDRILKNYEEGTHKKGPKFKLEDCHELIDFFKASINLHEDWKKFKFKFSDTSSYEDISDFYKEVEQQGYKITFVNVSVSYIDSLVNDGKLYLFQLYNKDFSQYSKGVPNMHTLYWKALFDKANLADVVYKLNGEAELFFRKKSIDMERPTHRANISVANKNIHNIKKESIFKYDLTKDRRYTVDKFLFHVPITMNFKSEGNIAIEQQVRSYLQSAEDTHVIGIDRGERHLLYVSVIDRRGLIKEQFSLNEIINEHNGSTYATNYHDLLDAKESERRKARQSWQTIENIKDLKEGYLSQAVHKIAQLMVKYHAVVVLEDLNVGFMRGRQKVEKQVYQKFEKMLTDKLNYLVDKKLNANDPGGVFHAYQLSSVFKSAEKRGKQSGFIFYIPAWNTSKIDPVTGFVNLFDLKYENIDKAKSFFSKFQIIRYNSERDWFEFIFDYDSFNSKASGTKVGWTLTTHGDRILSFRNSEKNNQWDSRAVILTDEYKALFDKYGIDYNDNLKEAITNQTEKAFFEDLLKCLRLTLQMRNSVIGTDTDFLISPVADNNGVFYDSRICADSLPKNADANGAYNIARKGLMLIDQIKKASDVRNIKFDIANKSWLDFAQKKPYLDE

SEQ ID NO: 1638 - protein, 1271 aa, Unknown
  Description of Unknown: uncultivated organism sequence
  Category: MG75 effectors
  Description: MG75-124 effector
MEYENFKKIYPLSKTLRFEAKPVGSTLKNFIESGLLEEDEHRAQSYVKVKKLIDEYHKVFIDRVLNDGCLPLENKGNKNSLEEYYESYLSKNRDENANNTFKEIQQNLRSVIAKKLTDDKAYANLFGNKLIESYKDKEDKKKIIDSDLIQFINCANSSQLNGMSEDEAKELVKEFWGFTTYFEGFHTNRKNMYTAEEESTAIAHRLINENLPKFIDNMDVFKKAVAKPEIQANIEELYANFAAYLNVESIQEMFQLDYYNMLLTQKQIDVYNAIIGGKTDEDHDVKIKGINEYINLYNQQHKNEKLPKLKVLFKQILSDRNAISWLPEEFNDDQEVLNAIKDCYERLSENVLGDKVLKSLLCSLGDYNLDGIFVRNDAQLTDISQKMFGDWGVIQNAIIQNIKNVAPARKRKESEEDYEKRISDIFKKADSFSLRYINDCLNEMDEKNPYTVQWYFSTLGAVNTPTMQRENLFALIQNAYTDISDLLNSQYPTDKNLSQDKTNVAKVKALLDAIKSLQHFVKPLLGRGDESDKDERFYGELASLWTELDTVTPLYNMVRNYMTRKPYSEKKIKLNFENPQLLGGWDANKEKDYASIILRRNGLYYLAIMNKESKKLLGKTMPSDGECYEKMVYKLLPGANKMLPKVFFSKSKIDYFKPSKQIVENYNNDTHKKGKNFNINDCHDLIDFFKQSIDIHEDWSKFGFKFSDTSTYKDLSGFYREVEQQGYKLSFTKVSVSFIDKLVDDGKMYLFQIYNKDFSKYSKGTPNMHTLYWKALFDERNLADVVYKLNGQAEMFYRKKSIVYTHPTHPANHPILNKNKENKKKESVFEYDLVKDRRYTVDKFLLHVPITMNFKSVGSENINQQVREYLQQAEDTHIIGIDRGERHLLYLVVIDMQGNIKEQYTLNEIVNEYNGNTYRTNYHDLLNTREEERLTARQSWQTIENIKELKEGYLSQVIHKITQLMVKYHAVVVLEDLNKGFMRGRQKVEKQVYQKFEKMLIDKLNYLVDKKADAAQLGGLLNAYQLTSKFDSFQKLGKQSGFLFYIPAWNTSKIDPVTGFVNLLDTRYQNTEKAKAFFSKFDAIRYNTDKDWFEFYLDYDKFGTKAEGTRTKWTLCTQGCRIRIFRNADKNSQWDNQDVDLTKELKALFEIYHINIGGNLKEGICSQTDKAFFTGLLHILKLTLQMRNSITGTETDYLVSPVADENGVFYDSRSCGDTLPKNADANGAYNIARKGLMLIEQIKETKDLANFKYDISNKAWLNFAQQKPYEK

SEQ ID NO: 1639 - protein, 1080 aa, Unknown
  Description of Unknown: uncultivated organism sequence
  Category: MG75 effectors
  Description: MG75-125 effector
MYTSEEKSTGIAYRLINENLPKFIDNMEAFKKAIAIPEIQANIGELYSDFSEYLNVESIQEMFQLDYYNMLLTQKQIDVYNAIIGGKTDEDHDVNIKGINQYINIYNQHHKDEKLPKLKALFKQILSDRNAISWLPEEFNSDQEVLNAIDDCYKRLSENVLGDKVLKSLLCSLSDYNLNGIFVRNDLQLTDISQKMFGNWSVIQNAIMQNIKNVAPARKRKESEEDYEKRISDIFKKADSFSIQYINDCLNEMDDNNLHTVDGYFAKLGAVNTPTMQRENLFALIQNAYTDISDLLDTPYPENKNLAQDKTNVAKVKALLDAIKSLQHFVKPLLGKGDESDKDERFYGELASLWTELDTVTPLYNMIRNYMTRKPYSEKKIKLNFENPQLLGGWDANKEKDYATIILRRNGMYYLAIMDKDSKKLLGKTMPYDGECYEKMVYKLLPGANKMLPKVFFAKSRINDFKPSKKIVENYNNGTHKKGKNFNINDCHDLIDYFKQSIDKHEDWSKFGFNFSDTSTYEDLSGFYREVEQQGYKLSFTNISVSFIDKLVDEGKMYLFQIYNKDFSDYSKGTPNMHTLYWKALFDERNLADVVYKLNGQAEMFYRKKSIDYTHPTHPANHPIQNKNKDNKKKESVFEYDLVKDRRYTVDKFLFHVPITMNFKSVGSENINQQVREYLQQADDTHIIGIDRGERHLLYLVVIDMQGNIKEQFTLNEIVNEYNGNTYRTNYHDLLDTREEERLTARQSWQTIENIKELKEGYLSQVIHKITQLMVKYHAVVVLEDLNKGFMRGRQKVEKQVYQKFEKMLIDKLNYLVDKKVDATQSGGLLNAYQLTSKFDSFQKLGKQSGFLFYIPAWNTSKIDPVTGFVNLLDTRYQNTEKAKAFFSKFDAIRYNADKDWFEFNLDYDKFGTKAEDTRTTWTLCTQGNRICTFRNAEKNSQWDNQEVDLTRELKSLFEHYNINICGNLKEEICSQTDKAFFTGLLHILKLTLQMRNSITGTETDYLVSPVADENGVFYDSRSCGDTLPKNADANGAYNIARKGLMLIGQIKETKDLANFKYDISNKAWLNFAQQKPYKK

SEQ ID NO: 1640 - protein, 1236 aa, Unknown
  Description of Unknown: uncultivated organism sequence
  Category: MG75 effectors
  Description: MG75-126 effector
MEEYYESYMSKSNDENVSKTFKEIQENLRSVIAKKLTDNNAYANLFGNKLIESYKDKDEKNKIIDSDLIQFINTAEPSQLDSMSQDEAKELVKEFWGFTTYFVGFFDNRKNMYTSEEKSTGIAYRLINENLPKFIDNMEAFKKAVAKPEIQANIEELYSNFAEYLNVESIQEMFQLDYYNMLLTQKQIDVYNAIIGGKTDEEHDVKIKGINEYINLYNQQHKDEKLPKLKALFKQILSDRNAISWLPEEFNSDQEVLNAIKDCYERLSENVLGDKVLKSLLCSLSDYNLNGIFVRNDLQLTDISQKMFGNWSVVQDAIMQNIKNVAPARKRKESEEDYEKRISDIFKKADSFSIQYINDCLNEMDDNNLHAVDGYFATLGAVNTPTMQRENLFALIQNAYTDISNLLETPYPENKNLAQDKTNVAKVKALLDAIKSLQHFVKPLLGKGDESDKDERFYGELASLWTELDTVTPLYNMVRNYMTRKPYSEKKIKLNFENPQLLGGWDANKEKDYATIILRRNGMYYLVIMDKDSKKLLGKTMPSDGECYEKMVYKQFDISKQLPKCTTELKRVRKALVEDAKRSCLLSDSKDWNKPLNVTRKLWELNNYVWDKKKADWVLRKKENETRPKKFHKKYLELTSDKKGYNQAKNDWIKFTKEFLSSYKKVEAYDIHYKKRYNSVDELYKQLNGDFYTISFSYVSVSFIEKLVDEGKMYLFQIYNKDFSDYSKGTPNMHTLYWKALFDERNLADVVYKLNGQAEMFYRKKSINNTPPTHPANHPIQNKNKDNKKKESVFEYNLIKDRRYTVDKFLFHVPITMNFKSVGSENINQQVREYLQQADDTHIIGIDRGERHLLYLVVIDMQGEIKEQFTLNEIVNEYNGNTYRTNYHDLLDTREEERLKARQSWQTIENIKELKEGYLSQVIHKITQLMVKYHAVVVLEDLNKGFIRGRQKVEKQVYQKFEKMLIDKLNYLVDKKADAVQSGGLLNAYQLTSKFDSFQKLGKQSGFLFYIPAWNTSKIDPVTGFVNLLDTRQNTEKAKAFFSKFDVIRYNANKDWFEFNLDYDKFGTKAEGTRTKWILCTQGNRICTFRNTEKNSQWDNQEVDLTREMKSLFNYYHINICGNLKEEICSQTDKAFFTGLLHMLKLTLQMRNSITGTETDYLVSPVADENGVFYDSRSCGDTLPKNADANGAYNIARKGLMLIRQIKETKDLANFKYDISNKAWLNFAQQKPYKNE

SEQ ID NO: 1641 - protein, 1274 aa, Unknown
  Description of Unknown: uncultivated organism sequence
  Category: MG75 effectors
  Description: MG75-127 effector
MAKIFEDFKRLYPLSKTLRFEAKPIGATLDNIIKSGLLDEDEHRAASYVRVKKLIDEYHKVFIDRVLDNGCLPLKNEGHNNSLTEYYESYVTKSQNEDAKKVFKEIQQNLRSIIAKKLTEDKAYANLFGKNLIESYKDKTDKTKIIDSDLIKFINTAESTQLDSMSQDEAKELVKEFWGFTTYFVGFYDNRKNMYTAEEKSTGIAYRLVNENLPKFIDNMEAFKKAIARPEIQANMEELYSDFSEYLNVESVQEMFQLDYYNMLLTQKQIDVYNAIIGGKTDDEHDVKIKGINEYINLYNQQHKDDKLPKLKALFKQILSDRNAISWLPEEFNGDQEVLNAIKDCYERLSENVLGDKVLKSLLGSLSDYSLDGIFIRNDLQLTDISQKMFGNWCVIQNAIMQNIKHVAPARKHKESEEDYEKRIAGIFKKVDSFSISFINDCLNEADPNNAYFVENYFATFGAVNTPTMQRENLFALVQNAYTEVAALLHSDYPTAKHLAQDKVNVAKIKALLDAIKSLQHFVKPLLGKGDESDKDERFYGELASLWAELDTVTPLYNMIRNYMTRKPYSQKKIKLNFENPQLLGGWDANKEKDYATIILRRDGLYYLAIMNKESKKLLGKAMPSDGECYEKMVYKLLPGANKMLPKVFFAKSRMEDFKPSKELVEKYNNGTHKKGKNFNIQDCHNLIDYFKQSISKHEDWGKFGFNFSDTSTYEDLSGFYREVEQQGYKLSFVRVSVSYINQLVEEGKMYLFQIYNKDFSEYSKGTPNMHTLYWKALFDERNLADVVYKLNGQAEMFYRKKSIENTYPTHPANHPILNKNKDNKKKESLFDYDLIKDRRYTVGKFMFHVPITMNFKSSGSENINQDVKAYLRHADDMHIIGIDRGERHLLYLVVIDLQGNIKEQYSLNEIVNEYNGNTYHTNYHDLLDVREEERLKARQSWQTIENIKELKEGYLSQVIHKITQLMVKYHAIVVLEDLNMGFMRGRQKVEKQVYQKFEKMLIDKLNYLVDKKADASVSGGLLNAYQLTSKFDSFQKLGKQSGFLFYIPAWNTSKIDPVTGFVNLLDTRYQNVEKAKVFFSKFDAIRYNKDKDWFEFNLDYDKFGKKAEGTRTKWALCTRGMRIDTFRNKEKNSQWDNQEVDLTAEMKSLLEHYYIDIHGNLKDAISAQTDKAFFTGLLHILKLTLQMRNSITGTETDYLVSPVADENGIFYDSRSCGDELPENADANGAYNIARKGLMMIEQIKDAKDLDNLKFDISNKSWLNFAQQKPYKNE

SEQ ID NO: 1642 - protein, 1272 aa, Unknown
  Description of Unknown: uncultivated organism sequence
  Category: MG75 effectors
  Description: MG75-128 effector
MKFDDFKKLYSLSKTLRFEAKPVGSTLKNIIESGLLEEDEHRAQSYVKVKKLIDEYHKVFIDRVLNDGCLTIENKGKKDSLEEYYESYMSKSNDENVSKTFKEIQENLRSVIAKKLTDDNAYANLFGNKLIESYKDKDEKNKIIDSDLIQFINTAEPSQLDSMSQDEANELVKEFWGFTTYFVGFFDNRKNMYTSEEKSTGIAYRLINENLPKFIDNMEAFKKAVAKPEIQANIEELYSNFAEYLNVESIQEMFQLDYYNMLLTQKQIDVYNAIIGGKTDEEHDVKIKGINEYINLYNQQHKDEKLPKLKALFKQILSDRNAISWLPEEFNSDQKVLNAIDDCYKRLSENVLGDKVLKSLLCSLDDYNLDGIFVRNDLQLTDISQKMFGNWSVIQNAIMQNIKNVAPARKRKESEEDYEKRISDIFKKADSFSIQYINDCLNEMDDNNLHAVDGYFATLGAVNTPAMQRENLFALIQNAYTDISNLLETPYPENKNLAQDKTNVAKVKALLDAIKSLQHFVKPLLGKGDESDKDERFYGELASLWTELDTVTPLYNMIRNYMTRKPYSEKKIKLNFENPQLLGGWDANKEKDYATIILRRNGMYYLAIMDKDSKKLLGKTMPSDGECYEKMVYKLLPGANKMLPKVFFAKSRINDFKPSKLIVENYNNGTHKKGKNFNINDCHNLIDYFKQSIDKHEDWSKFGFNFSDTSTYEDLSGFYREVEQQGYKLSFTNVSVSFIDKLVDEGKMYLFQIYNKDFSDFSKGTPNMHTLYWKALFDERNLADVVYKLNGQAEMFYRKKSINNTHPTHPANHPIQNKNKDNKKKESVFEYDLIKDRRYTVDKFLFHVPITMNFKSVGSENINQQVREYLQQADDTHIIGIDRGERHLLYLVVIDMQGNIKEQFTLNEIVNEYNGNTYHTNYHDLLDTREEERLTARQSWQTIENIKELKEGYLSQVIHKITQLMVKYHAVVVLEDLNKGFMRGRQKVEKQVYQKFEKMLIDKLNYLVDKKADAAQSGGLLNAYQLTSKFDSFQKLGKQSGFLFYIPAWNTSKIDPVTGFVNLLDTRYQNTEKAKAFFSRFDAIRYNANKDWFEFYLDYDKFCTKAEGTRTRWTLCTQGSRISTFRNAEKNSQWDNLEVDLTREMKSLFEHYHINICGNLKEEICLQTDKAFFTGLLHMLKLTLQMRNSITGTETDYLISPVADENGTFYDSRSCGDTLPKNADANGAYNIARKGLMFIGQIKETKDLANFKYDISNKAWLNFAQQKPYKNE

SEQ ID NO: 1643 - protein, 1245 aa, Unknown
  Description of Unknown: uncultivated organism sequence
  Category: MG75 effectors
  Description: MG75-129 effector
METFSDFTNLYPLSKTLRFRLIPVGETLRHFIDSGILEEDQHRAESYVKVKAIIDDYHRAYIESSLSGFELPVESMGKSNSLEEYYQYHNIRNKTEDIQNTLSKVRDNLRKQIVNQLIKSEMFKRIDKKELIQTDLIDFVKNDPDENEKITLISEFRNFTVYFKGFHENRKNMYSDEEKSTSIAFRLIHENLPKFIDNMEVFAKIQNTSISEEFDAIQKELCPDSVAFADMFKLGYFNRTLSQKQIDAYNTVISGRMTAEGGKIKGLNEYINLYNQQHKQEKLPKMKLLFKQILSDRESASWLPEKLENDKQVVGALVDFWNTIHDTVLAEGGLKTVISSLVSYSLEGIFLKNDLQLTDVSQKATGSWSKIPAAIKQNLEAMNPQKKKESYEGYQERIDKIFKSYKSFSLAFINECLHGEYKIEDYFIELGAINTDSLQKENHFSHIFNTYTDIKEVIEFYSESIDTKLIRDNDSIQKIKQFLDAVKDLQAYVKPLLGNGDETGKDERFYGDFVEYWNQLDLITPLYNMVRNYVTQKPYSIEKIKINFQNPTLLNGWDLNKETDNTSVILRRDGKYYLAIMNNKCRKVFLKYPSGSDRSCYEKMEYKLLPGANKMLPKVFLSKSRINEFMPDERLLSNYEKGTHKKTGNSFSLTDCHALIDFFKKSLNKHEDWKNFGFKFSDTSTYTDMSGFYKEVENQGYKLSFKPIDAVYVDQLVDEGKIFLFQIYNKDFSEHSKGTPNLHTLYWKMLFDETNLGDVVYKLNGEAEVFFRKASIKVSSPTHPANVPIKKKNPKHKDEERILKYDLIKDKRYTVDQFQFHVPITMNFKSDGNGNINQRVIEYLRSVSDIHIIGIDRGERNLLYLVVIDGSGKICEQFSLNEIKVEYNGETYSTNYHDLLDIKEDERKQARQSWQSIANIKDLKEGYLSQVIHKISELMVKYNAIVVLEDLNTGFMRGRQKVEKQVYQKFEKMLIEKLNYLVFKKQPSNLCGGLMHAYQLTNKFEGFNKLGKQSGFLFYIPAWNTSKMDPVTGFVNLFDLKYESIDKAKSFFSKFDSIRYNVERDMFEWKFNYDEFTKKAEGTKTNWTVCSYGNRIITFRNPNKNSQWDNKEINLTENIKLLFERFGIDLSSNLKDEIMQRTEKEFFIELISLFKLVLQMRSSWTGTDIDYLISPVCNENGEFFDSRNVDETLPQNADANGAYNIARKGMILLDKIKKSNGEKKLVLSITNREWLSFAQGCCKNG

SEQ ID NO: 1644 - protein, 1058 aa, Unknown
  Description of Unknown: uncultivated organism sequence
  Category: MG75 effectors
  Description: MG75-130 effector
MAKNFEDFKRLYSLSKTLRFEAKPIGATLDNIVKSGLLDEDEHRAASYVKVKKLIDEYHKVFIDRVLDDGCLPLENKGNNNSLAEYYESYVSRAQDEDAKKKFKEIQQNLRSVIAKKLTEDKAYANLFGNKLIESYKDKEDKKKIIDSDLIQFINTAESTQLDSMSQDEAKELVKEFWGFVTYFYGFFDNRKNMYTAEEKSTGIAYRLVNENLPKFIDNIEAFNRAITRPEIQENMGVLYSDFSEYLNVESIQEMFQLDYYNMLLTQKQIDVYNAIIGGKTDDEHDVKIKGINEYINLYNQKHKDDKLPKLKALFKQILSDRNAISWLPEEFNSDQEVLNAIKDCYERLSENVLGDKVLKSMLGSLADYSLDGIFIRNDLQLTDISQKMFGNWSVIQNAIMQNIKHVAPARKHKESEEEYENRIAGIFKKADSFSISYIDACLNETDPNNAYFVENYFATLGAVDTPTMQRENLFALVQNAYTEITALLHSDYPTEKNLAQDKANVAKIKALLDAIKSLQHFVKPLLGKGDESDKDERFYGELASLWAELDTMTPLYNMIRNYMTRKPYSQKKIKLNFENPQLLGGWDANKEKDYATIILRRNGLYYLAIMNKDSKKLLGKAMPSDGECYEKMVYKLLPGANKMLPKVFFAKSRMEDFKPSKELVEKYNNGTHKKGKNFNIQDCHNLIDYFKQSIDKHEDWSKFGFKFSDTSTYEDLSGFYREVEQQGYKLSFARVSVSYINQLVEEGKMYLFQIYNKDFSEYSKGTPNMHTLYWKALFDERNLADVVYKLNGQAEMFYRKKSIENTHPTHPANHPILNKNKDNNKKESLFEYDLIKDRRYTVDKFMFHVPITMNFKSSGSENINQDVKAYLCHADDMHIIGIDRGERHLLYLVVIDLQGNIKEQFSLNEIVNDYNGNTYHTNYHDLLDVREDERLKARQSWQTIENIKELKDGYLSQVIHKITQLMVKYHAIVVLEDLNMGFMRGRQKVEKQVYQKFEKMLIEKLNYLVDKKADASVSGGLLNAYQLTSKFDSFQKLGKQSGFLFYRECKLNCVKLQ

SEQ ID NO: 1645 - protein, 897 aa, Unknown
  Description of Unknown: uncultivated organism sequence
  Category: MG75 effectors
  Description: MG75-131 effector
MAKIFEDFKRLYPLSKTLRFEAKPIGATLDNIIKSGLLDEDEHRAASYVRVKKLIDEYHKVFIDRVLDNGCLPLKNEGHNNSLTEYYESYVTKSQNEDAKKVFKEIQQNLRSIIAKKLTEDKAYANLFGKNLIESYKDKTDKTKIIDSDLIKFINTAESTQLDSMSQDEAKELVKEFWGFTTYFVGFYDNRKNMYTAEEKSTGIAYRLVNENLPKFIDNMEAFKKAIARPEIQANMEELYSDFSEYLNVESVQEMFQLDYYNMLLTQKQIDVYNAIIGGKTDDEHDVKIKGINEYINLYNQQHKDDKLPKLKALFKQILSDRNAISWLPEEFNGDQEVLNAIKDCYERLSENVLGDKVLKSLLGSLSDYSLDGIFIRNDLQLTDISQKMFGNWCVIQNAIMQNIKHVAPARKHKESEEDYEKRIAGIFKKVDSFSISFINDCLNEADPNNAYFVENYFATFGAVNTPTMQRENLFALVQNAYTEVAALLHSDYLTAKHLAQDKVNVAKIKALLDAIKSLQHFVKPLLGKGDESDKDERFYGELASLWAELDTVTPLYNMIRNYMTRKPYSQKKIKLNFENPQLLGGWDANKEKDYATIILRRDGLYYLAIMNKDSKKLLGKAMPSDGECYEKMVYKLLPGANKMLPKVFFAKSRMEDFKPSKELVEKYNNGTHKKGKNFNIQDCHNLIDYFKQSISKHEDWGKFGFNFSDTSTYEDLSGFYREVEQQGYKLSFTRVSVSYISQLVEEGKMYLFQIYNKDFSEYSKGTPNMHTLYWKALFDERNLADVVYKLNGQAEMFYRKKSIENTHPTHPATHPILNKNKDNKKKESLFDYDLIKDRRYTVDKFMFHVPITMNFKSSGSENINQDVKAYLRHADDMHIIGIDRGERHLLYLVVID

SEQ ID NO: 1646 - protein, 910 aa, Unknown
  Description of Unknown: uncultivated organism sequence
  Category: MG75 effectors
  Description: MG75-132 effector
MYFDDFKKLYPLSKTLRFEAKPVGPTFKHIKERGLLEEDEHRAISYVKVKKLIDEYHKAFVGKALNNGCLLYESCGNKNSLIEYYETYKSKEGEARKTMKEIQKNLREMIVGAFEKEEDYANLFKGGLIEPYKSGGKHKEPDILRLINTAGFSQLAGMSQEEAKSLIKEFWRFTTYFVGFFDNRGNMYTSEEKSTGIAYRLINENLPRFIDNMEIFNKIIGKSEIQARVTELYSDFEGYLNVGSIQEMFKLDYYNALLTQKQIDVYNAIISGRTTTGPESKKIKGLNEYINLYNQQHKDGKLPKFKPLFKQILSDREALSWLPDEFVNDQEMLNAIKNCYEKLTGNILGESALKVLLGSLADYDLGGIFVRNDSQLTNISQRMFGRWDAIQNAILQDIRKTAPMRKRRESEEDYENRIDKMFKKADSFSIKYINDCIREIAVDDTLFVEDYFATLGAVNTPTIQRENLFLLVQNAFTDVADLLNSEYSAEKSLAQDSVNVSKIKALLDAIKSLQQFVRPLLGNGDENEKDERFYGEFTSLWAELDEVTLLYDMVRNRMTRKPYSQKKIKLNFANPKLLNGWDENKEKDNSCIILRRDGKYYLAVMDKKSKNLLGKPMPSDGECYEKMVYKLLPGAQKMFPKVFFAKSRIDEFKPSEHILNIYSNGTHKKGNKNFNIEDCHDLIDFFKESIRRHKDWNKFGFEFSDTSTYENVNEFYREADEQGYKLSFVNVSVAYIDKLVNEGEMYLFQIYNKDFSEYSKGTPNMHTLYWKALFDDRNLVDMVYKLNGQAELFYRKKSLDSIRPTHPANQPIKNKNKNNKKKESLFEYDLVKDRRYTVDKFMFHVPITMNFKNAGLEKINQQVREYLQQADDTHIIGIDRGERHLLYLVVIDMHGNIKEQFSLNEIVNEC

SEQ ID NO: 1647 - protein, 1269 aa, Unknown
  Description of Unknown: uncultivated organism sequence
  Category: MG75 effectors
  Description: MG75-133 effector
MYFDDFKKLYPLSKTLRFEAKPVGPTFKHIKERGLLEEDEHRAISYVKVKKLIDEYHKAFVGKALNNGCLLYESCGNKNSLIEYYETYKSKEGEARKTMKEIQKNLREMIVGAFEKEEDYANLFKGGLIEPYKSGGKHKEPDILRLINTAGFSQLAGMSQEEAKSLIKEFWRFTTYFVGFFDNRGNMYTSEEKSTGIAYRLINENLPRFIDNMEIFNKIIGKSEIQARVTELYSDFEGYLNVGSIQEMFKLDYYNALLTQKQIDVYNAIISGRTTTGPESKKIKGLNEYINLYNQQHKDGKLPKFKPLFKQILSDREALSWLPDEFVNDQEMLNAIKNCYEKLTGNILGESALKVLLGSLADYDLGGIFVRNDSQLTNISQRMFGRWDAIQNAILQDIRKTAPMRKRRESEEDYENRIDKMFKKADSFSIKYINDCIREIAVDDTLFVEDYFATLGAVNTPTIQRENLFLLVQNAFTDVADLLNSEYSAEKSLAQDSVNVSKIKALLDAIKSLQQFVRPLLGNGDENEKDERFYGEFTSLWAELDEVTLLYDMVRNRMTRKPYSQKKIKLNFANPKLLNGWDENKEKDNSCIILRRDGKYYLAVMDKKSKNLLGKPMPSDGECYEKMVYKLLPGAQKMFPKVFFAKSRIDEFKPSEHILNIYSNGTHKKGNKNFNIEDCHDLIDFFKESIRRHKDWNKFGFEFSDTSTYENVNEFYREADEQGYKLSFVNVSVAYIDKLVNEGEMYLFQIYNKDFSEYSKGTPNMHTLYWKALFDDRNLVDMVYKLNGQAELFYRKKSLDSIRPTHPANQPIKNKNKNNKKKESLFEYDLVKDRRYTVDKFMFHVPITMNFKNAGLEKINQQVREYLQQADDTHIIGIDRGERHLLYLVVIDMHGNIKEQFSLNEIVNECSGNTYHTNYHALLDAREEERLNARRSWQTIESIKELKEGYLSQVIHRITQLMVKYHAIVVLEDLSMGFMRGRQKVEKQVYQKFEKMLIDKLNYLVDKKVDVSQPGGLLNAYQLTNKFESFQSSEKQSGFVFYIPAWNTSKIDPVTGFVNLLDTRYQNVEKARAFFSKFDAIRYNKDKDWFEFGVDYDNFNKKAEGTMTKWTLCTQGVRICTFRNAEKNSQWDTQEVDLTTEMKSLFGQSQIDVNGNLKEAICSQSDKTFFMRLLHLLKLMLQMRNSITGTEIDYLVSPVADGNGNFYDSRKCDSTLPKNADANGAYNIARKGLMLLRQMKTADNLTDVKFDMTNRTWLKFAQQKPYKDE

SEQ ID NO: 1648 - protein, 848 aa, Unknown
  Description of Unknown: uncultivated organism sequence
  Category: MG75 effectors
  Description: MG75-134 effector
MAKIFEDFKRLYPLSKTLRFDAKPVGATLDNIVKSGLLEEDEHRAASYVRVKKLIDEYHKVFIDRVLDNGCLPLENKGENNSLAEYYDSYVSKSQNEDAKKAFEENQQNLRSIIAKKLTGDKAYANLFGKNLIESYKDKKDKKKIIDSDLIQFINTADSTQLDSMTQVEAKELVKEFWGFVTYFYGFFDNRKNMYTAEKKSTGIAYRLINENLPKFIDNMEAFKKVIARPEIQANMEELYSDFSEYLNVESIQEMFQLDYYDMLLTQKQIDVYNAIIGGKTDDEHDVKIKGINEYINLYNQQHKDTRLPKLKALFKQILSDRNAISWLPEEFNSDQEVLNAIKDCYERLSENVLGDKVLKSLLGSLADYSLEGIFIRNDLQLTDVSQKMFGNWGVIQNAIMQNIKHVAPARKHKESEENYEKRIAGIFKKADSFSISYINDCLNEADPNNAYFVENYFATFGAVNTPTMQRENLFALVQNAYTEVAALLHSDYPTVKHLAQDKANVSKIKALLDAIKSLQHFVKPLLGNGDESGKDDRFYGELASLWAELDTVTPLYNMIRNYMTRKPYSQKKIKLNFENPQLLGGWDANKEKDYATIILRRNGLYYLAIMGKDSKNLLGKAMPSDGECYEKMVYKQFDISKQLPKCTTELKHVKKALVENAKRSCLLSDINNWNKPLNVTRKLWELNNFVWDKKKEDWVLRKKDNETRPKKFHKKYLELTSDKKGYNQAINDWIKFTKEFLSSYKKVEAYEIHYKKRYNSVDELYKQLNGDLYAISFTYVSVSFIEQLVSEGKMYLFQIYNKDFSKYSKGTPNMHTLYWKALFDERNLADVVYKLNGQAEMFYRKGV

SEQ ID NO: 1649 - protein, 1304 aa, Unknown
  Description of Unknown: uncultivated organism sequence
  Category: MG75 effectors
  Description: MG75-135 effector
MFPACFQEQRTGHPNNIVKSGLLEEDEHRAASYVRVKKLIDEYHKVFIDRVLDNGCLPLENKGENNSLAEYYDSYVSKSQNEDAKKAFEENQQNLRSIIAKKLTGDKAYANLFGKNLIESYKDKKDKKKIIDSDLILFINTADSTQLDSMTQVEAKELVKEFWGFVTYFYGFFDNRKNMYTAEKKSTGIAYRLINENLPKFIDNMEAFKKVIARPEIQANMEELYSDFSEYLNVESIQEMFQLDYYDMLLTQKQIDVYNAIIGGKTDDEHDVKIKGINEYINLYNQQHKDTRLPKLKALFKQILSDRNAISWLPEEFNSDQEVLNAIKDCYERLSENVLGDKVLKSLLGSLADYSLEGIFIRNDLQLTDVSQKMFGNWGVIQNAIMQNIKHVAPARKHKESEEEYEKRIAGIFKKADSFSISYLNDCLNEADPNNAYFVENYFATFGAVNTPTMQRENLFALVQNKYTEVAALLHSDYPTAKHLAQDKANVAKIKALLDAIKSLQHFVKPLLGKGDESDKDERFYGELASLWAELETVTPLYNMIRNYMTRKPYSQKKIKLNFENPQLLDGWDANKEKDYATIILRRNGLYYLAIMGKDSKNLLGKAMPSDGECYEKMVYKQFDISKQLPKCTTELKHVRKALVEDAKRSCLLSDFNNWNKPLNVTRKLWELNNFVWDKKKEDWVLRKKDNETRPKKFHKKYLELTSDKKGYNQAKNDWIKFIKEFLSSYKKVEAYDIHYKKRYNSVDELYKQLNGDLYAISFTYVSASFIEQLVSEGKMYLFQIYNKDFSEYSKGTPNMHTLYWKALFDERNLADVVYKLNGQAEMFYRKKSLENTHPTHPANHPILNKNKDNKKKESLFDYDLIKDRRYTVDKFMFHVPITMNFKSSGSENINQDVKAYLRHADDMHIIGIDRGERHLLYLVVIDLQGNIKEQYSLNEIVNEYNGNTYHTNYHDLLDVREEERLKARQSWQTIENIKELKEGYLSQVIHKITQLMVKYHAIVVLEDLNMGFMRGRQKVEKQVYQKFEKMLIDKLNYLVDKKADASVSGGLLNAYQLTSKFDSFQKMGKQSGFLFYIPAWNTSKIDPVTGFVNLLDTRYQNVEKAKVFFSKFDAIRYNKDKDWFEFNLDYDKFGKKAEGTRTKWALCTRGMRIDTFRNKEKNSQWDNQEVDLTAEMKSLLEHYYIDIHGNLKDAISAQTDKTFFTGLLHILKLTLQMRNSITGTETDYLVSPVADENGIFYDSRSCGDELPENADANGAYNIARKGLMMIEQIKDAKDLNNLKFDISNKAWLNFAQQKPYKNG

SEQ ID NO: 1650 - protein, 870 aa, Unknown
  Description of Unknown: uncultivated organism sequence
  Category: MG75 effectors
  Description: MG75-136 effector
MAKIFEDFKRLYPLSKTLRFEAKPIGATLDNIIKSGLLDEDEHRAASYVRVKKLIDEYHKVFIDRVLDNGCLPLKNEGHNNSLTEYYESYVTKSQNEDAKKVFKEIQQNLRSIIAKKLTEDKAYANLFGKNLIESYKDKTDKTKIIDSDLIKFINTAESTQLDSMSQDEAKELVKEFWGFTTYFVGFYDNRKNMYTAEEKSTGIAYRLVNENLPKFIDNMEAFKKAIARPEIQANMEELYSDFSEYLNVESVQEMFQLDYYNMLLTQKQIDVYNAIIGGKTDDEHDVKIKGINEYINLYNQQHKDDKLPKLKALFKQILSDRNAISWLPEEFNGDQEVLNAIKDCYERLSENVLGDKVLKSLLGSLSDYSLDGIFIRNDLQLTDISQKMFGNWCVIQNAIMQNIKHVAPARKHKESEEDYEKRIAGIFKKVDSFSISFINDCLNEADPNNAYFVENYFATFGAVNTPTMQRENLFALVQNAYTEVAALLHSDYPTAKHLAQDKVNVAKIKALLDAIKSLQHFVKPLLGKGDESDKDERFYGELASLWAELDTVTPLYNMIRNYMTRKPYSQKKIKLNFENPQLLGGWDANKEKDYATIILRRDGLYYLAIMNKESKKLLGKAMPSDGECYEKMVYKLLPGANKMLPKVFFAKSRMEDFKPSKELVEKYNNGTHKKGKNFNIQDCHNLIDYFKQSISKHEDWGKFGFNFSDTSTYEDLSGFYREVEQQGYKLSFTRVSVSYISQLVEEGKMYLFQIYNKDFSEYSKGTPNMHTLYWKALFDERNLADVVYKLNGQAEMFYRKKSIENTHPTHPANHPILNKNKDNKKKESLFDYDLIKDRRYTVDKFMFHVPVTMNFKSSGSENINQDVKA

SEQ ID NO: 1651 - protein, 1304 aa, Unknown
  Description of Unknown: uncultivated organism sequence
  Category: MG75 effectors
  Description: MG75-137 effector
MFPASFQEQRTGHPNNIVKSGLLEEDEHRAASYVRVKKLIDEYHKVFIDRVLDNGCLPLENKGENNSLAEYYDSYVSKSQNEDAKKAFEENQQNLRSIIAKKLTGDKAYANLFGKNLIESYKDKKDKKKIIDSDLIQFINTADSTQLDSMTQVEAKELVKEFWGFVTYFYGFFDNRKNMYTAEKKSTGIAYRLINENLPKFIDNMEAFKKVIARPEIQANMEELYSDFSEYLNVESIQEMFQLDYYDMLLTQKQIDVYNAIIGGKTDDEHDVKIKGINEYINLYNQQHKDTRLPKLKALFKQILSDRNAISWLPEEFNSDQEVLNAIKDCYERLSENVLGDKVLKSLLGSLADYSLEGIFIRNDLQLTDVSQKMFGNWGVIQNAIMQNIKHVAPARKHKESEEEYEKRIAGIFKKADSFSISYLNDCLNEADPNNAYFVENYFATFGAVNTPTMQRENLFALVQNKYTEVAALLHSDYPTAKHLAQDKANVAKIKALLDAIKSLQHFVKPLLGKGDESDKDERFYGELASLWAELETVTPLYNMIRNYMTRKPYSQKKIKLNFENPQLLDGWDANKEKDYATIILRRNGLYYLAIMGKDSKNLLGKAMPSDGECYEKMVYKQFDISKQLPKCTTELKHVRKALVEDAKRSCLLSDFNNWNKPLNVTRKLWELNNFVWDKKKEDWVLRKKDNETRPKKFHKKYLELTSDKKGYNQAKNDWIKFIKEFLSSYKKVEAYDIHYKKRYNSVDELYKQLNGDLYAISFTYVSASFIEQLVSEGKMYLFQIYNKDFSEYSKGTPNMHTLYWKALFDERNLADVVYKLNGQAEMFYRKKSIENTHPTHPANHPILNKNKDNKKKESLFDYDLIKDRRYTVDKFMFHVPITMNFKSSGSENINQDVKAYLRHADDMHIIGIDRGERHLLYLVVIDLQGNIKEQYSLNEIVNEYNGNTYHTNYHDLLDVREEERLKARQSWQTIENIKELKEGYLSQVIHKITQLMVKYHAIVVLEDLNMGFMRGRQKVEKQVYQKFEKMLIDKLNYLVDKKADASVSGGLLNAYQLTSKFDSFQKMGKQSGFLFYIPAWNTSKIDPVTGFVNLLDTRYQNVEKAKVFFSKFDAIRYNKDKDWFEFNLDYDKFGKKAEGTRTKWALCTRGMRIDTFRNKEKNSQWDNQEVDLTAEMKSLLEHYYIDIHGNLKDAISAQTDKTFFTGLLHILKLTLQMRNSITGTETDYLVSPVADENGIFYDSRSCGDELPENADANGAYNIARKGLMMIEQIKDAKDLNNLKFDISNKAWLNFAQQKPYKNG

SEQ ID NO: 1652 - protein, 886 aa, Unknown
  Description of Unknown: uncultivated organism sequence
  Category: MG75 effectors
  Description: MG75-138 effector
METFSGFTNLYPLSKTLRFRLIPVGETLKYFIGSGILEEDQHRAESYVKVKAIIDDYHRAYIENSLSGFELPLESTGKFNSLEEYYLYHNIRNKTEEIQNLSSKVRTNLRKQVVAQLTKNEIFKRIDKKELIQSDLIDFVKNEPDANEKIALISEFRNFTVYFKGFHENRRNMYSDEEKSTSIAFRLIHENLPKFIDNMEVFAKIQNTSISENFDAIQKELCPELVTLCEMFKLGYFNKTLSQKQIDAYNTVIGGKTTSEGKKIKGLNEYINLYNQQHKQEKLPKMKLLFKQILSDRESASWLPEKFENDSQVVGAIVNFWNTIHDTVLAEGGLKTIIASLGSYGLEGIFLKNDLQLTDISQKATGSWGKISSEIKQKIEVMNPQKKKESYETYQERIDKIFKSYKSFSLAFINECLRGEYKIEDYFLKLGAVNSSSLQKENHFSHILNTYTDVKEVIGLYSESTDTKLIQDNDSIQKIKQFLDAVKDLQAYVKPLLGNGDETGKDERFYGDLIEYWSLLDLITPLYNMVRNYVTQKPYSVDKIKINFQNPTLLNGWDLNKETDNTSVILRRDGKYYLAIMNNKSRKVFLKYPSGTDRNCYEKMEYKLLPGANKMLPKVFFSKSRINEFMPNERLLSNYEKGTHKKSGTCFSLDDCHTLIDFFKKSLDKHEDWKNFGFKFSDTSTYEDMSGFYKEVENQGYKLSFKPIDATYVDQLVDEGKIFLFQIYNKDFSEHSKGTPNMHTLYWKMLFDETNLGDVVYKLNGEAEVFFRKASINVSHPTHPANIPIKKKNLKHKDEERILKYDLIKDKRYTVDQFQFHVPITMNFKADGNGNINQKAIDYLRSASDTHIIGIDRGERNLLYLVVIDGNGKICEQFSLNEIPMR

SEQ ID NO: 1653 - protein, 886 aa, Unknown
  Description of Unknown: uncultivated organism sequence
  Category: MG75 effectors
  Description: MG75-139 effector
METFSGFTNLYPLSKTLRFRLIPVGETLKHFIGSGILEEDQHRAESYVKVKAIIDDYHRTYIENSLSGFELPLESTGKFNSLEEYYLYHNIRNKTEEIQNLSSKVRTNLRKQVVTQLTKNEIFKRIDKKELIQSDLIDFVKNEPDANEKIALISEFRNFTVYFKGFHENRRNMYSDEEKSTSIAFRLIHENLPKFIDNMEVFAKIQNTSISENFDAIQKELCPELVTLCEMFKLGYFNKTLSQKQIDAYNTVIGGKTTSEGKKIKGLNEYINLYNQQHKQEKLPKMKLLFKQILSDRESASWLLEKFENDSQVVGAMVNFWNTIHDTVLAEGGLKTIIASLGSYGLEGIFLKNDLQLTDISQKATGSWSKISSEIKQKIEAMNPQKKKESYESYQERIDKLFKSYKSFSLAFVNECLRGEYKIEDYFLKLGAVNSSLLQKENHFSHILNTYTDVKEVIGFYSESTDTKLIQDNDSIQKIKQFLDAVKDLQAYVKPLLGNSDETGKDERFYGDLIEYWSLLDLITPLYNMVRNYVTQKPYSVDKIKINFQNPTLLNGWDLNKEMDNTSVILRRDGKYYLAIMNNKSRKVFLKYPSGTDRNCYEKMEYKLLPGANKMLPKVFFSKSRINEFMPNERLLSNYEKGTHKKSGTCFSLDDCHTLIDFFKKSLNKHEDWKNFGFKFSDTSTYEDMSGFYKEVENQGYKLSFKPIDATYVDQLVDEGKIFLFQIYNKDFSEHSKGTPNMHTLYWKMLFDETNLGDVVYKLNGEAEVFFRKASINVSHPTHPANIPIKKKNLKHKDEERILKYDLIKDKRYTVDQFQFHVPITMNFKANGNGNINQKAIDYLRSASDTHIIGIDRGERNLLYLVVIDGNGKICEQFSLNEIPMR

SEQ ID NO: 1654 - protein, 1012 aa, Unknown
  Description of Unknown: uncultivated organism sequence
  Category: MG75 effectors
  Description: MG75-140 effector
METFSGFTNLYPLSKTLRFRLIPVGETLKYFIGSGILEEDQHRAESYVKVKAIIDDYHRAYIENSLSGFELPLESTGKFNSLEEYYLYHNIRNKTEEIQNLSSKVRTNLRKQVVAQLTKNEIFKRIDKKELIQSDLIDFVKNEPDANEKIALISEFRNFTVYFKGFHENRRNMYSDEEKSTSIAFRLIHENLPKFIDNMEVFAKIQNTSISENFDAIQKELCPELVTLCEMFKLGYFNKTLSQKQIDAYNTVIGGKTTSEGKKIKGLNEYINLYNQQHKQEKLPKMKLLFKQILSDRESASWLPEKFENDSQVVGAIVNFWNTIHDTVLAEGGLKTIIASLGSYGLEGIFLKNDLQLTDISQKATGSWGKISSEIKQKIEVMNPQKKKESYETYQERIDKIFKSYKSFSLAFINECLRGEYKIEDYFLKLGAVNSSSLQKENHFSHILNTYTDVKEVIGLYSESTDTKLIQDNDSIQKIKQFLDAVKDLQAYVKPLLGNGDETGKDERFYGDLIEYWSLLDLITPLYNMVRNYVTQKPYSVDKIKINFQNPTLLNGWDLNKETDNTSVILRRDGKYYLAIMNNKSRKVFLKYPSGTDRNCYEKMEYKLLPGANKMLPKVFFSKSRINEFMPNERLLSNYEKGTHKKSGTCFSLDDCHTLIDFFKKSLDKHEDWKNFGFKFSDTSTYEDMSGFYKEVENQGYKLSFKPIDATYVDQLVDEGKIFLFQIYNKDFSEHSKGTPNMHTLYWKMLFDETNLGDVVYKLNGEAEVFFRKASINVSHPTHPANIPIKKKNLKHKDEERILKYDLIKDKRYTVDQFQFHVPITMNFKADGNGNINQKAIDYLRSASDTHIIGIDRGERNLLYLVVIDGNGKICEQFSLNEIEVEYNGEKYSTNYHDLLNVKENERKQARQSWQSIANIKDLKEGYLSQVIHKISELMVKYNAIVVLEDLNAGFMRGRQKVEKQVYQKFEKKLIEKLNYLVFKKQSSDLPGGLMHAYQLANKFESLVDDKI

SEQ ID NO: 1655 - protein, 982 aa, Unknown
  Description of Unknown: uncultivated organism sequence
  Category: MG75 effectors
  Description: MG75-141 effector
MIKEFEDFKRLYPIQKTLRFEAKPIGSTLEHLVKSGILDEDEHRAASYVRVKKLIDEYHKAFIDRVLNDGCLPFKNKGEKNSIEEYYESYTSKDKEEDSKKRFKEIQQNLRSIIVNKLTKDKAYANLFGNYLIESHKDKEDKKTMIDSDLIQFIKDADSLELGSMSKDEAIELVKEFWSFTTYFVGFYDNRKNMYSAEEKSTAIAYRLINENLPKFIDNMEAFKKIISRPEIQANTEQLYSDFAEYLNVESIQEMFQLDYYDILLTQKQIDVYNAIIGGKTDEKHDIKTKGINEYINLYNQQHKEDKLPKLKVLFKQILSDRNAISWLPEEFNSDQEMLISIKDCYEKLCVNVLGDKVLKSLLSSLDDYELEGIFLQNDQQLTNISQKIFGSWSVIQEAIIRNIKNTAPARKHKETEEDYEKRIFSIFKQAGSFSIKYIDDCLYDLDKNNINTIENYFATLGAENTPEIQRENLFALIKNAYTDVAGLLCSEYPTEKNLSQDENHVAKIKALLDAIKSLQHFVKPLLGNGDEHDKDERFYGELVSLWTELDTVTPLYNMVRNRITQKPYSQKKIKLNFENPQLLGGWDANKEKDYSCIILRREGMYYLAIMDKDSRKLLGKEMPSDGECYEKMVYKLLPGANKMLPKVFFAKSRIEEFMPSEQIIEKYNNGTHKKGKDFNITDCHNLIDYFKQSINKHEDWSKFGFTFSETSTYEDLSGFYREVEQQGYKLSFTNVSASYINSLVDEGKMYLFQIYNKDFSEYSKGTPNMHTLYWKALFDEQNLADVVYKLNGQAEIFYRKKSIDATHPTHPANRPVQNKNKDNKKKESLFEYDLIKDRRYSVDKFMFHVPITMNFKSNGSENINQQVKEYLQLANDTHIIGIDRGERHLLYLVVIDMHGNIKEQFSLNEIVNTYKGNIYHTNYHDLLEAREEERLKARQSWQTIENIKELKEGYLSQVVHKITQLMVKYHAIVVLEDLRVT

SEQ ID NO: 1656 - protein, 1228 aa, Unknown
  Description of Unknown: uncultivated organism sequence
  Category: MG75 effectors
  Description: MG75-142 effector
MSNLYSKCHKLYSLSKTLRFELKPIGKTNENFENYILTSDKEKSEKFKKVKLYCDEYHKKFINDCLENFQNEKFVEVLNKYYELYVKNNRSDKENNEFEKIQELLRKIIAETFTKNKKYNGLFGKELFKNYLPEYYKNDEEKLSEIKLFSEFTTYFAGYNKNRENMYSAEEKTTAISYRLINQNLPTYIKNIQNYNKIKEYIPTINETISHKLQVDIEKYFNLEYFENILTQDAIDKYNYIIGGKALGDGTKIQGINEFINLYNQTNPDKKLPKLKVLYKQILSDKTNVSFKIDKIENDNELISLINNYYNILSPLLYSNDNNDTEFIKTIKDINQFDTNKIWVMTDNLTYLSQQVYKDWNYINHLIEEKYNQENLKNNKKINEKFLEKRDKELKKIKEYSLHDIEQLIIQNDKNLKIKNQGKLYKYITEKTIEIINNIKLSHSECEYILNTNYEPNSKQLLNDADKITKIKTLLDNVKLLQTTIKFLIPKSVGIQVDDTFYNAINYDILSEIIPIYNKTRNYVTQKPYSIEKFPLTFNCPTLLDGWDLNKEESNLSILLEKDGYYYLGIMNKKDNKIFRKLSEPQSNEQIYKKYEYKLLPGPNKMLPKVFFSNSRIDEFNPSEELLRKYQEGCHKKGNNFDIIFCRELIDFYKKSLFIHNDWKQFNFKFNNTNSYEDISQFYKQVEEQGYKISTQNISVQYIDELVENGKLFLFKIYNKDFSTYSKGTPNLHTMYWKALFDEDNLKDVVYKLNGGAEIFYRKKSIEYKITHPKNQAIKNKNELNHKKESLFQYDLIKDKRFTMDKFLFHVPITLNFKNQRLEYINELINSEIQRKTDINIIGVDRGERNLIYITVIDSNGKLLEQLSLNEIINEYKNETYKTDYHSLLDKKEKERNEARKSWGTIKNIKELKEGYMSQVIHKITDLMLKYNAIIVLEDLNSGFKNSRKKVEKQVYDKFETMLTNKLSYLINKKLDKNNDGGILNAYQLVNKETKGRQSGVLFYIPAWNTSKIDPVTGFVNLFYIKNMSIDKSKEFFNKFEDIRYNTKEDFFEFDIDYSKFTDKVYGIRKNWTICTYGERIRTFKNKDKNNEWDNEEINLTEKFKNLFNQYSINLSNIQEDIQKQTDRNFFNEIIYLFKLTLQMRNSVTNSDIDYILSPIKDKNGNFYDSRNKIDTLPKDADANGAYNIARKGLMLVNQIKQANDITKFKCKPITNAEWLEFVQKKDT

SEQ ID NO: 1657 - protein, 1238 aa, Unknown
  Description of Unknown: uncultivated organism sequence
  Category: MG75 effectors
  Description: MG75-143 effector
MSNLYSNLHNLYQVQKTLRFELKPQGKTKENMEKVGILKADEHRAEIYSKVKKYCDEYHKLFIDKSLSNIELNGIDRYYELYSINNRDDKQKEELDQLEASLRKQISDAFKKSAEYKGLFQKDIITSYLVTMYKENQEKMQDIGEFNRFTTYFTGYNKNRENMYSEEDKSTAISYRLINENLPTFIDNIKIYKKIVSLMPEDIEKIYKDLEEYIQVDSIDEIFNISYYNDVLTQRGIECYNILISGRTKNDGDKIKGLNEYINEFNQTHNEKIPKLQELYKQILSDAESASFKIDVIKNDKELMNLIEVYYANILPILNKIEDLFTRISNYNLELILVNNDGTLSTLSNMVFNEWSYIKGAISEKYDEEYSGKEKYGTEKYAQKKQEYLKKQKIYSLKFLNDCIGNNAICEYLKNYIIQNKNIETIKEDYNEVQNIKVEDDTKELIKDEKSIEKIKKFLDDVKSLQEFVKLVIPKDRTVEKDAKFYSELTPYYEKIKEIIPLYNKVRNYVTQKPYSTEKIKLNFECPTLLKGWDANKEEANLGVILLKEGKYYLGIINPYCKKIFEVDEKDSNEQNNYKKMEYKLLPGPNKMLPKVFFSNSRIEEFNPSKELQEKYNKGYHKKGKDFDINFCHELIDFYKQSVNKHEDWKKFNFKFKDTSEYNDISEFYREVEKQGYKIEYTEYSEKYINELVDRGELYLFQIYNKDFSEYSKGKENLHTLYWKAVFDPDNIMNPVYKLNGNAEVFYRKKSLEMKVTHPANQPIANKNISTIEAGRSTSTFKYDLIKDKRYTMDKFQFHVPITMNFKSERLFNINQIVNKYLKYNDDIHVIGIDRGERNLLYVCVIDKNEKIVYQKSLNEIVSEYNNNRYTTDYHGLLDRKEKEREIAREDWKNIENIKELKEGYMSQVIHILVELMKKYNAIIVIEDLNKGFKNSRIKVEKQVYQKFEKMFIDKLNYLVFKDEDKMNEGGVLNAYQLTNKFESFTKLGKQSGILYYIPAWCTSKIDPTTGFINRFYLKYENFDKSKEFVNRIDDIRYNEKENLFEFDIDYSKFTDRLNDTKNKWTLCSYGERILTQKNANGEWLDRRIQLSIEFKKLFEKYGINLNNIKDSILKLDKDNLEFYKGNGESLGFIQLFKLMVQMRNSLTGKEEDNLISPVKNQHGKFFNTSEKIEGLPIDADANGAYNIARKGFMLVEQMKNVEDEKLNKIKYNITEKEWLNYVQNRGMWWKRQYLYHI

SEQ ID NO: 1658 - protein, 1286 aa, Unknown
  Description of Unknown: uncultivated organism sequence
  Category: MG75 effectors
  Description: MG75-144 effector
MKQKKTQNPFNQFIGLYPLSKTLRFELRPYNEKTKNNIISAGILAEDNHRAESYKKVKKIIDEYHKAFIERVLKDLVLEEKPLQAFYECYKKSSKEEALQEIGNNLRTQISNAFEKDPKYSTLTSKDLINKELPSIVTTEEERTLLEEFHGFSTYFVGFHQNRENMYSDEEKATSIAYRLINENLPKFIDNIRSFQKIADSPIADKLESIYDEYAKEGYMNVNTLNEMFEISFYNRVLTQTQIDLYNAIIGGKTEKDGHKTQGINEYINLYNQRGEVQKKDRLPLLKPLFKQILSDREHISWFEEGFADDQAMLNAIKDFYLELTETGPTTTESILDRTKSLLRTIADYDLTKIYLGYNSLSKISQQIFGEWDRIQRALEAEYDQREKTKTYEEKEKHFKSLKSVSIGFIDDCLKAFETDKQLSLSIKEYIAQLGKKNDDPDLIDRITASYKAVKAILTTEWPKERNIAQEKDIVALIKDLLDRIKDLQSFIKPLLGSGKESDKDNLFYGELASIWETINTVTPLYDKVRNRMTRKPYSTQKFKVNFRNSQLLKGWDLNKEKDYMGIILRKKDLYFLAIMNKKNTKVFSSKVPSQGECFEKMIYKQFDATKQVPKCSTELKRVKEAIEIDDKPYYELFDKQKFSKPLTITREIWQLNNLVWDKKTNSFVRRKKDETRPKKFQQEYLDITEDREGYCEALRKWIDFVKDFLASYKSTSIYNIKYKDSSEYASIKEFYNFLDQELYHIEFSNVSVDYINELIEEGKIYLFQIYNKDFSPHSKGTPNMHTLYWKTLFDERNLANVAYKLNGEAEIFFRKASLERKVTHPAHDPIKTKNPKTSIKEKAFAYDLIKDKRYTEDKFQLHVPITMNFKSPMEKKGINSRVNNYIKTAEDLHFIGIDRGERNLLYVCVIDSQGNIKDQYSLNEIVNQYNRTDYKYLLEKREEERDKERKSWQTIENIKDLKQGYLSQVVHKIAQLMVQYHAIVVLEDLNSGFKRSRQKVEKSVYQQFEKSLIDKLNYLIDKRLPIDEEGGVLRAYQLTNKFESFKTMKMQNGFLFYIPAWNTSKMDPTTGFVNLFDTRYTNIDKSKEFFDKFEAIRYNEGKDWFELEFDYEHFTTKAEGTQTQWTLCTWGERINTFRNKSKNSSWDYKKINLTEEYKTLFEQFSINYRGNLKKEILEQNSKDFFERLLSLLHLTLQMRNSIPNTDTDYLISPVADANGHFYYSEQCGDNLPKNADANGAYNIARKGMWMAEQIRRSNEGEELKLAISNKEWLRFAQEKPYLEDK

SEQ ID NO: 1659 - protein, 1228 aa, Unknown
  Description of Unknown: uncultivated organism sequence
  Category: MG75 effectors
  Description: MG75-145 effector
MSNLYSKCHKLYSLSKTLRFELKPIGKTKENFENYILTSDEEKSEKFKKVKLYCDEYHKKFINDCLENFQNDKFIEVLNKYYELYIKNNRSDKENNEFEKTQELLRKIIAETFTKNKKYSGLFGKELFKNYLPEYYKNDKEKLSEIKLFSEFTTYFAGYNKNRENMYSAEEKTTAISYRLINQNLPTYIKNIQNYNKIKEHIPTINETISHKLQVDIEKYFNLEYFENILTQDAIDKYNYIIGGKSLDDGTKIQGINEFINLYNQTNPDKKLPKLKILYKQILSDKTNISFKIDKIENDSELIYLINNYYNILSPLIYSNDNKDTGFIKTIKDITQFDTNKIWVMTDNLTYLSQQVYKDWNYINHLIEEKYNQENLKNNKKINEKFLEKRDKELKKIKEYSLHDIEQLIIQNDKNLKIKNQGKLYKYITEKTIEIINNIKLSHSECEYILNTNYEPNSKQLLNDTDKITKIKTLLDNIKLLQTTIKFLIPKSVGIQIDDTFYNAINYDILSEIIPIYNKTRNYVTQKPYSIEKFPLTFNCPTLLDGWDLNKEESNLSILLEKDGYYYLGIMNKKDNKIFRKLPEPQSNEQIYKKYEYKLLPGPNKMLPKVFFSNSRIDEFNPSEELLRKYQEGRHKKGNNFDIIFCRELIDFYKKSLFIHNDWKLFNFKFNDTNSYEDISQFYKQVEEQGYKISTQNISTRYIDELVENGKLFLFQIYNKDFSTYSKGTPNLHTMYWKELFDEDNLKDVVYKLNGGAEIFYRKKSIEDKITHPKNQTIKNKNELNHKKESLFQYDLIKDKRFTMDKFLFHVPITLNFKNQKLEYINELINSEIQRKTDINIIGVDRGERNLIYITVIDSNGKLLEQLSLNEIINEYKNETYKTDYHSLLDKKEKERNEARKSWGTIKNIKELKEGYMSQVIHKITDLMIKYNAIIVLEDLNSGFKNSRKKVEKQVYDKFETMLTNKLSYLIDKKLDKNNDGGILNAYQLVNKETKGRQSGVLFYIPAWNTSKIDPVTGFVNLFYIKNMSIDKSKEFFNKFEDIRYNTKEDFFEFDIDYSKFTDKVYGIRKNWTICTYGERIRTFRNKDKNNEWDNEEINLTEKFKNLFNQYSINLSNIQEDIQKQTDRNFFNEIIYLFKLTLQMRNSVTNSEIDYILSPIKDKNGNFYDSRNRIDTLPKDADANGAYNIARKGLMLVNQIKQANDITKFKCKPITNAEWLEFVQKKDI

SEQ ID NO: 1660 - protein, 1250 aa, Unknown
  Description of Unknown: uncultivated organism sequence
  Category: MG75 effectors
  Description: MG75-146 effector
MQFQDFTNQYAVSKTLSFELIPQGRTLEHVEAKGLLSEDEHRSESYKTVKTVIDRYHKQFIEEALSGFELDELETYQTLYNIANKTSEDQKCFIAIQDTMRKSIVKHIKQHPKFSILDKKELIRDELFTYCENDAEKAMVLEFYKFTTYFSGFNDNRKNMYSDEEKSTAIAYRIVHQNLPKFIDNLKTFSLISNVLSENIKTLNTELQNVLGNMIINDIFALNFFNQTLTQKGIDRYNTLLGGFTDQNNPKKKIKGLNEYINQYNQTLPKTGKIGKLKPLYKQILSDRESISFLPETLQTGQDVLTALRCYYESNLADVINEYGNDGKTLKEVFENLSNYDLSGVFIRNDASIADVSQKIFGNWNIIQQAFDLRYDQTYTGKKSKKPEKYEDERKKYFKNIQSFSIESINEALTYLNDKTKHKQIEKFFSGLGIRENKNNLITIINKAYEDLEKVLGIPYPTDKELSQDTRTVEKIKTFLDSVKALQWFTKLILGKGTEPNKDSLFYGDLLPLWNEIDKITPLYNSIRNYMTKKPYSTEKIKLNFQNATLLAGWDVNQERANTSLIFLKNGLYYLGIMDQEYNKSFIDLPVLPMTTADDVYQKMEYKQLPGPEKMLPKVFFSKARIDEFAPSERVLEIYKNGTFKKGDDFKLEDCHELIEFYKRAIAQHPAWNQFNHQFSKTSAYQNIGEFYNDVKQQGYKITYRDVPVEYMNQLINDGQLYLFQIYNKDFSPHSKGTPNMHTLYWKMIFDEQNLNDVVYKLDGGAEVFYRKASPGIKKTPTHPKNQAVANKNPLNPKKESIFDYDLIKNKRFTMDKFLLHVPIKMNFKANPMTNLNMSVRSYLKTQRKTNIIGIHRGERNLLYVAVINEKGEILEQQSLNTIMNKNNDISHTTDYHDLLDRKEKERDTARKNWQTIENIKELKEGYLSQVIHKITQLMVKYQAIVVVEDLDMGFMQGRQKVEKQVYQKFEKMLISKLQYLVDKKAPIKQPGGLLKALQLTKNETAGQGKNSYEKQNGFLFYVPAWNTSSIDPTTGFVNLFKSSDLRYESINKSKTFINLIDKMQYSTSAQHFEFNIDYDKFTEKAQGTRTDWMICTHGKRIRSFRNAETNNQWCTEEIDLTQAFRQLLDDNEIDYQSQTLKEDILQMNTRAFFVAFLDIFRLILQLRNRKENGDYLISPVKNSTGEFFDSRDKRNGLPENEDANGAYNIARKGAWIIDAIKDADDDKLNRVKMTMSNKDWLTYAQAHLI

SEQ ID NO: 1661 - protein, 1255 aa, Unknown
  Description of Unknown: uncultivated organism sequence
  Category: MG75 effectors
  Description: MG75-147 effector
MTLIIKYKESKNKREVYMSNLYSNLHNLYQVQKTLRFELKPQGKTKENMEKVGILEADEHRAEIYSKVKKYCDEYHKLFIDKSLSNIELNGIDRYYELYSINNRDDKQKEELDQLETGLRKQISDAFKKSAEYKGLFQKDMITSYLVTMYKENQEKMQDIGEFNRFTTYFTGYNKNRENMYSEEDKSTAISYRLINENLPTFIDNIKIYKKIVSLMPEDIEKIYKDLEEYIQVDSIDEIFNISYYNDVLTQRGIECYNILISGRTKNDGDKIKGLNEYINEFNQTHNEKIPKLQELYKQILSDAESASFKIDVIKNDKELMNLIEVYYANILPILNKIEDLFTRISNYNLELILVNNDGTLSTLSNMVFNEWSYIKGAISEKYDEKYSGKEKYGTEKYAQKKQEYLKKQKIYSLKFLNDCIGNNAICEYLKNYIIQNKNIETIKEDYNEVQNIKVEDDTKELIKDEKSIEKIKKFLDDVKSLQEFVKLVIPKDRTVEKDAKFYSELTPYYEKIKEIIPLYNKVRNYVTQKPYSTEKIKLNFECPTLLNGWDANKEEANLGVILIKEGKYYLGIINPYCKKIFEIDEKDSNEQKNYKKMEYKLLPGPNKMLPKVFFSNSRIEEFNPSKELQEKYNKGYHKKGKDFDINFCHELIDFYKMSLNKHEDWKKFNFKFKDTSEYNDISEFYREVEKQGYKIEYTEYSEKYINELVDRGELYLFQIYNKDFSEYSKGKENLHTLYWKAVFDPDNIMNPVYKLNGNAEVFYRKKSLEMKVIHPANQPIANKNISTIEAGRSTSTFKYDLIKDKRYTMDKFQFHVPITVNFKSERLFNINQIVNKYLKYNDDIHVIGIDRGERNLLYVCVIDKNEKIVYQKSLNEIVSEYNNNRYTTDYHGLLDRKEKEREIAREDWKNIENIKELKEGYMSQVIHILVELMKKYNAIIVIEDLNKGFKNSRIKVEKQVYQKFEKMFIDKLNYLVFKDEDKMNEGGVLNAYQLTNKFESFTKLGKQSGILYYIPAWCTSKIDPTTGFINRFYLKYENFDKSKEFVNRIDDIRYNEKENLFEFDIDYSKFTDRLNDTKNKWTLCSYGERILTQKNANGEWFDRRIQLSIEFKKLFEKYGINLNNIKDSILKLDKDNLEFYKGNGESLGFIQLFKLMVQMRNSLTGKEEDNLISPVKNRHGKFFNTSEKIEGLPIDADANGAYNIARKGFMLVEQMKNVEDEKLNKIKYNITEKEWLNYVQNRGMWWKRQYLYHI

SEQ ID NO: 1662 - protein, 1236 aa, Unknown
  Description of Unknown: uncultivated organism sequence
  Category: MG75 effectors
  Description: MG75-148 effector
MKQLSELTGLYSLSKTLRFELKPIGKTLEHIESKGLIAQDEQRAEEYKKVKDIIDRYHKKFITMCLSDFKFEQNSLETYVALAEDTNRDEKAFDEIKKTLRKQIVETFKKGGAYSDLFKKKLIQKHLPEFVSDEEEKKMIANFSKFTTYFNGFNENRKNMYSDEDKSTAIAYRLIHENLPMFVNNMKSFSRIADSDVHQHFTEIESSFSEYLGVEHLEEMFQLDYFSETLTQEQIAVYNHIIGGRALEDGTKLKGINEYVNLYNQQHKNSRLPLLKPLYKMILSDRVALPWFPSEEFASDEEMIRAINETYNTLKEVLSIDGDSSLRSLLLNISSYDIKHIYIANDLGLTDISQQMFGQYDVYTSAIKQELREKNAPTAKERRNPELYDERINKLFKSAKSFSIEHLNSLVDSEHTIQNYYKHLGAYDRNGEQRVNLFTQIEMAYVAAKEILSGKHGNISQSDAETAIIKGLLDAFKSLQRFIKPLLGNGEEADKDNEFDAKLREAWNTLDIVTPLYNKVRNWLTRKPYSTEKIKLNFENAQLLGGWDVNKEPDCTSILLRKNGLYYLAIMNKKYNHAFDIDNLPNDGKCYEKIDYKLLPGANKMLPKVFFSKSRIKEFAPSEIIVNAYKKGSHKKGANFSISDCRRLIDFFKASISKHEDWKNFPFSFSSTETYEDISGFYREVEQQGYMLGFRNVSESFIKQLVDEGKLYLFQIWNKDFSDFSKGTPNMHTLYWKMLFDEHNLANVVYKLNGQAEVFYRKSSLDVANTTIHKAHQPIMNKNQENKKRQSTFDYDIIKNRRYTVDKFQFHVPISINFKATGRDNVNDNVLDIIRNGGIKHIIGIDRGERHLLYLSLIDLKGNIVKQMTLNDIVNEYNGNTYATNYKNLLAEREGNRTEARKNWKKIENIKDIKKGYLSQVVHIISKMMVEYNAIVVLEDLNMGFMRGRQKIERSVYEQFEKMLIDKLNYYVDKQKNSDEAGGLLHALQLTSKFESFKKLGKQSGCLFYIPAWNTSKIDPVTGFVNLFDTRYTNADQARKFFSQFDSIRYNADKDWFEFAFDYNKFTAKAKGTRTKWTLCTYGTRIRTFRNSERLNQWDNEEVVLTDEFKKAFANADINIHGNLKEAICSLQDKKYLEPLMHLMKLLLQMRNSITNSEVDYLLSPVADENGTFYDSRICSASLPKDADANGAYNIARKGLWAIHQIQETPAGDRPNLAIKNKDWLNFAQQKPYMNE

SEQ ID NO: 1663 - protein, 1245 aa, Unknown
  Description of Unknown: uncultivated organism sequence
  Category: MG75 effectors
  Description: MG75-149 effector
MTLIIKYKESKNKREVYMSNLYSNLHNLYQVQKTLRFELKPQGKTKENMEKVGILEADEHRAEIYSKVKKYCDEYHKLFIDKSLSNIELNGIDRYYELYSINNRDDKQKEELDQLEASLRKQISDAFKKSAEYKGLFQKDIITSYLVTMYKENQEKMQDIGEFNRFTTYFTGYNKNRENMYSEEDKSTAISYRLINENLPTFIDNIKIYKKIVSLMPEDIEKIYKDLEEYIQVDSIDEIFNISYYNDVLTQRGIECYNILISGRTKNDGDKIKGLNEYINEFNQTHNEKIPKLQELYKQILSDAESASFKIDVIKNDKELMNLIEVYYANILPILNKIEDLFTRISNYNLELILVNNDGTLSTLSNMVFNEWSYIKGAISEKYDEEYSGKEKYGTEKYAQKKQEYLKKQKIYSLKFLNDCIGNNAICEYLKNYIIQNKNIETIKEDYNEVQNIKVEDDTKELIKDEKSIEKIKKFLDDVKSLQEFVKLVIPKDRTVEKDAKFYSELTPYYEKIKEIIPLYNKVRNYVTQKPYSTEKIKLNFECPTLLNGWDANKEEANLGVILLKEGKYYLGIINPYCKKIFEVDEKDSNEQNNYKKMEYKLLPGPNKMLPKVFFSNSRIEEFNPSKELQEKYNKGYHKKGKDFDINFCHELIDFYKQSLNKHEDWKKFNFKFKDTSEYNDISEFYREVEKQGYKIEYTEYSEKYINELVDRGELYLFQIYNKDFSEYSKGKENLHTLYWKAVFDPDNIMNPVYKLNGNAEVFYRKKSLEMKVTHPANQPIANKNISTIEAGRSTSTFKYDLIKDKRYTMDKFQFHVPITMNFKSERLLNINQIVNKYLKYNDDIHVIGIDRGERNLLYVCVIDKNEKIVYQKSLNEIVSEYNNNRYTTDYHGLLDRKEKEREIAREDWKNIENIKELKEGYMSQVIHILVELMKKYNAIIVIEDLNKGFKNSRIKVEKQVYQKFEKMFIDKLNYLVFKDEDKMDEGGVLNAYQLTNKFESFTKLGKQSGILYYIPAWCTSKIDPTTGFINRFYLKYENFDKSKEFVNRIDDIRYNEKENLFEFDIDYSKFTDRLNDTKNKWTLCSYGERILTQKNANGEWFDRRIQLSIEFKKLFEKYGINLNNIKDSILKLDKDNLEFYKGNGESLGFIQLFKLMVQMRNSLTGKEEDNLISPVKNQHGKFFNTSEKIEGLPIDADANGAYNIARKGFMLVEQMKNVEDEKLNKIKYNITEKEWLNYVQNRGM

SEQ ID NO: 1664 - protein, 1245 aa, Unknown
  Description of Unknown: uncultivated organism sequence
  Category: MG75 effectors
  Description: MG75-150 effector
MTLTIKYKESKNKREVYMSNLYSNLHNLYQVQKTLRFELKPQGKTKENMEKVGILEADEHRAEIYSKVKKYCDEYHKLFIDKSLGNIELNGIDRYYELYSINNRDDKQKEELDQLEASLRKQISDAFKKSAEYKGLFQKDIITSYLVTMYKENQEKMQDIGEFNRFTTYFTGYNKNRENMYSEEDKSTAISYRLINENLPTFIDNIKIYKKIVSLMPEDIEKIYKDLEEYIQVDSIDEIFNISYYNDVLTQRGIECYNILISGRTKNDGDKIKGLNEYINEFNQTHNEKIPKLQELSKQILSDAESASFKIDVIKNDKELMNLIEVYYANILPILNKIEDLFTRISNYNLELILVNNDGTLSTLSNMVFNEWSYIKGAISEKYDEKYSGKEKYGTEKYAQKKQEYLKKQKIYSLKFLNDCIGNNAICEYLKNYIIQNKNIETIKEDYNEVQNIKVEDDTKELIKDEKSIEKIKKFLDDVKSLQEFVKLVIPKDRTVEKDAKFYSELTPYYEKIKEIIPLYNKVRNYVTQKPYSTEKIKLNFECPTLLNGWDANKEEANLGVILIKEGKYYLGIINPYCKKIFEVDEKDSNEQNNYKKMEYKLLPGPNKMLPKVFFSNSRIEEFNPSKELQEKYNKGYHKKGKDFDINFCHELIDFYKQSLNKHEDWKKFNFKFKDTSEYNDISEFYREVEKQGYKIEYTEYSEKYINELVDRGELYLFQIYNKDFSEYSKGKENLHTLYWKAVFDPDNIMNPVYKLNGNAEVFYRKKSLEMKVIHPANQPIANKNISTIEAGRSTSTFKYDLIKDKRYTMDKFQFHVPITVNFKSERLFNINQIVNKYLKYNDDIHVIGIDRGERNLLYVCVIDKNEKIVYQKSLNEIVSEYNNNRYTTDYHGLLDRKEKEREIAREDWKNIENIKELKEGYMSQVIHILVELMKKYNAIIVIEDLNKGFKNSRIKVEKQVYQKFEKMFIDKLNYLVFKDEDKMNEGGVLNAYQLTNKFESFTKLGKQSGILYYIPAWCTSKIDPTTGFINRFYLKYENFDKSKEFVNRIDDIRYNEKENLFEFDIDYSKFTDRLNDTKNKWTLCSYGERILTQKNANGEWLDRRIQLSIEFKKLFEKYGINLNNIKDSILKLDKDNLEFYKGNGESLGFIQLFKLMVQMRNSLTGKEEDNLISPVKNRHGKFFNTSEKIEGLPIDADANGAYNIARKGFMLVEQMKNVEDEKLNKIKYNITEKEWLNYVQNRGM

SEQ ID NO: 1665 - protein, 1255 aa, Unknown
  Description of Unknown: uncultivated organism sequence
  Category: MG75 effectors
  Description: MG75-151 effector
MTLTIKYKESKNKREVYMSNLYSNLHNLYQVQKTLRFELKPQGKTKENMEKVGILEADEHRAEIYSKVKKYCDEYHKLFIDKSLGNIELNGIDRYYELYSINNRDDKQKEELDQLEASLRKQISDAFKKSAEYKGLFQKDIITSYLVTMYKENQEKMQDIGEFNRFTTYFTGYNKNRENMYSEEDKSTAISYRLINENLPTFIDNIKIYKKIVSLMPEDIEKIYKDLEEYIQVDSIDEIFNISYYNDVLTQRGIECYNILISGRTKNDGDKIKGLNEYINEFNQTHNEKIPKLQELSKQILSDAESASFKIDVIKNDKELMNLIEVYYANILPILNKIEDLFTRISNYNLELILVNNDGTLSTLSNMVFNEWSYIKGAISEKYDEKYSGKEKYGTEKYAQKKQEYLKKQKIYSLKFLNDCIGNNAICEYLKNYIIQNKNIETIKEDYNEVQNIKVEDDTKELIKDEKSIEKIKKFLDDVKSLQEFVKLVIPKDRTVEKDAKFYSELTPYYEKIKEIIPLYNKVRNYVTQKPYSTEKIKLNFECPTLLNGWDANKEEANLGVILIKEGKYYLGIINPYCKKIFEVDEKDSNEQNNYKKMEYKLLPGPNKMLPKVFFSNSRIEEFNPSKELQEKYNKGYHKKGKDFDINFCHELIDFYKQSLNKHEDWKKFNFKFKDTSEYNDISEFYREVEKQGYKIEYTEYSEKYINELVDRGELYLFQIYNKDFSEYSKGKENLHTLYWKAVFDPDNIMNPVYKLNGNAEVFYRKKSLEMKVIHPANQPIANKNISTIEAGRSTSTFKYDLIKDKRYTMDKFQFHVPITVNFKSERLFNINQIVNKYLKYNDDIHVIGIDRGERNLLYVCVIDKNEKIVYQKSLNEIVSEYNNNRYTTDYHGLLDRKEKEREIAREDWKNIENIKELKEGYMSQVIHILVELMKKYNAIIVIEDLNKGFKNSRIKVEKQVYQKFEKMFIDKLNYLVFKDEDKMNEGGVLNAYQLTNKFESFTKLGKQSGILYYIPAWCTSKIDPTTGFINRFYLKYENFDKSKEFVNRIDDIRYNEKENLFEFDIDYSKFTDRLNDTKNKWTLCSYGERILTQKNANGEWLDRRIQLSIEFKKLFEKYGINLNNIKDSILKLDKDNLEFYKGNGESLGFIQLFKLMVQMRNSLTGKEEDNLISPVKNRHGKFFNTSEKIEGLPIDADANGAYNIARKGFMLVEQMKNVEDEKLNKIKYNITEKEWLNYVQNRGMWWKRQYLYHI

SEQ ID NO: 1666 - protein, 1236 aa, Unknown
  Description of Unknown: uncultivated organism sequence
  Category: MG75 effectors
  Description: MG75-152 effector
MKQLSELTGLYSLSKTLRFELKPIGKTLEHIESKGLIAQDEQRAEEYKKVKDIIDRYHKKFITMCLSDFKFEQNSLETYVALAEDTNRDEKAFDEIKKTLRKQIVETFKKGGSYSDLFKKELIQKHLPEFVSDEEEKKMIANFSKFTTYFNGFNENRKNMYSDEDKSTAIAYRLIHENLPMFVNNMKSFSRIADSDVHQHFTEIESSFSEYLGVEHLEEMFQLDYFSETLTQEQIAVYNHIIGGMALEDGTILKGINEYVNLYNQQHKNSRLPLLKPLYKMILSDRVALPWFPSEEFASDEEMIRAINETYNTLKEVLSIDGDSSLRSLLLNISSYDIKHIYIANDLGLTDISQQMFGQYDVYTSAIKQELRKKNAPTAKERRNPELYDERINKLFKSAKSFSIEHLNSLVDSEHTIQNYYKHLGAYDRNGEQRVNLFTQIEMAYVAAKEILSGKHGNISQSDAETAIIKGLLDAFKSLQRFIKPLLGNGEEADKDNEFDAKLREAWNTLDIVTPLYNKVRNWLTRKPYSTEKIKLNFENAQLLGGWDVNKEPDCTSILLRKDGLYYLAIMNKKYNHAFDIDNLPNDGKCYEKIDYKLLPGANKMLPKVFFSKSRIKEFAPSEIIVNAYKKGSHKKGANFSISDCRRLIDFFKASISKHEDWKNFPFSFSSTETYEDISGFYREVEQQGYMLGFRNVSESFIKQLVDEGKLYLFQIWNKDFSDFSKGTPNMHTLYWKMLFDEHNLANVVYKLNGQAEVFYRKSSLDVANTTIHKAHQPIMNKNQENKKRQSTFDYDIIKNRRYTVDKFQFHVPISINFKATGRDNVNDNVLDIIRNGGIKHIIGIDRGERHLLYLSLIDLKGNIVKQMTLNDIVNEYNGNTYATNYKNLLAEREGNRTEARKNWKKIENIKDIKKGYLSQVVHIISKMMVEYNAIVVLEDLNMGFMRGRQKIERSVYEQFEKMLIDKLNYYVDKQKDSDEAGGLLHALQLTSKFESFKKLGKQSGCLFYIPAWNTSKIDPVTGFVNLFDTRYTNADQARKFFSQFDSIRYNADKDWFEFAFDYNKFTAKAKDTRTKWTLCTYGTRIRTFRNPERLNQWDNEEVVLTDEFKKAFANADVNIHGNLKEAICSLQDKKYLEPLMHLMKLLLQMRNSITNSEIDYLLSPVADENGTFYDSRVCSASLPKDADANGAYNIARKGLWAIHQIQESPAGDRLNLAIKNKDWLNFAQQKPYMNE

SEQ ID NO: 1667 - protein, 1267 aa, Unknown
  Description of Unknown: uncultivated organism sequence
  Category: MG75 effectors
  Description: MG75-153 effector
MKNFIAKYSVSKTLRFELKPIGKTLENIQKNGLISKDEMLAENYKEMKKTIDEFHKEFIHKTLSNASLDKENLKEIAELYTAPAEKRKEDNYKNQLKAYQKALRKEIVDHFKNDELFKNLFAEKLIKNHLQGFAQQKGLRFYSEFNNFTTYFVGFHENRKNIYTDEDKRTSIAYRLIHENLPKFIHNIAVFEKIQEKKIPLTILENQFMSKLGNDTLADVFRLEYYNCLLTQNSIDFINQLIGGYVNENQEKIQGLNEYINLYNQQQKDKKDRLPKMKMLYKQILSDRESISFLPQSFKESQEVLDAIRDYYLSNLLEYRAEDKEEPENVLEKIQERLSHIADYDLSKIYIRNDKAITDISQTIFGHWGLIHSALEFDFRQKNVGKKTTQKQEEDVEKYLKSDYYSIAEIENALISYKESTQNEKLVEVFNKTSHPIADYFKTYFKAKEKSKEGKEYTLIANIQAKYTCVEGLLNTDYPKDKKLHTDKDNLRNLKAFLDAILELLHFVKPLIISKNDFLEKDENFYSSIEPYYKQLELLIPLYNKVRNFATQKPYSTEKIKLNFENSTLLNGWDKNKESDNTCVLFRKGEDFYLGIMNKKYNKIFENVPKPKSDTTFLKMEYKLLPGANKMLPKVFFSKKNIAYYAPDSEILRIRNHSTHTKDGEPQKGYEKQAFKLEDCHKMIDFFKSSIEKHPEWKNFNFTFSNTQSYQSIDEFYREVEEQGYSISFVEVDEEYINQCVNEGKLYLFQIYNKDFSKNKKSKGKPNLHTLYWKALFDPENLKDVIYKLNGEAEVFYRKKSISAENIIVHKAQKPIENKNPLNLTKYSIFQYDIIKDRHYTEDKFLFHVPITLNFKSKKGKENINQEVLDYLKENPDVNIIGIDRGERHLLYLTVINSKGQILHQESLNTLKNETYNIQTDYHALLHEKEKDRDKARKEWGVIENIKELKEGYLSAIIHNIAKLMVQYNAIVVMEDLNSGFKRGRIKVEKQVYQKFEKMLIEKLNYLVFKDVPNYEPGGLYNALQLTSKFESFEKLGKQSGFLFYIPAWNTSKIDPTTGFVNLFGGIKYESIHQAVNFFEKFQSIRYNTKEAYFEFAFDYNDFTTKAEGTKTQWTVCTHGERIINFRNTEKNSEWDSKTVQLTQQIKNLLNEYHIAYEQGQDIKPAITAQNDKKFFEELLKQFKNTLQMRNSVINSDVDYLISPVMNAKGEFFDTRKTDSTLPQNADANGAYHIAKKGLLHVQQIIDGVKKTDLTNKKWLKFVQNNL

SEQ ID NO: 1668 - protein, 1275 aa, Unknown
  Description of Unknown: uncultivated organism sequence
  Category: MG75 effectors
  Description: MG75-154 effector
MRKFNEFVGLYPISKTLRFELKPIGKTLEHIQRNKLLEYDAVRADDYVKVKKIIDTYHKYLIDEALSGFTFETEADGRRNNSLSEYYWYYNLRKRNEQEQKTFKTIQNNLRKQIVDKLTQSEKYKRIDKKELITTDLPDFLTNESEKELVEKFKNFTTYFTEFHKNRKNMYSKEEKSTAIAFRLINENLPKFVDNIAAFEKVASSPLAEKINALYEDFKEYLNVEKISSVFRLEYYNELLTQKQIDLYNAIVGGRTEEDNRTQIKGLNQYINEYNQQQTDRSNRLPKLKPLYKQILSDRESVSWLPPKFDSDKELLTKIKECYDALSEKEKVFDKLESILKSLSTYDLSKIYISNDSQLSYISQKMFGRWDIIGKAIREDCAKRNPQKNRESLEKFAERIDKKLKAIDSISIGDVDECLAQLGEPYVKRVEDYFAAMGASEIGEEQIGQEFFKKNIEEAYESVKELLNNADNITDNNLMQDKGNVEKIKNLLDAIKDLQRFIKPLLGKGDEADKDGVFYGEFTSLWTKLDTVTPLYNMVRNYLTSKPYSTKKIKLNFENSHFLRGWAKDYNKKAGLIYEKAGLYYLAIVDKKISNDDKKLLHKNVDEDVASRIIFDFQKPDEKNTPRLFIYSKKNPITIAPAVDIYNLPIDSILDVWNKEKYKVEYRQQDQLGYEQALYSLIDYFKEGFSKHESYKHYDFKWKETNKYKDISEFYHDVEISCYEVKYDKVNWKTLLKFVDEGKLYLFQIYNKDFSDHSKGTPNMHTLYWKMLFDEENLKDVVYKLNGEAEVFFRKSSITVQSPTHPANSPIKNKNKDNKKKESKFEYDLIKDRRYTVDKFLLHVPITMNFKSVGGSNINQLVKRYIRSATDLHIIGIDRGERHLLYLTVIDSRGNIKEQFSLNEIVNEYNGNTYRTDYHELLDTREGELTEARRNWQTIQNIRELKEGYLSQVIHKISELAIKYNAVIVLEDLNFGFMRSRQKVEKQVYQKFEKMLIYKLNYLVDKKKPVTETGGLLKAYQLTGEFESFKTLGKQSGILFYVPAWNTSKIDPVTGFVNLFDTHYENIEKAKGFFDKFKSIRYNSDKDWSEFVVDDYTRFSPKAEGTRRDWTICTQGKRIQIYRNPQRNNEWEGREIDLTKAFEEHFEAYGIDISKDLREQINIQNKKEFFEELLRLLRLTLQMRNSMPSSDIDYLISPIADDTGRFFDSRKQAELKGNAVLPMNADANGAYNIARKGLLAIRKMKQEENDSAKISLAISNKEWLKFAQTKPYLED

SEQ ID NO: 1669 - protein, 1236 aa, Unknown
  Description of Unknown: uncultivated organism sequence
  Category: MG75 effectors
  Description: MG75-155 effector
MKQLSELTGLYSLSKTLRFELKPIGKTLEHIESKGLIAQDEQRAEEYKKVKDIIDRYHKKFITMCLSDFKFEQNSLETYVALAEDTNRDEKAFDEIKKTLRKQIVETFKKGGSYSDLFKKELIQKHLPEFVSDEEEKKMIANFSKFTTYFNGFNENRKNMYSDEDKSTAIAYRLIHENLPMFVNNMKSFSRIADSDVHQHFTEIESSFSEYLGVEHLEEMFQLDYFSETLTQEQIAVYNHIIGGRALEDGTKLKGINEYVNLYNQQHKNSRLPLLKPLYKMILSDRVALPWFPSEEFASDEEMIRAINETYNTLKEVLSIDGDSSLRSLLLNISSYDIKHIYIANDLGLTDISQQMFGQYDVYTSAIKQELREKNAPTAKERRNPELYDERINKLFKSAKSFSIEHLNSLVDSEHTIQNYYKHLGAYDRNGEQRVNLFTQIEMAYVAAKEILSGKHGNISQSDAETAIIKGLLDAFKSLQRFIKPLLGNGEEADKDNEFDAKLREAWNTLDIVTPLYNKVRNWLTRKPYSTEKIKLNFENAQLLGGWDVNKEPDCTSILLRKNGLYYLAIMNKKYNHAFDIDNLPNDGKCYEKIDYKLLPGANKMLPKVFFSKSRIKEFAPSEIIVNAYKKGSHKKGANFSISDCRRLIDFFKASISKHEDWKNFPFSFSSTEKYEDISGFYREVEQQGYMLGFRNVSESFIKQLVDEGKLYLFQIWNKDFSDFSKGTPNMHTLYWKMLFDEHNLANVVYKLNGQAEVFYRKSSLDVANTTIHKAHQPIMNKNQENKKRQSTFDYDIIKNRRYTVDKFQFHVPISINFKATGRDNVNDNVLDIIRNGGIKHIIGIDRGERHLLYLSLIDLKGNIVKQMTLNDIVNEYNGNTYATNYKNLLAEREGNRTEARKNWKKIENIKDIKKGYLSQVVHIISKMMVEYNAIVVLEDLNMGFMRGRQKIERSVYEQFEKMLIDKLNYYVDKQKNSDEAGGLLHALQLTSKFESFKKLGKQSGCLFYIPAWNTSKIDPVTGFVNLFDTRYTNADQARKFFSQFDSIRYNADKDWFEFAFDYNKFTAKAKDTRTKWTLCTYGTRIRTFRNPARLNQWDNEEVVLTDEFKKAFANADINIHGNLKEAICSLQDKKYLEPLMHLMKLLLQMRNSITNSEVDYLLSPVADENGTFYDSRICSASLPKDADANGAYNIARKGLWAIHQIQESPAGDRLNLAIKNKDWLNFAQQKPYMNE

SEQ ID NO: 1670 - protein, 1236 aa, Unknown
  Description of Unknown: uncultivated organism sequence
  Category: MG75 effectors
  Description: MG75-156 effector
MKQLSELTGLYSLSKTLRFELKPIGKTLEHIESKGLIAQDEQRAEEYKKVKDIIDRYHKKFITMCLSDFKFEQNSLETYVALAEDTNRDEKSFDEIKKTLRKQIVETFKKGGSYSDLFKKELIQKHLPEIVTDEEEKKMIANFSKFTTYFNGFNENRKNMYSDEDKSTAIAYRLIHENLPMFVDNMKSFSRIADSDVHQHFTEIESSFSEYLGVEHLEGMFQLDYFSETLTQEQIAVYNHIIGGRVLEDGTKLKGINEYVNLYNQQHKDSRLPLLKPLYKMILSDRVALPWFPSEEFASDEEMIGAINATYNTLKDVLSIDGDSSLRCLLLNISSYDIKHIYIANDLGLTDISQQMFGQYDVYTSAIKQELRTTNAPTAKERRTPELYDERINKLFKSAKSFSIEYLNSLVDSEHTIQNYYKHLGAYDRNGEQRVNLFTQIEMAYVAAKEILSGKHGNISQSDAETAIIKGLLDAFKSLQRFIKPLLGNGEEADKDNEFDAKLREAWNTLDIVTPLYNKVRNWLTRKPYSTEKIKLNFENAQLLGGWDVNKEPDCTSILLRKNGLYYLAIMNKKYNHAFDIDNLPNDGECYEKIDYKLLPGANKMLPKVFFSKSRIKEFAPSEIIVNAYKKGSHKKGANFSISDCRRLIDFFKASISKHEDWKNFPFSFSSTETYEDISGFYREVEQQGYMLGFRNVSESFIKQLVDEGKLYLFQIWNKDFSDFSKGTPNMHTLYWKMLFDEHNLANVVYKLNGQAEVFYRKRSLDVANTTIHKAHQPIMNKNQENKKRQSTFDYDIIKNRRYTVDKFQFHVPISINFKATGRDNVNDNVLDIIRNGGIKHIIGIDRGERHLLYLSLIDLKGNIVKQMTLNDIVNEYNGNTYATNYKNLLAEREGNRTEARKNWKKIENIKDIKKGYLSQVVHIISKMMVEYNAIVVLEDLNMGFMRGRQKIERSVYEQFEKMQIDKLNYYVDKQKNSDEAGGLLHALQLTSKFESFKKLGKQSGCLFYIPAWNTSKIDPVTGFVNLFDTRYTNADQARKFFFQFDSIRYNADKDWFEFAFDYNKFTAKAKDTRTKWTLCTYGTRIRTFRNPARLNQWDNEEVVLTDEFKKAFANADINIHGNLKEAICSLQDKKYLEPLMHLMKLLLQMRNSITNSEVDYLLSPVADENGTFYDSRVCSASLPKDADANGAYNIARKGLWAIHQIQESPAGDRPNLAIKNKDWLNFAQQKPYMNE

SEQ ID NO: 1671 - protein, 1236 aa, Unknown
  Description of Unknown: uncultivated organism sequence
  Category: MG75 effectors
  Description: MG75-157 effector
MKQLSELTGLYSLSKTLRFELKPIGKTLEYIESKGLIAQDEQRAEEYKKVKDIIDRYHKKFITMCLSDFKFEQNSLETYVALAEDTNRDEKAFDEIKKTLRKQIVETFKKGGSYSDLFKKELIQKHLPEFVSDEEEKKMIANFSKFTTYFNGFNENRKNMYSDEDKSTAIAYRLIHENLPMFVNNMKSFSRIADSDVHQHFTEIESSFSEYLGVEHLEEMFQLDYFSETLTQEQIAVYNHIIGGRALEDGTKLKGINEYVNLYNQQHKNSRLPLLKPLYKMILSDRVALPWFPSEEFASDEEMIRAINETYNTLKEVLSIDGDSSLRSLLLNISSYDIKHIYIANDLGLTDISQQMFGQYDVYTSAIKQELREKNAPTAKERRNPELYDERINKLFKSAKSFSIEHLNSLVDSEHTIQNYYKHLGAYDRNGEQRVNLFTQIEMAYVAAKEILSGKHGNISQSDAETAIIKGLLDAFKSLQRFIKPLLGNGEEADKDNEFDAKLREAWNTLDIVTPLYNKVRNWLTRKPYSTEKIKLNFENAQLLGGWDVNKEPDCTSILLRKNGLYYLAIMNKKYNHAFDIDNLPNDGKCYEKIDYKLLPGANKMLPKVFFSKSRIKEFAPSEIIVNAYKKGSHKKGANFSISDCRRLIDFFKASISKHEDWKNFPFSFSSTETYEDISGFYREVEQQGYMLGFRNVSESFIKQLVDEGKLYLFQIWNKDFSDFSKGTPNMHTLYWKMLFDEHNLANVVYKLNGQAEVFYRKSSLDVANTTIHKAHQPIMNKNQENKKRQSTFDYDIIKNRRYTVDKFQFHVPISINFKATGRDNVNDNVLDIIRNGGIKHIIGIDRGERHLLYLSLIDLKGNIVKQMTLNDIVNEYNGNTYATNYKNLLAEREGNRTEARKNWKKIENIKDIKKGYLSQVVHIISKMMVEYNAIVVLEDLNMGFMRGRQKIERSVYEQFEKMLIDKLNYYVDKQKNSDEAGGLLHALQLTSKFESFKKLGKQSGCLFYIPAWNTSKIDPVTGFVNLFDTRYTNADQARKFFSQFDSIRYNADKDWFEFAFDYNKFTTKAKDTRTKWTLCTYGTRIRTFRNPARLNQWDNEEVVLTDEFKKAFANADINIHVNLKEAICSLQDKKYLEPLMHLMKLLLQMRNSITNSEVDYLLSPVADENGTFYDSRVCSASLPKDADANGAYNIARKGLWAIHQIQETPAGDRPNLAIKNKDWLNFAQQKPYMNE

SEQ ID NO: 1672 - protein, 1236 aa, Unknown
  Description of Unknown: uncultivated organism sequence
  Category: MG75 effectors
  Description: MG75-158 effector
MKQLSELTGLYSLSKTLRFELKPIGKTLEHIESKGLIAQDEQRAEEYKKVKDIIDRYHKKFITMCLSDFKFEQNSLETYVALAEDTNRDEKAFDEIKKTLRKQIVETFKKGGSYSDLFKKELIQKHLPEFVSDEEEKKMIANFSKFTTYFNGFNENRKNMYSDEDKSTAIAYRLIHENLPMFVNNMKSFSRIADSDVHQYFTEIESSFSEYLGVEQLEEMFQLDYFSETLTQEQIAVYNHIIGGRALEDGTKLKGINEYVNLYNQQHKDSRLPLLKPLYKMILSDRVALPWFPSEEFASDEEMIRAINETYNTLKEVLSIDGDSSLRSLLLNISSYDIKHIYIANDLGLTDISQQMFGQYDVYTSAIKQELREKNAPTAKERRNPELYDERINKLFKSAKSFSIEHLNSLVDSEHTIQNYYKHLGAYDRNGEQRVNLFTQIKMAYVAAKEILSGKHGNISQSDAETAIIKGLLDAFKSMQRFIKPLLGNGEEADKDNEFDAKLREAWNTLDIVTPLYNKVRNWLTRKPYSTEKIKLNFENAQLLGGWDVNKEPDCTSILLRKNGLYYLAIMNKKYNHAFDIDNLPNDGKCYEKIDYKLLPGANKMLPKVFFSKSRIKEFAPSEIIVNAYKKGSHKKGANFSISDCRRLIDFFKASISKHEDWKNFPFSFSSTETYEDISGFYREVEQQGYMLGFRNVSESFIKQLVDEGKLYLFQIWNKDFSDFSKGTPNMHTLYWKMLFDEHNLANVVYKLNGQAEVFYRKSSLDVANTTIHKAHQPIMNKNQENKKRQSTFDYDIIKNRRYTVDKFQFHVPISINFKATGRDNVNDNVLDIIRNGGIKHIIGIDRGERHLLYISLIDLKGNIVKQMTLNDIVNEYNGNTYATNYKDLLAEREGNRTEARKNWKKIENIKDIKKGYLSQVVHIISKMMVEYNAIVVLEDLNMGFMRGRQKIERSVYEQFEKMLIDKLNYYVDKQKDSDEAGGLLHALQLTSKFESFKKLGKQSGCLFYIPAWNTSKIDPVTGFVNLFDTRYTNADQARKFFSQFDSIRYNADKDWFEFAFDYNKFTAKAKGTRTKWTLCTYGTRIRTFRNPERLNQWDNEEVVLTDEFKKAFANADINIHGNLKEAICSLQDKKYLEPLMHLMKLLLQMRNSITNSEIDYLLSPVADENGTFYDSRVCSASLPKDADANGAYNIARKGLWAIHQIQESPADDRLNLAIKNKDWLNFAQQKPYMNE

SEQ ID NO: 1673 - protein, 1284 aa, Unknown
  Description of Unknown: uncultivated organism sequence
  Category: MG75 effectors
  Description: MG75-159 effector
MNTSNLSRFTNLYSISKTLRFELQPLGKTKDYIEKNGILMRDEKRAEDYKTVKGIIDEYHKKYIKGRLWDFKLPLASEGKHDSLEEYKALYEVSKRSEADEAAFKEVKDNLRSIIAKRLTSGKAYETIFKKELIREDLINSLEDEVEREIVSQFADFTTYFGGFHENRKNMYDAGEKSTAIAYRLIHQNLPKFMDNMKAFAKIAETSIAEHFADIYEGSKEMLNVGSIEEIFRLDYFSETLTQPHIEVYNSIIGKRVLEDGTEVKGINEYVNLYNQQQKDKRLPLLVPLYKQILSDREKLSWLAEEFDSDEKMLAAVNETYTHLHDLLMGNENESLRSLLLHLRDNDLEQINIANDLSLTDISQHLFGRYDVFTNGIKEELRVITPRKRKETDEQLEDRISKIFKTQKSFSIAFLNSLPQPAMEDGKARCIEDYFMALGAVNNETTQKENLFAQIENAYENAKSVLQMKETGDMLSQNKPAVSKIKALLDALKDLQHFIKPLLGSGEENEKDELFYGSFQMMWDELDAVTPLYNKVRNWLTRKPYSTEKIKLNFDNAQLLDGWDENKETTNASILLYKDGNYYLGIIKKEDRKILGSPMPTDGECYDKVVYKFFKDITTMVPKCTTQKKDVIAHFMHSDDDYILYDKKTFDAPVTITKEIYNLNNVLYNGIKKFQIEYLRSTGDKRGYEHAVFIWKSFCMHFLKAYKSTSIYNLALVEQQINSYYDLSSFYNAVNLLLYNLSYRKVSVNYIHSLVDEGKLYLFRIWNKDFSEYSKGTPNLHTLYWKMLFDERNLADVVYKLNGQAEVFYRKSSIQPEHRIVHPAGKPIANKNEHSKEPTSTFKYDIVKDRRYTVDKFQFHVPITINFKAAGQENINPVVLDAIRRGGFTHIIGIDRGERHLLYLSLIDLQGNIVEQMTLNEIINEYKGLKHKTNYHDLLAKREGERTEARRSWDTIENIKEMKEGYLSQVVHIISKMMVEYNAIVVLEDLNTGFMRSRQKIERQVYEKFEKMLIDKLNCYIDKQVGASDIAGLLHPLQLACEAKKWKRSHQCGCLFYIPAWNTSKIDPVTGFVNLFDTRYENAAKAKAFFGKFGSIRYNAEKDWFEFAFDYNDFTTKAEGTRTEWTLCTYRERIRTFRNPQKNHQWDDEEIVLTDAFKQLFDKYDIDMKGNLKEAICAQNDAQFFKDMMELMKLLLQMRNSITNSETDYLLSPVADEKGQFFDSRRGITTLPDNADANGAYNIARKGLWVIRKIQETAENEKPSLAITNKEWLQFAQTKPYLND

SEQ ID NO: 1674 - protein, 1274 aa, Unknown
  Description of Unknown: uncultivated organism sequence
  Category: MG75 effectors
  Description: MG75-160 effector
MKKNLEKFIGLYHMDKTLRFELKPMGKTLENINNNGFIENDNHRADSYKKVKKLIDRYHKHYIESVLGDFKLNSIQLEAYYNLYTQQSKTEKEIKEFEAIQDKLRKSIADALKKDDRFKRIDKKELINEDLNVVLENDDERILVSEFQGFTSYFTGFHENRKNMYSDEAKSTAIAYRLIHENLPKFIDNIAIFKKVAETSVADKFSKLYKDFEEYLNVYNINEMFDLDYYSIVLTQKQIEVYNGIIGGKTLEDGTKVQGLNEYINLYNQQQNDKRASLPKLKPLFKQILSDREQLSWLQEEFKTGGDVLDAVKEYCEAYFMNVDEMIKVLLTSIANYDLSKIYIPNDLSLTDISQKMLGNWNVIPNAIEQDFRNRYIKKPEENEEKYSERISKLVKQEKSFSLAYINSCLSELDNADISTYFASLGAVNIPDKQTSSITTEISMYYNQLKPLFDIEYPKEKNLSQDKLTVMQLKNLLDAFKALQRFVKPLLGKGNEAEKDEKFYGELMQLWGIIDEITPLYNKVRNYATRKPYSTDKIKVNFENAQLLDGWDENKEENNAAIILLKDGLYYLGIVKKEHRNILKVDKPMPSNGECYDKVVYKFFKDITTMVPKCTTQMKAVKQHFENSSESYTLFDKKSFNAPVEITKEIFELNNVLYNGVKKFQIEYLRSTNDRAGYEHAVNLWKEFCMQFLKAYKSTAIYDLSSIEKDWAKYTDLSSFYGAVNLLLYNLSYKKVSVEYIDKLVEEDKMYLFQIYNKDFSEYSKGTPNMHTLYWKMLFDERNLKDVVYKLNGQAEIFFRKKSISMAKPTHPANKPIDNKNVLNKRKQSTFKYDLIKDKRYTLDKFQFHVPITINFKSGGDGKINIDVCKHIKDSNDMHFIGIDRGERHLLYLCVINSKGEIVEQYSLNEIVNEYKGNKYHTDYHHLLQERDKKRQEERTSWQTIEGIKELKQGYLSQVIHKISQLIVKYNALVILEDLNMGFKRSRQKVESSVYQQFEKALIDKLNYYVDKKTEPTEDGGLLRAYQLASKFDSFQKMGKQSGFIFYVPAWNTSKIDPVTGFVNLLDTRYESVAKSQKFFDDFDSIRYNGEKDWFELKFDYNKFTKKAEGTKTDWTLCTYGTRVETFRNSEKNANWDSREINLTDEWKALFDKYNIPLNCNLKDAIAQQTSKDFHNILLHLLKLTLQMRNSETGTDIDYMVSPIANEDGKFYDSRLCDKSLPENADANGAYNIARKGLWIAQQIKEAEDLKKVKLAITNKEWLQFAQQKPYLND

SEQ ID NO: 1675 - protein, 1284 aa, Unknown
  Description of Unknown: uncultivated organism sequence
  Category: MG75 effectors
  Description: MG75-161 effector
MNTSNLSRFTNLYSISKTLRFELQPLGKTKDYIEKNGILMRDEKRAEDYKTVKGIIDEYHKKYIKGRLWDFKLPLASEGKHDSLEEYKALYEVSKRSEADEAAFKEVKDNLRSIIAKRLTSGKAYETIFKKELIREDLINSLEDEVEREIVSQFADFTTYFGGFHENRKNMYDAGEKSTAIAYRLIHQNLPKFMDNMKAFAKIAETSIAEHFADIYEGSKEMLNVGSIEEIFRLDYFSETLTQPHIEVYNSIIGKRVLEDGTEVKGINEYVNLYNQQQKDKRLPLLVPLYKQILSDREKLSWLAEEFDSDEKMLAAVNETYTHLHDLLMGNENESLRSLLLHLRDNDLEQINIANDLSLTDISQHLFGRYDVFTNGIKEELRVITPRKRKETDEQLEDRISKIFKTQKSFSIAFLNSLPQPAMEDGKARCIEDYFMALGAVNNETTQKENLFAQIENAYENAKSVLQMKETGDMLSQNKPAVSKIKALLDALKDLQHFIKPLLGSGEENEKDELFYGSFQMIWDELDAVTPLYNKVRNWLTRKPYSTEKIKLNFDNAQLLDGWDENKETTNASILLYKDGNYYLGIIKKEDRKILGSPMPTDGECYDKVVYKFFKDITTMVPKCTTQKKDVIAHFMHSDDDYILYDKKTFDAPVTITKEIYNLNNVLYNGVKKFQIEYLRSTGDKRGYEHAVFIWKSFCMHFLKAYKSTSIYNLALVEQQINSYYDLSSFYNAVNLLLYNLSYRKVSVNYIHSLVDEGKLYLFRIWNKDFSEYSKGTPNLHTLYWKMLFDERNLADVVYKLNGQAEVFYRKSSIQPEHRIVHPAGKPIANKNENSKEPTSTFKYDIVKDRRYTVEKFQFHVPITINFKAAGQENINPVVLDAIRRGGFTHIIGIDRGERHLLYLSLIDLQGNIVEQMTLNEIINEYKGLKHKTNYHDLLAKREGERTEARRSWDTIENIKEMKEGYLSQVVHIISKMMVEYNAIVVLEDLNTGFMRSRQKIERQVYEKFEKMLIDKLNCYIDKQVGASDIAGLLHPLQLACEAKKWKRSHQCGCLFYIPAWNTSKIDPVTGFVNLFDTRYENAAKAKAFFGKFGSIRYNAEKDWFEFAFDYNDFTTKAEGTRTEWTLCTYRERIRTFRNPQKNHQWDDEEIVLTDAFKQLFDKYDIDMKGNLKEAICAQNDAQFFKDMMELMKLLLQMRNSITNSETDYLLSPVADEKGQFFDSRRGITTLPDNADANGAYNIARKGLWVIRKIQETAENEKPSLAITNKEWLQFAQTKPYLND

SEQ ID NO: 1676 - protein, 1279 aa, Unknown
  Description of Unknown: uncultivated organism sequence
  Category: MG75 effectors
  Description: MG75-162 effector
MSNFNEFTHLYQLSKTLRFELKPIGETLKHFNESGILDQDEHRAESYKKVKKLIDRYHKEFMEEALRDFVFQMDDEGKNNSLSEYFFLYSLGKRTEAQDNDFKDVKKNLREQIAKYFKASPKYKNLFKQELIKEDLCNNMQCNEEEQKLVEEFHNFTTYFTGFHENRKNMYSDEEKSTAIAFRLVHQNLPKFIDNIGVFDRVRNIDEIKAGIENLQKHFETEGLFKQGEKIEDFFTLDYYSRLAVQSRIEIYNAILGGKTTEKGEKIQGLNELINLYNQQHKETHLPKMKALFKQILSDRQAVSWIEESFKSDNEVLSSVNDFYENLKQNEIFERTKELLTSVGSYDLSKVYITNDQQLTSISQQLYGSWAVIENAILAEMQNETPRKKKEDAEKYNERLKKAYSNRSSFSIAYIDQCLEAVFGENRIPVEQHFANLGKAEIETEAECGKIKIPDVFTQIEQTYSAAKSLLCNPYPKDKHLSQSDEDIEKVKNLLDALKRFQHFIKPLTGSGDEAEKDEMFYGDLAELWTEIDQLNSLYNKVRNHLTGKPYSEEKLKLNFENATLLNGWDKNKEPDNTAIILRKDGLYYLAIMNKEHNRIFASDKLPNNGECYEKVIYKLLPGANKMLPKVFLSKKGIEVFKPSQEILAIYNNGTHKKGDTFNINDCHKLIDFFKESISKHNDWKNFDFHFSDTNSYEDLSGFYREVENQGYKITFQNISSDYIDNLVNEGKLYLFQIYNKDFSTKRDLSKHKEGTPNMHTLYWQMLFDERNLNDGVYQLNGHAEVFFRKKSLNYTKPTHPANQPIAKKNPHSKNETSQFTYDLIKDKRFTMDKFLFHVPITLNFKSGETDNINAKVRQWLQKADDVHIIGIDRGERHLLYLTVIDSKGNIKEQMSLNTIENKYNGNTYAFDYHNRLDEKEKERDKAKKSWKTVENIKELKEGYLSQAIHKITQLMLKYNAIIVLEDLNIGFMRGRQKVEKQVYQKFEKMLIDKLNYLADKKKDPSEVGGVLNAYQLTSKFESFTKLGRQSGFLFYIPAWNTSKIDPVTGFVNLFDTQYKSDGKAKMFFSKFKSISYNKDKNWFEFSFDYNDFTSKADGTKTEWTVCTNGERIENFRNGETSNQWGGRTINLSQKFKSLFDEYGIDFTKDLQNSICSQSKKGFFKQLLHLFKLTVQMRNSNTETEEEKGKKDFIISPVCVDDKYYNSDIEAEKGKDEEGNWKSELPVNADANGAYNIARKGLMILNHIKQSSDPSKKQEYDLTNKAWLNFVQKGSVEGK

SEQ ID NO: 1677 - protein, 1017 aa, Unknown
  Description of Unknown: uncultivated organism sequence
  Category: MG75 effectors
  Description: MG75-163 effector
MFQLDYFSETLTQEQIAVYNHIIGGRALEDGTKLKGINEYVNLYNQQHKDSRLPLLKPLYKMILSDRVALPWFPSEEFASDEEMIRAINETYNTLKEVLSIDGDSSLRSLLLNISSYDIKHIYIANDLGLTDISQQMFGQYDVYTSAIKQELREKNAPTAKERRNPELYDERINKLFKSAKSFSIEHLNSLVDSELTIQNYYKHLGAYDRNGEQRVNLFTQIEMAYVAAKEILSGKHGNISQSDAETAIIKGLLDAFKSLQRFIKPLLGNGEEADKDNEFDAKLREAWNTLDIVTPLYNKVRNWLTRKPYSTEKIKLNFENAQLLGGWDVNKEPDCTSILLRKNGLYYLAIMNKKYNHAFDIDNLPNDGKCYEKIDYKLLPGANKMLPKVFFSKSRIKEFAPSEIIVNAYKKGSHKKGSNFSISDCRRLIDFFKASISKHEDWKNFPFSFSSTETYEDISGFYREVEQQGYMLGFRNVSESFIKQFVDEGKLYLFQIWNKDFSDFSKGTPNMHTLYWKMLFDEHNLANVVYKLNGQAEVFYRKSSLDVANTTIHKAHQPIMNKNQENKKRQSTFDYDIIKNRRYTVDKFQFHVPISINFKATGRDNVNDNVLDIIRNGGIKHIIGIDRGERHLLYLSLIDLKGNIVKQMTLNDIVNEYNGNTYATNYKDLLAEREGNRTEARKNWKKIENIKDIKKGYLSQVVHIISKMMVEYNAIVVLEDLNMGFMRGRQKIERSVYEQFEKMLIDKLNYYVDKQKNSDEAGGLLHALQLTSKFESFKKLGKQSGCLFYIPAWNTSKIDPVTGFVNLFDTRYTNADQARKFFSQFDSIRYNAYKDWFEFAFDYNKFTAKAKDTRTKWTLCTYGTRIRTFRNPARLNQWDNEEVVLTDEFKKAFANADINIHGNLKEAICSLQDKKYLEPLMHLMKLLLQMRNSITNSEVDYLLSPVADENGTFYDSRICSASLPKDADANGAYNIARKGLWAIHQIQETPAGDRPNLAIKNKDWLNFAQQKPYMNE

SEQ ID NO: 1678 - protein, 1286 aa, Unknown
  Description of Unknown: uncultivated organism sequence
  Category: MG75 effectors
  Description: MG75-164 effector
MKQKKTQNPFNQFIGLYPLSKTLRFELRPYNEKTKNNIISAGILAEDNHRAESYKKVKKIIDEYHKAFIERVLKDLVLEEKPLQAFYECYKKSSKEEALQEIGNNLRTQISNAFEKDPKYSTLTSKDLINKELPSIVTTEEERTLLEEFHGFSTYFVGFHQNRENMYSDEEKATSIAYRLINENLPKFIDNIRSFQKIADSPIADKLESIYDEYAKEGYMNVNTLNEMFEISFYNRVLTQTQIDLYNAIIGGKTEKDGHKTQGINEYINLYNQRGEVQKKDRLPLLKPLFKQILSDREHISWFEEGFADDQAMLNAIKDFYLELTETGPTTTESILDRTKSLLRTIADYDLTKIYLGYNSLSKISQQIFGEWDRIQRALEAEYDQREKTKTYEEKEKHFKSLKSVSIGFIDDCLKAFETDKQLSLSIKEYIAQLGKKNDDPDLIDRITASYKAVKAILTTEWPKERNIAQEKDIVALIKDLLDRIKDLQSFIKPLLGSGKESDKDNLFYGELASIWETINTVTPLYDKVRNRMTRKPYSTQKFKVNFRNSQLLKGWDLNKEKDYMGIILRKKDLYFLAIMNKKNTKVFSSKVPSQGECFEKMIYKQFDATKQVPKCSTELKRVKEAIEIDDKPYYELFDKQKFSKPLTITREIWQLNNLVWDKKTNSFVRRKKDETRPKKFQQEYLDITEDREGYCEALRKWIDFVKDFLASYKSTSIYNIKYKDSSEYASIKEFYNFLDQELYHIEFSNVSVDYINELIEEGKIYLFQIYNKDFSPHSKGTPNMHTLYWKTLFDERNLANVAYKLNGEAEIFFRKASLERKVTHPAHDPIKTKNPKTSIKEKAFAYDLIKDKRYTEDKFQLHVPITMNFKSPMEKKGINSRVNNYIKTAEDLHFIGIDRGERNLLYVCVIDSQGNIKDQYSLNEIVNQYNRTDYKYLLEKREEERDKERKSWQTIENIKDLKQGYLSQVVHKIAQLMVQYHAIVVLEDLNSGFKRSRQKVEKSVYQQFEKSLIDKLNYLIDKRLPIDEEGGVLRAYQLTNKFESFKTMKMQNGFLFYIPAWNTSKMDPTTGFVNLFDTRYTNIDKSKEFFDKFEAIRYNEGKDWFELEFDYEHFTTKAEGTQTQWTLCTWGERINTFRNKSKNSSWDYKKINLTEEYKTLFEQFSINYRRNLKKEILEQNSKDFFERLLSLLHLTLQMRNSIPNTDTDYLISPVADANGHFYYSEQCGDNLPKNADANGAYNIARKGMWMAEQIRRSNEGEELKLAISNKEWLRFAQEKPYLEDK

SEQ ID NO: 1679 - protein, 1236 aa, Unknown
  Description of Unknown: uncultivated organism sequence
  Category: MG75 effectors
  Description: MG75-165 effector
MKQLSELTGLYSLSKTLRFELKPIGKTLEHIESKGLIAQDEQRAEEYKKVKDIIDRYHKKFITMCLSDFKFEQNSLETYVALAENTNRDEKAFDEIKKTLRKQIVETFKKGGSYSDLFKKELIQKHLPEFVSDEEEKKMIANFSKFTTYFNGFNENRKNMYSDEDKSTAIAYRLIHENLPMFVNNMKSFSRIADSDVHQHFTEIESSFSEYLGVEHLEEMFQLDYFSETLTQEQIAVYNHIIGGRALEDGTKLKGINEYVNLYNQQHKNSRLPLLKPLYKMILSDRVALPWFPSEEFASDEEMIRAINETYNTLKEVLSIDGDSSLRSLLLNISSYDIKHIYIANDLGLTDISQQMFGQYDVYTSAIKQELREKNAPTAKERRNPELYDERINKLFKSAKSFSIEHLNSLVDSEHTIQNYYKHLGAYDRNGEQRVNLFTQIEMAYVAAKEILSGKHGNISQSDAETAIIKGLLDAFKSLQRFIKPLLGNGEEADKDNEFDAKLREAWNTLDIVTPLYNKVRNWLTRKPYSTEKIKLNFENAQLLGGWDVNKEPDCTSILLRKNGLYYLAIMNKKYNHAFDIDNLPNDGKCYEKIDYKLLPGANKMLPKVFFSKSRIKEFAPSEIIVNAYKKGSHKKGANFSISDCRRLIDFFKASISKHEDWKNFPFSFSSTETYEDISGFYREVEQQGYMLGFRNVSESFIKQLVDEGKLYLFQICNKDFSDFSKGTPNMHTLYWKMLFDEHNLANVVYKLNGQAEVFYRKSSLDVANTTIHKAHQPIMNKNQENKKRQSTFDYDIIKNRRYTVDKFQFHVPISINFKATGRDNVNDNVLDIIRNGGIKHIIGIDRGERHLLYLSLIDLKGNIVKQMTLNDIVNEYNGNTYATNYKNLLAEREGNRTEARKNWKKIENIKDIKKGYLSQVVHIISKMMVEYNAIVVLEDLNMGFMRGRQKIERSVYEQFEKMLIDKLNYYVDKQKNSDEAGGLLHALQLTSKFESFKKLGKQSGCLFYIPAWNTSKIDPVTGFVNLFDTRYTNADQARKFFSQFDSIRYNADKDWFEFAFDYNKFTAKAKGTRTKWTLCTYGTRIRTFRNSERLNQWDNEEVVLTDEFKKAFANADINIHGNLKEAICSLQDKKYLEPLMHLMKLLLQMRNSITNSEVDYLLSPVADENGTFYDSRICSASLPKDADANGAYNIARKGLWAIHQIQETPAGDRPNLAIKNKDWLNFAQQKPYMNE

SEQ ID NO: 1680 - protein, 956 aa, Unknown
  Description of Unknown: uncultivated organism sequence
  Category: MG75 effectors
  Description: MG75-166 effector
MILSDRVALPWFPSEEFASDEEMIRAINETYNTLKEVLSIDGDSSLRSLLLNISSYDIKHIYIANDLGLTDISQQMFGQYDVYTSAIKQELREKNAPTAKERRNPELYDERINKLFKSAKSFSIEHLNSLVDSEHTIQNYYKHLGAYDRNGEQRVNLFTQIEMAYVAAKEILSGKHGNISQSDAETAIIKGLLDAFKSLQRFIKPLLGNGEEADKDNEFDAKLREAWNTLDIVTPLYNKVRNWLTRKPYSTEKIKLNFENAQLLGGWDVNKEPDCTSILLRKNGLYYLAIMNKKYNHAFDIDNLPNDGKCYEKIDYKLLPGANKMLPKVFFSKSRIKEFAPSEIIVNAYKKGSHKKGANFSISDCRRLIDFFKASISKHEDWKNFPFSFSSTETYEDISGFYREVEQQGYMLGFRNVSESFIKQLVDEGKLYLFQIWNKDFSDFSKGTPNMHTLYWKMLFDEHNLANVVYKLNGQAEVFYRKSSLDVANTTIHKAHQPIMNKNQENKKRQSTFDYDIIKNRRYTVDKFQFHVPISINFKATGRDNVNDNVLDIIRNGGIKHIIGIDRGERHLLYLSLIDLKGNIVKQMTLNDIVNEYNGNTYATNYKNLLAEREGNRTEARKNWKKIENIKDIKKGYLSQVVHIISKMMVEYNAIVVLEDLNMGFMRGRQKIERSVYEQFEKMLIDKLNYYVDKQKNSDEAGGLLHALQLTSKFESFKKLGKQSGCLFYIPAWNTSKIDPVTGFVNLFDTRYTNADQARKFFSQFDSIRYNADKDWFEFAFDYNKFTAKAKDTRTKWTLCTYGTRIRTFRNSERLNQWDNEEVVLTDEFKKAFANADINIQGNLKEAICSLQDKKYLEPLMHLMKLLLQMRNSITNSEVDYLLSPVADENGTFYDSRVCSASLPKDADANGAYNIARKGLWAIHQIQETPAGDRPNLAIKNKDWLNFAQQKPYMNE

SEQ ID NO: 1681 - protein, 1236 aa, Unknown
  Description of Unknown: uncultivated organism sequence
  Category: MG75 effectors
  Description: MG75-167 effector
MKQLSELTGLYSLSKTLRFELKPIGKTLEHIESKGLIAQDEQRAEEYKKVKDIIDRYHKKFITMCLSNFKFEQNSLETYVALAEDTNRDEKVFDEIKKTLRKQIVETFKKGGSYSDLFKKELIQKHLPEFVSDEEEKKMIANFSKFTTYFNGFNENRKNMYSDEDKSTAIAYRLIHENLPMFVNNMKSFSRIADSDVHQHFTEIESSFSEYLGVEHLEEMFQLDYFSETLTQEQIAVYNHIIGGRALEDGTKLKGINEYVNLYNQQYKDSRLPLLKPLYKMILSDRVALPWFPSEEFASDEEMIRAINETYNTLKEVLSIDGDSSLRSLLLNISSYDIKHIYIANDLGLTDISQQMFGQYDVYTSAIKQELREKNAPTAKERRNPELYDERINKLLKSAKSFSIEHLNSLVDSEHTIQNYYKHLGAYDRNGEQRVNLFTQIEMAYVAAKEILSGKHGNISQSDAETAIIKGLLDAFKSLQRFIKPLLGNGEEADKDNEFDAKLREAWNTLDIVTPLYNKVRNWLTRKPYSTEKIKLNFENAQLLGGWDVNKEPDCTSILLRKNGLYYLAIMNKKYNHAFDIDNLPNDGKCYEKIDYKLLPGANKMLPKVFFSKSRIKEFAPSEIIVNAYKNGSHKKGANFSISDCRRLIDFFKASISKHEDWKNFPFSFSSTETYEDISGFYREVEQQGYMLGFRNVSESFIKQLVDEGKLYLFQIWNKDFSDFSKGTPNMHTLYWKMLFDEHNLANVVYKLNGQAEVFYRKSSLDVANTTIHKAHQPIMNKNQENKKRQSTFDYDIIKNRRYTVDKFQFHVPISINFKATGRDNVNDNVLDIIRNGGIKHIIGIDRGERHLLYLSLIDLKGNIVKQMTLNDIVNEYNGNTYATNYKNLLAEREGNRTEARKNWKKIENIKDIKKGYLSQVVHIISKMMVEYNAIVVLEDLNMGFMRGRQKIERSVYEQFEKMLIDKLNYYVDKQKNSDEAGGLLHALQLTSKFESFKKLGKQSGCLFYIPAWNTSKIDPVTGFVNLFDTRYTNADQARKFFSQFDSIRYNADKDWFEFAFDYNKFTAKAKDTRTKWTLCTYGTRIRTFRNPAKLNQWDNEEVVLTDEFKKAFANADINIHGNLKEAICSLQDKKYLEPLMHLMKLLLQMRNSVTNSEVDYLLSPVADENGTFYDSRVCSAYLPKDADANGAYNIARKGLWAIHQIQESPAGNRPNLAIKNKDWLNFAQQKPYMNE

SEQ ID NO: 1682 - protein, 1271 aa, Unknown
  Description of Unknown: uncultivated organism sequence
  Category: MG75 effectors
  Description: MG75-168 effector
MNNNLNKFTGLYQLSRTLRFELKPIRKTRDNIERNGFLANDEHRAESYKKVKKLIDRYHKAYIDSVLGRFCLNEDVLANYYDLYMRSSKTEKEAKEFEAIQDYLRKSISAALKKDDRFKRIDKKELIREDMIAYLTDDEEKALVEEFHDFTTYFTGFHENRQNMYSAEAKSTAIAYRLIHDNLPKFIDNIAVFRQIAETSVADNFLKIYMENEEYLNVNSIEEMFDISYYSMVLTQTQIEVYNSIIGGRTLEDGTKLQGINEYINLYNQNLTDKKKRLPKLKPLFKQILSDRAQLSWLQEEFNTGADVIDAVKEYCKDYYDNIEKSIKALLKSLNDYDISKIYVPNDLQLTDISQRMFGNWSIIPNAIEHDIMYNNPRKANETEEKYAERIAKLKKQQKSFSLAYINDCLRELKDADLSTYFASLGAQNTAEKQTTSITSEIDIYYKQLRPLFNVEYPREKNLSQDKLTVMQLKDLLDAFKTLQRFVKPLLGNGDEAEKDEKFYGELMQLWEIINNLTPLYNKVRNYVTRKPFSTEKIKVNFENAQLLDGWDENKEKDNASIILRKDGIYYLGVMKKEQRKLLAKPMPSSGECYEKVVYKFFKDITTMVPKCTTQTKPVKEHFENSTEDYILFDKKSFDAPVVITKEIFDLNNVLYNGVKKFQIEYLRSTNDKKGYEHAVNTWKAFCIQFLKSYKSTSIYNLSSIEEDIEKYKDLNSFYSAVNLLLYSLTFRKVSVDYIDQLVEEDKMYLFQIYNKDFSQYSKGTPNMHTMYWKMLFDEENLKDVVYKLNGQAEVFFRKKSINVSSPTHPANKPIDNKNALNKKKQSTFEYDLIKDRRYSVDKFQFHVPLTLNFKSRGTGNINIDVREYIKESNDIHFIGIDRGERHLLYLCVIDGKGNIVEQYSLNEIVNEYKGNKYSTDYHNLLQERDKKRLEERSSWQTIEGIKELKQGYLSQVVHKISQLVVKYNAIVILEDLNMGFKRGRQKVESSIYQQFEKALIDKLNYLVDKSKAPSEEGGLLRAYQLTSKFDSFQKMGKQSGFLFYIPAWNTSKIDPVTGFVNLFDTRYDNVAKSQAFFNKFDSIRYNEKKDWFEISFDYNNFTAKAEGTKTQWTLCTYGTRIETFRNVDKNSNWDSKEVNLTEKWKSLFDDYSIKYDSNLKDAIIQQSSKEFYVRLLHLLKLTLQMRNSITGTEVDYMISPVADANGKFFDSRKSDSSLPENADANGAYNIARKGLWIAQQIREAEDLKKVKLAITNKEWLQFAQTKPYLG

SEQ ID NO: 1683 - protein, 1236 aa, Unknown
  Description of Unknown: uncultivated organism sequence
  Category: MG75 effectors
  Description: MG75-169 effector
MKQLSELTGLYSLSKTLRFELKPIGKTLEHIESKGLIAQDEQRAEEYKKVKDIIDRYHKKFITMCLSDFKFEQNSLETYVALAEDTNRDEKAFDEIKKTLRKQIVETFKKGGSYSDLFKKELILKHLPEFVSDEEEKKMIANFSKFTTYFNGFNENRKNMYSDEDKSTAIAYRLIHENLPMFVNNMKSFSRIADSDVHQHFTEIESSFSEYLGVEHLEEMFQLDYFSETLTQEQIAVYNHIIGGRALEDGTKLKGINEYVNLYNQQHKDSRLPLLKPLYKMILSDRVALPWFPSEEFASDEEMIRAINETYNTLKEVLSIDGDSSLRSLLLNISSYDIKHIYIANDLGLTDISQQMFGQYDVYTSAIKQELREKNAPTAKERRNPELYDERINKLFKSARSFSIEHLNSLVDSEHTIQNYYKHLGAYDRNGEQRVNLFTQIEMAYVAAKEILSGKHGNINQSDAETAIIKGLLDAFKSMQRFIKPLLGNGEEADKDNEFDAKLREAWNTLDIVTPLYNKVRNWLTRKPYSTEKIKLNFENAQLLGGWDVNKEPDCTSILLRKNGLYYLAIMNKKYNHAFDIDNLPNDGKCYEKIDYKLLPGANKMLPKVFFSKSRIKEFAPSEIIVNAYKKGSHKKGANFSISDCRRLIDFFKASISKHEDWKNFPFSFSSTETYEDISGFYREVEQQGYMLGFRNVSESFIKQLVDEGKLYLFQIWNKDFSDFSKGTPNMHTLYWKMLFDEHNLANVVYKLNGQAEVFYRKSSLDVANTTIHKAHQPIMNKNQENKKRQSTFDYDIIKNRRYTVDKFQFHVPISINFKATGRDNVNDNVLDIIRNGGIKHIIGIDRGERHLLYISLIDLKGNIVKQMTLNDIVNEYNGNTYATNYKNLLAEREGNRTEARKNWKKIENIKDIKKGYLSQVVHIISKMMVEYNAIVVLEDLNMGFMRGRQKIERSVYEQFEKMLIDKLNYYVDKQKNSDEAGGLLHALQLTSKFESFKKLGKQSGCLFYIPAWNTSKIDPVTGFVNLFDTRYTNADQARKFFSQFDSIRYNADKDWFEFAFDYNKFTAKAKDTRTKWTLCTYGTRIRTFRNPARLNQWDNEEVVLTDEFKKAFANADVNIHGNLKEAICSLQDKKYLEPLMHLMKLLLQMRNSITNSEVDYLLSPVADENGTFYDSRVCSASLPKDADANGAYNIARKGLWAIHQIQETPAGDRPNLAIKNKDWLNFAQQKPYMNE

SEQ ID NO: 1684 - protein, 1236 aa, Unknown
  Description of Unknown: uncultivated organism sequence
  Category: MG75 effectors
  Description: MG75-170 effector
MKQLSELTGLYSLSKTLRFELKPIGKTLEHIESKGLIAQDEQRAEEYKKVKDIIDRYHKKFITMCLSDFKFEQNSLETYVALAEDTNRDEKVFDEIKKTLRKQIVETFKKGGSYSDLFKKELIQKHLPEFVSDEEEKKMIANFSKFTTYFNGFNENRKNMYSDEDKSTAIAYRLIHENLPMFVNNMKSFSRIADSDVHQHFTEIESSFSEYLGVEHLEEMFQLDYFSETLTQEQIAVYNHIIGGRALEDGTKLKGINEYVNLYNQQHKDSRLPLLKPLYKMILSDRVALPWFPSEEFASDEEMIRAINETYNTLKEVLSIDGDSSLRSLLLNISSYDIKHIYIANDLGLTDISQQMFGQYDVYTSAIKQELREKNAPTAKERRNPELYDERINKLFKSAKSFSIEHLNSLVDSEHTIQNYYKHLGAYDRNGEQRVNLFTQIEMAYVAAKEILSGKHGNISQSDAETAIIKGLLDAFKSLQRFIKPLLGNGEEADKDNEFDAKLREAWNTLDIVTPLYNKVRNWLTRKPYSTEKIKLNFENAQLLGGWDVNKEPDCTSILLKKNGLYYLAIMNKKYNHAFDIDNLPNDGKCYEKIDYKLLPGANKMLPKVFFSKSRIKEFAPSEIIVNAYKKGSHKKGANFSISDCRRLIDFFKASISKHEDWKNFPFSFSSTETYEDISGFYREVEQQGYMLGFRNVSESFIKQLVDEGKLYLFQIWNKDFSDFSKGTPNMHTLYWKMLFDEHNLANVVYKLNGQAEVFYRKSSLDAANTTIHKAHQPIMNKNQENKKRQSTFDYDIIKNRRYTVDKFQFHVPISINFKATGRDNVNDNVLDIIRNGGIKHIIGIDRGERHLLYLSLIDLKGNIVKQMTLNDIVNEYNGNTYATNYKDLLAEREGNRTEARKNWKKIENIKDIKKGYLSQVVHIISKMMVEYNAIVVLEDLNMGFMRGRQKIERSVYEQFEKMLIDKLNYYVDKQKDSDEAGGLLHALQLTSKFESFKKLGKQSGCLFYIPAWNTSKIDPVTGFVNLFDTRYTNADQARKFFSQFDSIRYNADKDWFEFAFDYNKFTAKAKDTRTKWTLCTYGTRIRTFRNSERLNQWDNEEVVLTDEFKKAFANADINIHGNLKEAICSLQDKKYLEPLMHLMKLLLQMRNSITNSEVDYLLSPVADENGTFYDSRVCSASLPKDADANGAYNIARKGLWAIHQIQESPAGDRLNLAIKNKDWLNFAQQKPYMNE

SEQ ID NO: 1685 - protein, 1235 aa, Unknown
  Description of Unknown: uncultivated organism sequence
  Category: MG75 effectors
  Description: MG75-171 effector
MKQLNELTGLYSLSKTLRFELKPIGKTLEHIESKGLIAQDEQRAEEYKKVKDIIDRYHKAFITMCLRDFNFDQNSLETYVALAEDSNRDEKDFDEIKKALRKQIVEAFKKGGSYSDLFKKELIQKHLPEFVKDEEEKKMVENFSKFTTYFSGFNENRKNMYSDEDKSTAIAYRLIHENLPMFIDNMKSFGKIAVSDVSQHFSEIESSFSEYLNVEHLADMFQLDYFSETLTQEQIAVYNHIVGGRTLEDGTKLQGVNEYVNLYNQQHKDNRLPLLKPLYKMILSDRVALSWLPEEFASDEEMINAINETYNTLKDVLMGNGDNSLRNLLLNIDKYDVEHIYIGNDLGLTDISQQLFGQYDVYTSAIKQELRNSVSPTAKERREPELYAERINKLFKSAKSFSILYLNSLVDSEHTIQSYYKQLGAYDRGGEQRINLFSQIEMAYVAAKDILSGKHGNISQSDADTAIIKNLLDAYKSLQRFIKPLLGDGEEADKDNEFDAKLREAWDALDIVTPLYNKVRNWLTRKPYSTEKIKLNFENAQLLGGWDVNKEPDCTSVLLRKNGFYYLAIMNKKYNHAFDIDNLPHNGKCYEKIDYKLLPGANKMLPKVFFSNSRIKEFAPSDAIVSAYRKGTHKKGSNFNISDCRRLIDFFKASIMKHEDWKKFPFSFSPTETYEDISGFYREVEQQGYMLGFRNVSESFINQLIDEGKLYLFQIWNKDFSEFSKGTPNMHTLYWKMLFDERNLANVVYKLNGQAEVFYRKRSLDVANTTIHKAHQPIVNKNQENKKLQSTFEYDIIKNRRYTVDKFQFHVPISINFKAIGRDNVNDNVLDIIRNGGIKHIIGVDRGERHLLYLSLIDLNGNIVKQMTLNDIVNEYNGNTYATNYRDLLAEREGNRTEARKNWKEIENIKDIKQGYLSQVVHIISKMMVEYDAIVVLEDLNMGFMRGRQKIERSVYEQFEKMLIDKLNYYVDKQKSVNEAGGLLHALQMTSKFESFKKLGKQSGCLFYIPAWNTSKIDPVTGFVNLFDTRYTNADQARRFFSQFDVIRYNADKDWFEFAFDYNNFTAKAEGTRTKWILCTYGTRIRTFRNPAKLNQWDNEEVVLTDEFKKAFANADIDIHGNLKEAICSLQDKKYLEPLMHLMKLLLQMRNSITNSEVDYLLSPVADENGKFYDSRTCSDSLPKDADANGAYNIARKGLWAIRQIQETPAGERSNLAIKNKEWLNFAQQKPYENE

SEQ ID NO: 1686 - protein, 967 aa, Unknown
  Description of Unknown: uncultivated organism sequence
  Category: MG75 effectors
  Description: MG75-172 effector
MSDRESVSWLPPKFDSDKDLLIKIKECYYALSEREKVFDKLESILKSLSTYDLSKIYISNDSQLSYISQKMFGRWDIISKAIREDCAKRNPQKSRESLEKFAERIDKKLKTIDSISIGDVDECLAQLGETYVKRVEDYFVAMGELEIDDEQTDTTSFKKNIEGAYESVKELLNNADNITDNNLMQNKGNVEKIKTLLDAIKDLQRFIKPLLGKGDEADKDGVFYGEFTSLWTKLDTVTPLYNMVRNYLTSKPYSTKKIKLNFENSSLMKGWDLNKEPDNTTVIFRKDGLYYLGIMGKKYNRVFVDREDLPHDGECYDKMEYKLLPGANKMLPKVFFSETGIQRFRPSEELLGKYERGTHTKGAGFDLGYCRALIDFFKKSIERHDDWKKFDFKFSDTSTYQDISEFYREVEQQGYKMSFRKVSVDYIKSLVEEGKLYLFQIYNKDFSAHSKGTPNMHTLYWKMLFDEENLKDVVYKLNGEAEVFFRKSSITVQSPTHPANSPIKNKNKDNQKKESKFEYDLIKDRRYTVDKFLFHVPITMNFKSVGVSNINQLVKRHIRSATDLHIIGIDRGERHLLYLTVIDSRGNIKEQFSLNEIVNEYNGNTYRTDYHELLDTREGERTEARRNWQTIQNIRELKEGYLSQVIHKISELAIKYNAVIVLEDLNFGFMRSRQKVEKQVYQKFEKMLIDKLNYLVDKKKPVAETGGLLRAYQLTGEFESFKTLGKQSGILFYVPAWNTSKIDPVTGFVNLFDTHYENIEKAKGFFDKFKSIRYNSDKDWFEFVVDDYTRFSPKAEGTRRDWTICTQGKRIQIYRNPQRNNEWEGREIDLTKAFKEHFEAYGVDISKDLREQINTQNKKEFFEELLRLLRLTLQMRNSMPSSDIDYLISPVADDTGCFFDSRKQAELKENAVLPMNADANGAYNIARKGLLAIRKMKQEENDSAKISLAISNKEWLKFAQTKPYLED

SEQ ID NO: 1687 - protein, 1236 aa, Unknown
  Description of Unknown: uncultivated organism sequence
  Category: MG75 effectors
  Description: MG75-173 effector
MKQLSELTGLYSLSKTLRFELKPIGKTLEHIESKGLIAQDEQRAEEYKKVKDIIDRYHKKFITMCLSDFKFEQNSLETYVALAEDTNRDEKSFDEIKKTLRKQIVETFKKGGSYSDLFKKELIQKHLPEIVTDEEEKKMIANFSKFTTYFNGFNENRKNMYSDEDKSTAIAYRLIHENLPMFVDNMKSFSRIADSDVHQHFTEIESSFSEYLGVEHLEGMFQLDYFSETLTQEQIAVYNHIIGGRVLEDGTKLKGINEYVNLYNQQHKDSRLPLLKPLYKMILSDRVALPWFPSEEFASDEEMIGAINETYNTLKDVLSIDGDSSLRCLLLNISSYDIKHIYIANDLGLTDISQQMFGQYDVYTSAIKQELRTTNAPTAKERRTPELYDERINKLFKSAKSFSIEYLNSLVDSEHTIQNYYKHLGAYDRNGEQRVNLFTQIEMAYVAAKEILSGKHGNISQSDAETAIIKGLLDAFKSLQRFIKPLLGNGEEADKDNEFDAKLREAWNTLDIVTPLYNKVRNWLTRKPYSTEKIKLNFENAQLLGGWDVNKEPDCTSILLRKNGLYYLAIMNKKYNHAFDIDNLPNDGECYEKIDYKLLPGANKMLPKVFFSKSRIKEFAPSEIIVNAYKKGSHKKGANFSISDCRRLIDFFKASISKHEDWKNFPFSFSSTETYEDISGFYREVEQQGYMLGFRNVSESFIKQLVDEGKLYLFQIWNKDFSDFSKGTPNMHTLYWKMLFDEHNLANVVYKLNGQAEVFYRKRSLDVANTTIHKAHQPIMNKNQENKKRQSTFDYDIIKNRRYTVDKFQFHVPISINFKATGRDNVNDNVLDIIRNGGIKHIIGIDRGERHLLYLSLIDLKGNIVKQMTLNDIVNEYNGNTYATNYKNLLAEREGNRTEARKNWKKIENIKDIKKGYLSQVVHIISKMMVEYNAIVVLEDLNMGFMRGRQKIERSVYEQFEKMLIDKLNYYVDKQKNSDEAGGLLHALQLTSKFESFKKLGKQSGCLFYIPAWNTSKIDPVTGFVNLFDTRYTNADQARKFFFQFDSIRYNADKDWFEFAFDYNKFTAKAKDTRTKWTLCTYGTRIRTFRNPARLNQWDNEEVVLTDEFKKAFANADINIHGNLKEAICSLQDKKYLEPLMHLMKLLLQMRNSITNSEVDYLLSPVADENGTFYDSRVCSASLPKDADANGAYNIARKGLWAIHQIQESPAGDRPNLAIKNKDWLNFAQQKPYMNE

SEQ ID NO: 1688 - protein, 1237 aa, Unknown
  Description of Unknown: uncultivated organism sequence
  Category: MG75 effectors
  Description: MG75-174 effector
MHTMKKINELTALYPLSKTLRFELKPIGKTLDHIEQKGLIVQDEQRAEEYKQVKNIIDSYHKEFITMCLKGLKLNMIYLERYESLARDVHRDEAEFDKVKAALRKQIVEAFKQGGSYNDLFKKELIQKHLPEFVESEEEKKMVANFSKFTTYFTGFYENRKNMYSDEEKSTAIAYRLIHENLPLFLDNMRSFRKIAESEVGEHFANIEVCFEEYLNVEHLAEMFELDYFSDTLTQEQIAVYNSVIGGRTLDDGTKIQGINEYVNLYNQQHKEARLPLLKPLYKMILSDRVALSWLPENPFESDEEMVEAIKEMCQSLKEVLMGNDGLRNLLLNIDLYDIEHIYIANDLGLTDISQQMFGQYDVYASAIKQELRQGVKQSPKERREPELFEERINRLYKSAKSFSIAYLNSHTDANHTIESYFKQLGAYDREGEQRINLFTQIEMAQIEATDIFAGKHGNISQSDKEIAILKGLLDAYKSLQHFVKPLLGHGDEADKDNEFDAKLREAWNALDIVTPLYNKVRNWLTRKPYSVEKIKLNFENAQLLGGWDVNKEPDCTSVLLRKDGFYYLAIMDKKSNHAFDSDELPCDGKCYEKIDYKLLPGANKMLPKVFFSKSRIDEFAPSKEIVEAYKNGTHKKGKDFNLAHCRRLIDFFKRSITKHEDWKNFPFVFSPTESYEDISGFYREVEQQGYMLSFRKVSESFINQLVDEGKLYLFKIWNKDFSEYSKGMPNMHTLYWKMLFNEQNLADTVYKLNGQAEVFYRKRSLDVADTTVHRASQPLVNKNALNKKRHSTFDYDIVKDRRYTVDKFQFHVPMTMNFKAVGRDNINSEVLNIIRNDGIKHIIGIDRGERHLLYLSLIDLKGNIVKQMTLNDIVNEYNGNTYATNYRDLLAEREGNRTEARRNWKKIENIKEIKQGYLSQVVHIISKMMVEYDAIVVLEDLNMGFMRGRQKIERSVYEQFEKMLIDKLNYYVDKQKRIDEAGGLLHALQLTSKFESFKKLGKQSGCLFYIPAWNTSKIDPVTGFVNLFDTRYVNADKAREFFSKFDSIRYNDAKNWFEFAFDYNKFTEKAKGTRTRWTLCTWGTRIRTFRNPAKLNQWDNEEVVLTDVFKKAFDEAGIDIHSNLKEAICTLTEKKHLESLMHLMKLLLQMRNSITNSEIDYLLSPVADENGHFYDSRTCDDTLPKDADANGAYNIARKGLWAIRTIQENSETERPNLALKNQDWLRFAQQKPYLND

SEQ ID NO: 1689 - protein, 1142 aa, Unknown
  Description of Unknown: uncultivated organism sequence
  Category: MG75 effectors
  Description: MG75-175 effector
MKKFLDNDDDKALLDEFYEFTTYFTGFHENRKNMYSDEAKSTAIAYRLIHDNLPKFIDNMAVFRKIASTSVAEKFSTIYKAFEEYLNVNSIDEMFSLDYYNIVLTQSQIEVYNSIIGGRTLEDGTKIQGINEYINLYNQQKTNKKERLPKLKPLFKQILSDRVQLSWLQEEFNTGTDVLNAVKEYCTSYFDNVEEAVKVLLTGIGDYDLSKIYITNDLAITDVSQRMFGEWCIIPNAIEQRLRNDNPQKAKETEEKYSDRISKLKKLPKSFSLGYINECISELKGVDIADYYAALGAINTESKQEPSIPTKIQVHYNALKQILDTDYPREKNLSQDKLTVMQLKDLLDDFKALQRFIKPLLGNGDEADKDEKFYGELMQLWEVIDSITPLYNKVRNYSTRKPFSTEKIKVNFENAQLLDGWDENKESTNASIILRKDGMYYLGIMKKEHRNILNQPMPSDGDCYDKVVYKFFKDITTMVPKCTTQMKSVKEHFTNSNDDYTLFDKDKFLAPVVITKEIFDLNNVLYDGVKKFQVGYLNNTGDSQGYNHAVAIWKSFCLQFLKTYKSTSIYNFSSIEKNFDRYTDLNSFYGAVNLLLYSLTYRKVSVDYIQQLVDDDKMYLFRIYNKDFSPYSKGTPNMHTLYWKMLFDDCNLSDVVYKLNGQAEVFFRKKSINYQRPTHPANKPIDNKNVNNPKKQSTFDYDLIKDRRYTLDKFMFHVPITLNFKGMGSGDINMQVREYIKATDDLHFIGIDRGERHLLYICVINCKGDIVEQYSLNEIVNNYKGIDYSTDYHALLSDRDKKRKEERSSWQTIEGIKELKAGYLSQVIHKITQLMVKYNAIVLLEDLNMGFKRGRQKVESSVYQQFEKALIEKLNYLVDKNKDVNEIGGLLHAYQLTNDTKLQNKNGKQDGFLFYVPAWNTSKIDPVTGFVNLLDTRYENVATAQAFFNKFDSIRYNKEFDRFEFKFDYANFTAKAEDTRTQWTLCTCGTRVETFRNAEKNSNWDSREIDLTSEWKSLFAKHNISLDTNLKEAILLQSNKTFYTDILHLMKLTLQMRNSVTGTDIDYMVSPVSNECGEFFDSRYAKDGLPVNADANGAYNIARKGLWLAQQIKNASNLSEVKLAITNKEWLRFAQSKPYLND

SEQ ID NO: 1690 - protein, 1227 aa, Unknown
  Description of Unknown: uncultivated organism sequence
  Category: MG75 effectors
  Description: MG75-176 effector
MKNLYSDLHNLYGLSKTLRFELQPVGRTKENFENYILDSDEEKSEKFKKVKAYCDEVHKNFIKNCLEKIDLADIKPLLKRYYELFLINNRSEQEDKEFEKIQENLCKKISGNFKNNDLYKGLFEKDMIKKYLPEYFKNDKEKLKEISLFFDFTTYFTGYHKNRQNMYSEENKSTAISFRLIKQNLPTFIKNMQNFKKIQNVIPTIGKTLTSKLGINIEYLFSNVEVYAECLTQKAIDMYNCAIGGKTLDNGEKIQGINEFINLYNQQNPNKKLPKLKFLYKQILSDNTSVSFKIDKIEDDKELIDLINSYYEKLKPVIESIDKVSGETELVLAIKNLSNYDLSRIWINQDDLTNVSQQVYGDWSYITHLLEEEYNSQNPKGAKQSIEKYNEKRSKDLKKIKEYSFAHLNSLVAQNDDCAKNKLYTYFVENLLKIITDIKSSQLQCNEILTRNHEENNKTLLGDFSSISLIKDFLENMKKLQNLVKTFMPKTIGIETDDLFYNALNYEILSEIIPVYNKVRNYVTQKSYSVEKFPLTFHCPTLLDGWDLNKEESNLSILFEKDGFYYLGIMNKKDNKIFKNIQPTKENEEVYRKIEYKLLPGPNKMLPKVFFSESRITEFNPTNELLSKYKKGCHKKGIDFDINFCRDLIDFYKKSLSIHQDWSQFNFKFDDTNKYQDISKFYRQVEEQGYRISTTNISEKYIDSLVEDGKLFLFKIYNKDFSEYSKGTPNLHTLYWKALFDEDNLKNVVYKLNGGAEIFYRKKSIEYKITHPKNQLIKNKNELNDKKESIFDYDLIKNKRFTMDKFLFHVPITLNFKSKNLEYINELVNLKIKENNNINVIGIDRGERNLIYLTVVNSKGELLEQLSLNEIVNEYNDKTYRTNYHDLLNKKEQERNEARKSWGAIKNIKELKEGYMSQVIHKITDLMIKYNAIIVLEDLNSGFKNSRKKVEKQVYDKFETMVINKLSYFVDKKQGKFDEGGLLNAYQLVNKDSKGKQSGVLFYIPAWNTSKIDPVTGFVNLFCIKNMSIEKAKEFFNKFENIKYNKEENFFEFDFDYSKFSDKACGIRKDWTICTYGERIKTFRNPSKNNQWDNEEIKLTEKFKELFEKYSINLLNIKNGIQNQTEKKFFDSLIGLFKLTLQMRNSVTNTDIDYILSPIKDKNGNFYDSRKNIKTLPKDADANGAYNIARKGLMLIEQIKETENLSKLKLKSITNEQWLTYVQEKNR

SEQ ID NO: 1691 - protein, 1245 aa, Unknown
  Description of Unknown: uncultivated organism sequence
  Category: MG75 effectors
  Description: MG75-177 effector
MAENRKIDNLQNLYPNTKTIVNKLIPQGATLRNFENNHLLENDTERKDNYQIVKKLIDEYHKFFIEQSLSNVTYIDGLDEYIDVYFNSSDDKNELDSLEDKLRKNIANLFTKSSKYSDMFKKEMITKLLPEFLEATNNLEYLDIVNSFAEFTTYFKGFFDNRKNMYTSEAQSTGIAYRCINDNLPKFLDNVKSFNRAKDKLSEKNLTDLNNDFEGLCGTTTENVFSADYYVFVLAQSGIDRYNEIIGGYTTSDGTKIKGVNEYINLYNQRCQNKSDRIPNMKPLFKQILSDRQTVSFIPDSFSDDNEVLKAVYSAYNDNDTELEYKSIKETVDKIKNLFIDFEEPQLNGIYIKNGLPVTDLSNGIFKNWSMIRNLWNDDYDSKHKPAKVKDIEKYEDKRSSQYRSNKSLSLGFLQELVNKSENDEIGSKSISEYYREKTLELTENIQRTYFKAESLLESKYDIKKKNLKSDEESIALIKDFLDSIKELEKLLKPLCGTGKEQDKNEVFYGEFIPLFNYLCNIDSLYNKVRNYVTQKPYSTEKIKLNFENPQFLKGWDRNKEKDYRSVLLIKDQEYYLGVMNKGDSKIFENLSFDGEKECYTKVVCKLLPGPNKMLPKVFFAKSNIDFFAPSDEIQTLYKAGTFTKGKSFNIDDCHKLIDFYKQSLYKHPDWSTFNFEFRETSLYNDISEFYNDIHNQGYKISFDSVPESYINELVNKGKLYLFKIYNKDFSKYSKGTPNLHTLYFKMLFDERNLKDVVYKLNGRAEMFYRPASIMENDIISHPANQPIKNKNPHSEKTHSTFEYDLIKDKRYTKAQFSLHIPITLNFKASGAGSINDKVNELLKNCDDNYVIGIDRGERHLLYLTVINGRGEVVEQYSLNTIINEYNNKTHKVDYHNLLSEKETKRKEARQNWTAIENIKELKEGYISQVVHKICELVVKYDAVICMEDLNAGFKQGRTKFEKQVYQKFEKMLIDKLNYFVDKKKAPEENGGLLKAYQLTNKFDSFKKMGRQNGIVFYVPAWLTSKIDPSTGFVDLLKPKYKSVEDSKNFFSRFDSIRYNSDEDWFEFEFDYDNFPRGSASFRKRWTVCTFGKRIRTYRNPEKNSEWDNEEIDITASFKELFNNYSIDYIRNNLKTEIQNQTQKDFFQKLIKLFALTVQMRNSITNTDIDYLISPVMDKNGNFYDSRNYDNDSKLPANADANGAYNIARKGLWAIEQIKNTDDGKRPKLAISNKEWLKLAQSADM

SEQ ID NO: 1692 - protein, 1274 aa, Unknown
  Description of Unknown: uncultivated organism sequence
  Category: MG75 effectors
  Description: MG75-178 effector
MNNNLNKFTGLYQLSKTLRFELKPIGKTLDNIQNNGFIANDEHRAESYKLVKKLIDNYHKDYIESVLDNFELNKEVLYSLYELYTCTNKTEKETKQYEAAQDSLRKAISSALKKDERFKHIDKKELIREDMLNYLDNEQDKALVNEFHDFTTYFTGFNENRQNMYAAEAKSTAIAYRLIHENLPKFIDNIAIFKKIAETSVADNFPALYQHYEEYLNVNDIGEIFELDYYNIVLTQKQIEVYNNIIGGRTLSDDTKIKGINEYVNEYNQKQKDKKDRLPKLKPLFKQILSDRVQLSWLQEEFQTGADVLNAIKNYCDTYFADIHESIKALLTSLKEYDLSKIYIPNDLQLTDISQQMFGNWSIIPNAIEQDIKNNNPRKAKEDEEKYSQRIDKIKKQAKSYSLAYINACIKELNNADVATHFASLGAIDNNEKQKASITADIVVHYNQLKPLFGVEYPKEKNLSQDKLTVMQIKDLLDDFKSLQRFVKPLLGNGDEAEKDEKFYGELMQLWEVINNITHLYNKVRNYSTRKPYSTDKIKINFENAQLLDGWDENKEKTNASIILRKNGLYYLGIMKKEHRKLLDKPMPSSGECYEKVVYKFFKDITTMVPKCTTQTKAVATHFKDSGEDYILFDKKNFNEPIVITKEIYELNNVLYDGVKKFQIEYLRTTNDKKGYEHAVNIWKNFCMQFLKAYKSTSIYDLSSIEKNIGNYGDLNSFYSAVNLLLYSLTFRSVSVDYINMLVDEDKMYLFQIYNKDFSTFSKGTPNMHTLYWKMLFDPQNLANVVYKLNGQAEVFFRKKSITIAKPTHPANKPIDNKNPANGKKQSIFDYDLIKDRRYTVDKFQFHVPITINFKSNGSDNINMMVKEHIKTSDDMHYIGIDRGERHLLYLCVIDNKGNIVEQYSLNNIKNEHNGNNYDTDYRNLLQERDKKRQEERSSWQTIEGIKELKQGYLSQVIHKITQLMVKYNAIVVLEDLNMGFKRGRQKVESSVYQQFEKALIDKLNYLVDKKKAPTEPGGLLHAYQLTSKFDSFQKMGKQSGFLFYIPAWNTSKIDPVTGFANLFDSRDTRYENIAKAQAFFNKFDSIRYNEKKDWFELSFDYNNFTSKAEGTKSKWTICTQGTRIETFRNTEKNSNWDSKEIQLTDEWKKLFTEYSIPFKSNLKDAIAQQSNKDFYTKLLSLLKLTLQMRNSITGTDVDYMISPVANVKGEFFDSRNSNATLPENADANGAYNIARKGLWIAKQIKEAEDLSKVKLAMSNKDWLQFAQTKPYLV

SEQ ID NO: 1693 - protein, 1286 aa, Unknown
  Description of Unknown: uncultivated organism sequence
  Category: MG75 effectors
  Description: MG75-179 effector
MNKSILSRFTNLYQVSKTLRFELQPVGKTKENIEENGILLRDEKRAADCKIVKEIIDEYHKQYIENRLKDFKLPLNSEGKHDSLEEYQALYEMSKRSEADEATFKEVKDNLRSIIAERLTNAPTYKCIFGKELIRKELVDFLEDENAKEIVSQFADFTTYFGGFHKNRENMYSGEEKSTAIAYRLIHQNLPRFMDNMKAFERIAATSVAEHFVDIFEGWEEYLNVGSIEEIFRLDYFSDALTQQHIEVYNYIIGKKVLEDGSEIKGINEYVNLYNQQQKDKKLRLPLLVPLYKQILSDREKLSWIAEEFDSDDKMLAAITETYSHLHDLLMGEENESLRSLLVHLKDFDLSRINITNDLSLTDISQHLFGRYDVFTSGIKDELRAITPRKRNETDEQLGDRISKIFKTQQSFSIAFLNTLSQPALEGGNPRKIEDYFMALGAVNTETTQKENLFAQIEYAYEDVRAVLQMKETDNMLSQNKQAVAKIKAFLDALKGLQHFVKPLLGSGEEEEKDELFYGSFQMMWDELDAITPLYNKVRNWLTRKPFSTEKIKLNFDNAQLLEGWDENKETTNASIILRKDGFYYLGIIRKDCRKLLGAPMPSDGECYDKVVYKFFKDITTMVPKCTTQKKDVVAHFAHSKEDYILFDKKTFNAPVTITKEVYDLNNVLYNGIKKFQIEYLRSTGDKVGYEHAVSTWKSFCMSFLKAYKSTSIYNLALVEQHINSYNDLSSFYNAVNLLLYSLTYRKVSVNFIHSLVDEGKLYLFRIWNKDFSEFSKGTPNLHTLYWKMLFDERNLADVVYKLNGQAEVFYRKSSIKPENRIIHLANKPIANKNELNRKHESTFKYDIIKDRRYTFDKFQFHVPITINFKANGREDINPAVQDCIRRGGFTHVIGIDRGERHLLYLSLIDMQGNIVKQMTLNEIINEYKGNTYKSNYHDLLAKREGERTEARRSWDTIENIKEMKEGYLSQVVHIISKMMVEYNAIVVLEDLNTGFMRSRQKIERQVYEKFEKMLIDKLNCYIDKRADMSDIAGLLHPLQLTCEAKKWKRSHQCGCLFYIPAWNTSKIDPVTGFVNLFDTRYDNMAKAKAFFGKFKSIRYNVSKDWFEFAFDYNNFTTMAEGTRTDWTVCTYGERILTFRNPDKNLQWDDKEVVLTGAFKQLFEKHDIDILDNLKEAICMQTDAQFFKDLLGLMKLLLQMRNSKTGSEVDYLLSPVADEQGNFFDSRKGNATLPDNADANGAYNIARKGLWAIHKIQETAENKKPSLAISNKEWLQFAQTKPYLAD

SEQ ID NO: 1694 - protein, 1236 aa, Unknown
  Description of Unknown: uncultivated organism sequence
  Category: MG75 effectors
  Description: MG75-180 effector
MKQLSELTGLYSLSKTLRFELKPIGKTLEHIESKGLIAQDEQRAEEYKKVKDIIDRYHKKFITMCLSDFKFEQNSLETYVALAEDTNRDEKSFDEIKKTLRKQIVETFKKGGSYSDLFKKELIQKHLPEIVTDEEEKKMIANFSKFTTYFNGFNENRKNMYSDEDKSTAIAYRLIHENLPMFVDNMKSFSRIADSDVHQHFTEIESSFSEYLGVEHLEGMFQLDYFSETLTQEQIAVYNHIIGGRVLEDGTKLKGINEYVNLYNQQHKDSRLPLLKPLYKMILSDRVALPWFPSEEFASDEEMIGAINETYNTLKEVLSIDGDSSLRCLLLNISSYDIKHIYIANDLGLTDISQQMFGQYDVYTSAIKQELRTTNAPTAKERRTPELYDERINKLFKSAKSFSIEYLNSLVDSEHTIQNYYKHLGAYDRNGEQRVNLFTQIEMAYVAAKEILSGKHGNISQSDAETAIIKGLLDAFKSLQRFIKPLLGNGEEADKDNEFDAKLREAWNTLDIVTPLYNKVRNWLTRKPYSTEKIKLNFENAQLLGGWDVNKEPDCTSILLRKNGLYYLAIMNKKYNHAFDIDNLPNDGKCYEKIDYKLLPGANKMLPKVFFSKSRIKEFAPSEIIVNAYKKGSHKKGANFSISDCRRLIDFFKASISKHEDWKNFPFSFSSTETYEDISGFYREVEQQGYMLGFRNVSESFIKQLVDEGKLYLFQIWNKDFSDFSKGTPNMHTLYWKMLFDEHNLANVVYKLNGQAEVFYRKRSLDVANTTIHKAHQPIMNKNQENKKRQSTFDYDIIKNRRYTVDKFQFHVPISINFKATGRDNVNDNVLDIIRNGGIKHIIGIDRGERHLLYLSLIDLKGNIVKQMTLNDIVNEYNGNTYATNYKNLLAEREGNRTEARKNWKKIENIKDIKKGYLSQVVHIISKMMVEYNAIVVLEDLNMGFMRGRQKIERSVYEQFEKMLIDKLNYYVDKQKNSDEAGGLLHALQLTSKFESFKKLGKQSGCLFYIPAWNTSKIDPVTGFVNLFDTRYTNADQARKFFSQFDSIRYNADKDWFEFAFDYNKITAKAKDTRTKWTLCTYGTRIRTFRNPARLNQWDNEEVVLTDEFKKAFANADINIHGNLKEAICSLQDKKYLEPLMHLMKLLLQMRNSITNSEVDYLLSPVADENGTFYDSRVCSVSLPKDADANGAYNIARKGLWAIHQIQESPAGDRPNLAIKNKDWLNFAQQKPYMNE

SEQ ID NO: 1695 - protein, 1283 aa, Unknown
  Description of Unknown: uncultivated organism sequence
  Category: MG75 effectors
  Description: MG75-181 effector
MKQFTNLYQVTKTPRFELQPIGRTKEHIERNGILQRDEQRAEDYKKVKQLIDDYHKQFIKDRLWNFQLPLANEGQRNSLEEYQELYELSKRDDAQEKIFTEIKDNLRSIIAKRLTERGSAYDRIFKKELIREDLIDFLEKEEDKDVVRQFADFTTYFTGFNENRMNMYSDEEKSTAIAYRLIHQNLPKFMDNMKSFAKILQTPVAEHFMDIYKGWEEYLNVENLEDVFKLSYFSETLTQPHIEVYNYIIGKKVLEDGTEIKGINEYVNLYNQQLKDKEQRLPLLVPLYKQILSDREKLSWMAEEFDSDEKMLAAINESYDHLHDLLVGDENESLRSLLIHLKDFDLTQINISNDLSITDISQHLFGQYDVFTKGIKEELKLITRRKKGETEEELDERVSKIFKTQKSFSIDLLNHLPQPVMDDGRPRKVEDYFMSLGAIDTETTQKENLFAQIENAYEAVRPILQLTGTSETLSQNKSAVAKIKTLLDAFKDLQHFIKPLLGSGEENEKDELFYGAFQMIWDELDTITPLYNKVRNWLTRKPYSIEKIKLNFDNAQLLDGWDENKETANAAIILRKDAMFYLGIMNKEDRKLLANPMPTDGDCYDKVVYKFFKDITTMVPKCTTQMKAVSEHFKQSSVDYILFDKKKYHEPVIITKEIYELNNVLYKGAKKFQIEYLRTTRDTAGYEHAVATWKKFCIQFLKAYISTSIYDLSSVEQNIDNYHDLNSFYGAVNLLLYNLSYKKVSVNYINKLVDEGKLFLFRIWNKDFSEYSKGTPNLHTLYWRMLFDKRNLADVVYKLNGQAEVFYRKSSIKDENRIVHPAHKAIDNKNALNKKQTSTFEYDIIKDRRYTVDKFQFHVPITINFKAMGRTNINPIVQETIRRGGFTHVIGIDRGERHLLYLSLIDLHGNIVKQMTLNEIINEYNGQEHKTNYHSLLVRREGERTAARRSWDTIESIKELKEGYLSQVIHIISKLMVEYNAIVVLEDLNMGFMRGRQKIERQVYEKFEKMLIDKLNCYIDKQADPQSIGGLLHPIQLANKFESFRKLGKQCGCLFYIPAWNTSKIDPVTGFVNLFDTRYETREKARLFFSRFQRIKFNKDKDWFEFTFDYNDFTTKAEGTCTLWTLCSYGTRIRNFRNPLLNNQWDDEEIVLTDEFKQLFDKYGLDLQGNLKESINAQTDAQFFKELMGLMKLLLQMRNSKTNSEVDYLLSPVADGNNHFFDSRDGKLNLPDNADANGAYNIARKGLWVIRRIQETPEGEKLSLAISNKEWLQFAQTKPYLRD

SEQ ID NO: 1696 - protein, 1239 aa, Unknown
  Description of Unknown: uncultivated organism sequence
  Category: MG75 effectors
  Description: MG75-182 effector
MEEFNQFTGLYPLSKTLRFELKPVGKTLENIVKHGLLEEDKHRADSYEKVKKIIDEYHKVFIDNALTDFKLKNGESKKNETLDQYFALYNKREKDENDKKDFSEIQKSLRKQIVDSLTGNEKYKNIFKKELIKQDLLEFCNEDDRKYVEEFKDFTTYFNGFNENRANMYSAEEQSTAIAYRLIHDNLPKFVDNINTFSKVLAVPEINEKLPKLYKDFESYLNVESISEMFQLDYFNMVLTQKQIDVYNAIIGGKDDGNEKIQGLNEFINLYNQKHKDTRLPKLKVLYKQILSDRNAISWLPEEFKDDNEVLIAINSCYKDLYEHVLGEKNLKILLENISQYQLDGIFIKNDLQLPNISQKLLGNWSVIQNAIIEDSKSFIKKKGKESENEYESRLNEIYKKQNSFSVAYINECLKNAGKEIGVENYFSALGAVNTETEQRENLFARISNAYSIVSDLLNAQYPEGRNLSQDKQNVAKIKDLLDALKALQHFIKPLLGNGDESGKDEKFYGEFTALWDELNKITSLYNMVRNYMTRKPYSEEKIKLNFQNSTLMDGWDYNKERDNTAVILRKDGLYYLGIMNKKYNKIFEPENVKHDGECFEKMIYKLLPGANKMLPKVFFSKSRIDEFKPSKEIVENYKNDTHKKGEKFNIEDCHRLIDFFKSSIEKHSDWSKFNFKFSDTSKYADLSGFYREVEHQGYKVTFVNISKDYVNSLVDEGKLYLFQIYNKDFSPYSKGTPNMHTLYWKMLFDERNLENVVYKLNGQAEIFYRKKSINYDRPTHPAHQPINNKNIQNKKKESLFSYDLIKNRRYTVDKFFFHVPITINFKGVDSENINDQVRRYLQKAKDTHVIGIDRGERNLLYLVVVDNKGNIVEQYSLNNIVNEYKGNTYSTDYHALLDAKEKERELARESWQTIENIKELKEGYLSQVIHKITELMIKYHAIVVLEDLNMGFKRGRQKVEKQVYQKFEKQLIDKLNYVVDKHKAPEADGGLLHAYQLTSKFDSFQKLGKQSGFLFYIPAWNTSKIDPVTGFVNLFDTRYVNIEKAKAFFCKFDIIRYNQDKGWFEFDFDYKNFTSKADESRTKWTLCTFGTRVETFRNKEKNSQWDNRNVDLTKAFKELFSKYNIDLSSNIKEAICIQTEKDFFESLLHLLKLTLQMRNSVTGTEIDYIISPVANENGEFFDSRACSDKLPKDADANGAYNIARKGLMLIEQIKKAKDLQKLKFDISNKSWLQYVQNN

SEQ ID NO: 1697 - protein, 1274 aa, Unknown
  Description of Unknown: uncultivated organism sequence
  Category: MG75 effectors
  Description: MG75-183 effector
MNNNLNKFTGLYQLSKTLRFELKPIGKTLDNIQNNGFIANDEHRAESYKQVKKLIDNYHKDYIESVLDNFELNKEVLYSLYELYTCTNKTEKETKQYEAAQDSLRKAISSALKKDERFKRIDKKELIREDMLNYLDNEQDKALVNEFHDFTTYFTGFNENRQNMYAAEAKSTAIAYRLIHENLPKFIDNIAIFKKIAETSVADNFPALYQHYEEYLNVNDIGEIFELDYYNIVLTQKQIEVYNNIIGGRTLSDDTKIKGINEYVNEYNQKQKDKKDRLPKLKPLFKQILSDRVQLSWLQEEFQTGADVLNAIKNYCDTYFADIHESIKALLTSLKEYDLSKIYIPNDLQLTDISQQMFGNWSIIPNAIEQDIKNNNPRKAKEDEEKYSQRIDKIKKQAKSYSLAYINACIKELNNADVATHFASLGAIDNNEKQKASITADIVVHYNQLKPLFGVEYPKEKNLSQDKLTIMQIKDLLDDFKSLQRFVKPLLGNGDEAEKDEKFYGELMQLWEVINNITHLYNKVRNYSTRKPYSTDKIKVNFENAQLLDGWDENKENTNASIILRKNGLYYLGIMKKEHRKLLDKPMPSSGECYEKVVYKFFKDITTMVPKCTTQTKAVATHFKDSGEDYILFDKKNFNEPIVITKEIYELNNVLYDGVKKFQIEYLRTTNDKKGYEHAVNIWKNFCMQFLKAYKSTSIYDLSSIEKNIGNYGDLNSFYSAVNLLLYSLTFRSVSVDYINMLVDEDKMYLFQIYNKDFSTFSKCTPNMHTLYWKMLFDPQNLANVVYKLNGQAEVFFRKKSITIAKPTHPANKPIDNKNPANGKKQSLFDYDLIKDRRYTVDKFQFHVPITINFKSNGSDNINMMVKEHIKTSDDMHYIGIDRGERHLLYLCVIDSKGNIVEQYSLNNIKNEHNGNNYDTDYRNLLQERDKKRKEERSSWQTIEGIKELKQGYLSQVIHKITQLMVKYNAIVVLEDLNMGFKRGRQKVESSVYQQFEKALIDKLNYLVDKKKAPTEPGGLLHAYQLTSKFDSFQKMGKQSGFLFYIPAWNTSKIDPVTGFANLFDSRDTRYENIAKAQAFFNKFDSIRYNEKKDWFELSFDYNNFTSKAEGTQTKWTICTQGTRIETFRNTEKNSNWDSKEVQLTDEWKKLFTEYSIPFKSNLKDAIAQQSNKDFYTKLLSLLKLTLQMRNSITGTDVDYMISPVANVKGEFFDSRNSNATLPENADANGAYNIARKGLWISKQIKEAEDLSKVKLAMSNKDWLQFAQTKPYLE

SEQ ID NO: 1698 - protein, 1274 aa, Unknown
  Description of Unknown: uncultivated organism sequence
  Category: MG75 effectors
  Description: MG75-184 effector
MNNNLNKFTGLYQLSKTLRFELKPIGKTLDNIQNNGFIANDEHRAESYKQVKKLIDNYHKDYIESVLDNFELNKEVLYSLYELYTCTNKTEKETKQYEAAQDSLRKAISSALKKDERFKRIDKKELIREDMLNYLDNEQDKALVNEFHDFTTYFTGFNENRQNMYAAEAKSTAIAYRLIHENLPKFIDNIAIFKKIAETSVADNFPALYQHYEEYLNVNDIGEIFELDYYNIVLTQKQIEVYNNIIGGRTLSDDTKIKGINEYVNEYNQKQKDKKDRLPKLKPLFKQILSDRVQLSWLQEEFQTGADVLNAIKNYCDTYFADIHESIKALLTSLKEYDLSKIYIPNDLQLTDISQQMFGNWSIIPNAIEQDIKNNNPRKAKEDEEKYSQRIDKIKKQAKSYSLTYINACIKELNNADVATHFASLGAIDNSEKQKASITADIVVHYNQLKPLFSVDYPKEKNLSQDKLTVMQIKDLLDDFKSLQRFVKPLLGNGDEAEKDEKFYGELMQLWEVINNITHLYNKVRNYSTRKPYSTDKIKVNFENAQLLDGWDENKENTNASIILRKNGLYYLGIMKKEHRKLLDKPMPSSGECYEKVVYKFFKDITTMVPKCTTQTKAVATHFRDSDEDYILFDKKNFNEPIVITKEIYELNNVLYDGVKKFQIEYLRTTNDKKGYEHAVNIWKNFCMQFLKAYKSTSIYDLSSIEKNIGNYGDLNSFYSAVNLLLYSLTFRSVSVDYINMLVDEDKMYLFQIYNKDFSTFSKGTPNMHTLYWKMLFDPQNLANVVYKLNGQAEVFFRKKSITIAKPTHPANKPIDNKNPANGKKQSLFDYDLIKDRRYTVDKFQFHVPITINFKSNGSDNINMMVKEHIKTSDDMHYIGIDRGERHLLYLCVIDSKGNIVEQYSLNNIKNEHNGNNYDTDYRNLLQERDKKRQEERSSWQTIEGIKELKQGYLSQVIHKITQLMVKYNAIVVLEDLNMGFKRGRQKVESSVYQQFEKALIDKLNYLVDKKKAPTEPGGLLHAYQLTSKFDSFQKMGKQSGFLFYIPAWNTSKIDPVTGFANLFDSRDTRYENIAKAQAFFNKFDSIRYNEKKDWFELSFDFNNFTSKAEGTKTKWTICTQGTRIETFRNAEKNSNWDSKEVQLTDEWKKLFTEYSIPFKSNLKDAIAQQSNKDFYTKLLSLLKLTLQMRNSIIGTDVDYMISPVANAKGEFFDSRNSNATLPENADANGAYNIARKGLWIAKQIKESEDISKVKLAMSNKEWLQFAQTKSYLE

SEQ ID NO: 1699 - protein, 1298 aa, Unknown
  Description of Unknown: uncultivated organism sequence
  Category: MG75 effectors
  Description: MG75-185 effector
MNKSILSRFTNLYQVSKTLRFELQPVGKTKENIEENGILLRDEKRAADCKIVKEIIDEYHKQYIENRLKDFKLPLNSEGKHDSLEEYQALYEMSKRSEADEAAFKEVKDNLRSIIAERLTNAPTYKCIFGKELIRKELVDFLENENTKEIVEFLENEKAKEIVSQFADFTTYFGGFHKNRENMYSGEEKSTAIAYRLIHQNLPRFMDNMKAFERIAATSVAEHFVDIFEGWEEYLNVGSIAEIFRLDYFSDALTQQHIEVYNYIIGKKVLEDGSEIKGINEYVNLYNQQQKDKKLRLPLLVPLYKQILSDREKLSWIAEEFDSDDKMLAAITETYSHLHDLLMGEENESLRSLLVHLKDFDLSRINITNDLSLTDISQHLFGRYDVFTSGIKDELRAITPRKRNETDEQLGDRISKIFKTQQSFSIAFLNTLSQPALEGGNPRKIEDYFMALGAVNTETTQKENLFAQIENAYEDVRAVLQMKETDNMLSQNKQAVAKIKAFLDALKELQHFVKPLLGSGEEDEKDELFYGSFQMMWDELDAITPLYNKVRNWLTRKPFSTEKIKLNFDNAQLLEGWDENKETTNASIILRKDGFYYLGIIRKDCRKLLGAPMPSDGECYDKVVYKFFKDITTMVPKCTTQKKDVVAHFAHSKEDYILFDKKTFNAPVTITKEVYDLNNVLYNGIKKFQIEYLRSTGDKVGYEHAVSTWKSFCMSFLKAYKSTSIYNLALVEQHINSYNDLSSFYNAVNLLLYSLTYRKVSVNFIHSLVDEGKLYLFRIWNKDFSEFSKGTPNLHTLYWKMLFDERNLADVVYKLNGQAEVFYRKSSIKPENRIIHLANKPIANKNELNRKHESTFKYDIIKDRRYTFDKFQFHVPITINFKANGREDINPAVQDCIRRGGFTHVIGIDRGERHLLYLSLIDMQGNIVKQMTLNEIINEYKGNTYKSNYHDLLAKREGERTEARRSWDTIENIKEMKEGYLSQVVHIISKMMVEYNAIVVLEDLNTGFMRSRQKIERQVYEKFEKMLIDKLNCYIDKRADMSDIAGLLHPLQLTCEAKKWKRSHQCGCLFYIPAWNTSKIDPVTGFVNLFDTRYDNMAKAKAFFGKFKSIRYNVSKDWFEFAFDYNNFTTMAEGTRTDWTVCTYGERILTFRNPDKNLQWDDKEVVLTGAFKQLFEKHDIDILDNLKEAICMQTDAQFFKDLLGLMKLLLQMRNSKTGSEVDYLLSPVADEQGNFFDSRKGNATLPDNADANGAYNIARKGLWAIHKIQETAENKKPSLAISNKEWLQFAQTKPYLAD

SEQ ID NO: 1700 - protein, 1064 aa, Unknown
  Description of Unknown: uncultivated organism sequence
  Category: MG75 effectors
  Description: MG75-186 effector
MYSEEEKPTGIAYRLINENLPTFIENFKIYNKVIKFMPEIINKIHTDLMEYIQVEDIDEIFDINYYNEVLTQKGIECYNIIISGKSKSNGEKIKGLNEYINEFNQKHNEKIPKLQELYKQILSDTDTASFKFDTIESDEELLNNIESYYTKLLPVFNKINQLFAKFNKYNLDLIFINNDGTLNTISNEIYKDWSYIRNRIGERYDIEYTGKLKKDTEQYSKQKQEYMKKQKQYSLKFLNDSLRDNYLIEYISNYIEQSKIMERMKTDFTEVQKIESRGDTKQLIKDENSIVKIKNLLDDIKFLQEFVKILVLKDRTIEKDAEFYSELMPYYNELKDIIPLYNKTRNYLTQKPYSTEKIKLNFECPTLLNGWDLNKEEANLGVILLKNEKYYLGIINPYCKKIFKIQEKDSNSENNYKKMEYKLLPGPNKMLPKVFFSKSKIDEFMPSDELLEKYNKGCHKKGKDFDINFCHELIDFYKTSLNKHKDWKKFDFKFKSTSEYNDISEFYKDVEEQGYKIEYSEYSEKYINELVDRGELYLFQIYNKDFSEYSKGRPNLHTMYWKAVFDIENIKNPVYKLNGEAEIFYRKKSLERKITHSANEPVANKNENTIKSGKPTSLFKYDLIKDKRYTVDKFQFHVPITMNFKSEKMFNINQVVNKYLKYNDDINVIGIDRGERNLLYVCVIDKNEKIVYQKSLNEIVNEYKSIKYSTNYHALLNKKEKEREIAREDWKNIENIKELKEGYMSQVIHILVELMRKYNAIIVIEDLNKGFKNSRIKVEKQVYQKFEKMFIDKLNYLVFKDEPKESEGGVLNAYQLTNKFETFNKIGKQSGVLYYIPAWCTSKIDPTTGFINRFYIKYENLDKSKEFINKIDDIRYNSSENLFEFDIDYSKFTDRLNETRNKWTLYTNGERIYTYRNDKGEWIDKKIQLTNEFKKLFEKYSINLDNIKNEILEKANIEFFKGNNETLGFIQLFKLMVQMRNSLTGKEEDNLISPVKNSNGKFFNTNEQIEGLPKDADANGAYNIARKGLMLIEQVRNTEDDKLNKIKYNITEKEWLDYVQNRGM

SEQ ID NO: 1701 - protein, 1287 aa, Unknown
  Description of Unknown: uncultivated organism sequence
  Category: MG75 effectors
  Description: MG75-187 effector
MEKGMKQFTGLYSLSKSLRFELQPIGKTQENIEKHGILERDSQRAEDYKVVKEFIDEYHKQFIKSRLWNYKLPLKNEGQLNSLEEYQEMYEISKRDAAQEASFAQIKYNLRSIIVKRLTESSSSYSRIFKKELIREDLINFLEKEEDQEIVRQFADFTTYFTGFHENRRNMYTAEEKSTAIAYRLIHQNLPKFMDNMKSFAKIAETSVAEHFADIYEGWKEYLNVDSIEEIFQLDYFSETMTQPHIEVYNYIIGKKILEDGTEIKGINEYVNLYNQQQKDKNKRLPFLVPLYKQILSDREKLSWLTEEFDSDEKMLSAINESYSHLHDLLMGEENESLRSLLSHIKNFNLCQINISNDLSLTDISQHLFNRYDVFTNGIKDKLRVITPRKKKESDEDFEDRISKIFKTQKSFSISFLDNLPQPVMDDGKPQSIEDYFMSLGAVNTETTQKENLFAQIENAYEDARTILQMKDTGDTLSQNKSAVVKIKALLDALKDLQHFIKPLLGSGEENEKDELFYGSFQIMWDELDTVTPLYNKVRNWLTRKPYSTEKIKLNFDNAQLLDGWDENKETTNASIILCKNGGYYLGIFNKDYRKLLGTPMPSDGDCYDKVVYKFFKDITTMVPKCTTQKKDVVAHFAQSTENYILFDPKTFKASVTITKEIFDLNNVLYNGVKKFQIEYLRSTGDQSGYEHAVTTWKSFCMQFLKAYKSTSIYNLALVEQQIDSYRDLNSFYNAVNLLLYNLSYKKVSVAYINQLVEEGKLYLFRIWNKDFSEYSKGTPNLHTLYWKMLFDERNLADVVYKLNGQAEVFYRKASIKPENRILHPAQCPIANKNELNEKRSSIFEYDIIKDKRYTVDKFQFHVPITINFKATGQTNINPIVQDTIRRGGFSHIIGIDRGERHLLYLSLIDLKGNIVKQMTLNDIVNEYKGTIHKTNYHDLLVKREGERTDARRSWDTIENIKELKEGYLSQVVHIISKMMVEYNAIIVLEDLNMGFMRGRQKIERQVYEKFEKLLIDKLNCYVDKQIDPSSAGGLLHPFQLTNKFESFRKLGKQSGCLFYIPAWNTSKIDPVTGFVNLFDTRYDTPKKARSFFSKFQRISFNDKKGWFEFSYDYDDFTSKAEGTRTQWTLCTFGDRIRTFRNPKKNHQWDNESVVLTEEFKQLFEKYGIDIHSNLKESISMQSDAQFFKDLLGLMKLLLQMRNSKTNSEEDYLLSPVADETGHFFDSRENIRTLPNNADANGAYNIARKGLWAIRKIKETTQDDKVSLAISNKEWLQFAQTRPYLND

SEQ ID NO: 1702 - protein, 1235 aa, Unknown
  Description of Unknown: uncultivated organism sequence
  Category: MG75 effectors
  Description: MG75-188 effector
MKQLNELTGLYSLSKTLRFELKPIGKTLEHIESKGLIAQDEQRAEEYKKVKDIIDRYHKAFITMCLRDFNFDQNSLETYVALAEDSNRDEKDFDEIKKALRKQIVEAFKKGGSYSDLFKKELIQKHLPEFVKDEEEKKMVENFSKFTTYFSGFNENRKNMYSDEDKSTAIAYRLIHENLPMFIDNMKSFGKIAVSDVSQHFSEIESSFSEYLNVEHLADMFQLDYFSETLTQEQIAVYNHIVGGRTLEDGTKLQGVNEYVNLYNQQHKDNRLPLLKPLYKMILSDRVALSWLPEEFASDEEMINAINETYNTLKDVLMGNGDNSLRNLLLNIDKYDVEHIYIGNDLGLTDISQQLFGQYDVYTSAIKQELRNSVSPTAKERREPELYAERINKLFKSAKSFSILYLNSLVDSEHTIQSYYKQLGAYDRGGEQRINLFSQIEMAYVAAKDILSGKHGNISQSDADTAIIKNLLDAYKSLQRFIKPLLGDGEEADKDNEFDAKLREAWDALDIVTPLYNKVRNWLTRKPYSTEKIKLNFENAQLLGGWDVNKEPDCTSVLLRKNGFYYLAIMNKKYNHAFDIDNLPHNGKCYEKIDYKLLPGANKMLPKVFFSNSRIKEFAPSDAIVSAYRKGTHKKGSNFNISDCRRLIDFFKASIMKHEDWKKFPFSFSPTETYEDISGFYREVEQQGYMLGFRNVSESFINQLIDEGKLYLFQIWNKDFSEFSKGTPNMHTLYWKMLFDERNLANVVYKLNGQAEVFYRKRSLDVANTTIHKAHQPIVNKNQENKKLQSTFEYDIIKNRRYTVDKFQFHVPISINFKAIGRDNVNDNVLDIIRNGGIKHIIGVDRGERHLLYLSLIDLNGNIVKQMTLNDIVNEYNGNTYATNYRDLLAEREGNRTEARKNWKEIENIKDIKQGYLSQVVHIISKMMVEYDAIVVLEDLNMGFMRGRQKIERSVYEQFEKMLIDKLNYYVDKQKSVNEAGGLLHALQMTSKFESFKKLGKQSGCLFYIPAWNTSKIDPVTGFVNLFDTRYTNADQARRFFSQFDVIRYNADKDWFEFAFDYNNFTAKAEGTRTKWTLCSYGTRIRTFRNPAKLNQWDNEEVVLTDEFKKAFANAGIDIHGNLKEAISSLQDKKYLEPLMHLMKLLLQMRNSITNSEVDYLLSPVADENGKFYDSRTCSDSLPKDADANGAYNIARKGLWAIRQIQETPAGERPNLAIKNKEWLNFAQQKPYKDE

SEQ ID NO: 1703 - protein, 1245 aa, Unknown
  Description of Unknown: uncultivated organism sequence
  Category: MG75 effectors
  Description: MG75-189 effector
MTLIIKYKESKNKREVYMSNLYSNLHNLYQVQKTLRFELKPQGKTKENMEKVGILEADEHRAEIYSKVKKYCDEYHKLFIDKSLSNIELNGIDRYYELYSINNRDDKQKEELDQLETGLRKQISDAFKKSAEYKGLFQKDMITSYLVTMYKENQEKMQDIGEFNRFTTYFTGYNKNRENMYSEEDKSTAISYRLINENLPTFIDNIKIYKKIVSLMPEDIEKIYKDLEEYIQVDSIDEIFNISYYNDVLTQRGIECYNILISGRTKNDGDKIKGLNEYINEFNQTHNEKIPKLQELYKQILSDAESASFKIDVIKNDKELMNLIEVYYANILPILNKIEDLFTRISNYNLELILVNNDGTLSTLSNMVFNEWSYIKGAISEKYDEKYSGKEKYGTEKYAQKKQEYLKKQKIYSLKFLNDCIGNNAICEYLKNYIIQNKNIETIKEDYNEVQNIKVEDDTKELIKDEKSIEKIKKFLDDVKSLQEFVKLVIPKDRTVEKDAKFYSELTPYYEKIKEIIPLYNKVRNYVTQKPYSTEKIKLNFECPTLLNGWDANKEEANLGVILIKEGKYYLGIINPYCKKIFEIDEKDSNEQKNYKKMEYKLLPGPNKMLPKVFFSNSRIEEFNPSKELQEKYNKGYHKKGKDFDINFCHELIDFYKMSLNKHEDWKKFNFKFKDTSEYNDISEFYREVEKQGYKIEYTEYSEKYINELVDRGELYLFQIYNKDFSEYSKGKENLHTLYWKAVFDPDNIMNPVYKLNGNAEVFYRKKSLEMKVIHPANQPIANKNISTIEAGRSTSTFKYDLIKDKRYTMDKFQFHVPITVNFKSERLFNINQIVNKYLKYNDDIHVIGIDRGERNLLYVCVIDKNEKIVYQKSLNEIVSEYNNNRYTTDYHGLLDRKEKEREIAREDWKNIENIKELKEGYMSQVIHILVELMKKYNAIIVIEDLNKGFKNSRIKVEKQVYQKFEKMFIDKLNYLVFKDEDKMNEGGVLNAYQLTNKFESFTKLGKQSGILYYIPAWCTSKIDPTTGFINRFYLKYENFDKSKEFVNRIDDIRYNEKENLFEFDIDYSKFTDRLNDTKNKWTLCSYGERILTQKNANGEWFDRRIQLSIEFKKLFERYGINLNNIKDSILKLDKDNLEFYKGNGESLGFIQLFKLMVQMRNSLTGKEEDNLISPVKNRHGKFFNTSEKIEGLPIDADANGAYNIARKGFMLVEQMKNVEDEKLNKIKYNITEKEWLNYVQNRGM

SEQ ID NO: 1704 - protein, 1239 aa, Unknown
  Description of Unknown: uncultivated organism sequence
  Category: MG75 effectors
  Description: MG75-190 effector
MEEFNQFTGLYPLSKTLRFELKPVGKTLENIVKHGLLEEDKHRADSYEKVKKIIDEYHKVFIDNALSDFKLKNGESKKNETLDQYFALYNKREKDENDKKDFSEIQKSLRKQIVDRLTGNEKYKNIFKKELIKQDLLEFCNEDDRKYVEEFKDFTTYFNGFNENRANMYSAEEQSTAIAYRLIHDNLPKFVDNINSFNKVLAVPEINEKLPKLYKDFESYLNVESISEMFQLDYFNMVLTQKQIDVYNAIIGGKDDGNEKIQGLNEFINLYNQKHKDTRLPKLKVLYKQILSDRNAISWLPEEFKDDNEVLIAINSCYKDLSEHVLGEKNLKILLENISQYQLDGIFIKNDFQLPYISQKLLGNWSVIQNAIIEDSKSFIKKKGKESENEYESRLNEKYKKQNSFSVAYINECLKNAGKEIGVENYFSALGAVHTETEQRENLFARISNAYSIVSDLLNAQYPEGRNLSQDKQNVSKIKDLLDALKALQHFIKPLLGNGDESGKDEKFYGEFTALWDELNKITSLYNMVRNYVTRKPYSEEKIKLNFQNSTLMDGWDYNKERDNTAVILRKDGLYYLGIMNKKYNKIFEPENVKHDGECFEKMIYKLLPGANKMLPKVFFSKSRIDEFKPSKEIVENYKNDTHKKGEKFNIEDCHRLIDFFKSSIEKHSDWSKFDFKFSDTSKYADLSGFYREVEHQGYKVTFVNISKDYVNSLVDEGKLYLFQIYNKDFSPYSKGTPNMHTLYWKMLFDERNLENVVYKLNGQAEIFYRKKSINYDRPTHPAHQPINNKNIQNKKKESLFSYDLIKNRRYTVDKFFFHVPITINFKGVDSENINDQVRRYLQKAKDTHVIGIDRGERNLLYLVVVDNKGNIVEQYSLNNIVNEYKGNTYSTDYHALLDAKEKERELARESWQTIENIKELKEGYLSQVIHKITELMIKYHAIVVLEDLNMGFKRGRQKVEKQVYQKFEKQLIDKLNYVVDKHKAPEADGGLLHAYQLTSKFDSFQKLGKQSGFLFYIPAWNTSKIDPVTGFVNLFDTRYVNIEKAKAFFCKFDIIRYNQDKEWFEFGFDYKNFTSKADESRTKWTLCTFGTRVETFRNKEKNSQWDNRNVDLTKAFKELFSKYNIDLSSNIKEAICIQTEKDFFESLLHLLKLTLQMRNSVTGTEIDYIISPVANGNGEFFDSRTCSDKLPKDADANGAYNIARKGLMLIEQIKKSKDLKKLKFDISNKSWLQYVQNN

SEQ ID NO: 1705 - protein, 1150 aa, Unknown
  Description of Unknown: uncultivated organism sequence
  Category: MG75 effectors
  Description: MG75-191 effector
MLNFLVKKEDRDIVQQFADFTTYFTGFHENRRNMYSSEEKSTAIAYRLIHQNLPKFMENMKAFATIAQTSIAEHFADIYAGWEEYLNVGSIEEMFNLDYFSHTLTQTGIEVYNYIIGKKILEDGTEIKGINEYVNLYNQQQKDKKQRLPLLIPLYKQILSDREKLSWISEEFDSDEKMLAAINGLYIHLHDLLMGKENESLRSLLIYLKDFNLEHIYITNDQSLTNISQHLFKQYDVYTQGILNHLRVNTPRKKKETDEDFEKRISQILKSKKSFSIAFLDHLPHPITEEGKPKSIEDYFQALGAVDSETIQKENIFAQIENAYENVYEVLQLKETGNSLSQDKSAVAKIKVLLDAFKELQHFIKPLLGSGEENEKDELFYGTFQMMWDELEAITPLYNKVRNWMTRKPYSTEKIKLNFDNAQLLDGWDENKETTNASIILRKGSYFFLGIMNKNYRQLLDKPMPSDGDCFDKVVYKFFKDITTMVPKCTTQMKSVAEHFKHSSEDYILFDKKKYNTPVVITKEIYELNNVTYNGTKKFQIEYLRSTGDSEGYQHALTVWKAFCLKFLKAYISTSVYDLTLIEQNINSYKNLSTFYNAVNLLLYNISYKRVSTEYINTLVDEGKLYLFRIWNKDFSEFSKGTPNLHTLYWRMLFDERNLADVVYKLNGQAEVFYRKASIKPENLIIHPANQAIANKNILNRKKTSTFEYDIIKNRRYTVDKFQFHVPITINFKAIGQKNINPIVQETIRNNGFTHVIGIDRGERHLLYLSLIDLKGNIIKQMTLNEIINEYNGQCFVTNYHNLLVAREGDRTKSRKSWDTIETIKELKEGYLSQVVHIISKMMIEYKAIVVLEDLNVGFMRGRQKIERQVYEKFEKMLIEKLNCYVDKQADPASEGGLLHPLQLVNESKSFQKHGKQCGCLFYVRAWNTSKIDPTTGFVNLFDTRYETREKARVFFSKFKRISFNKEKDWFEFSFDYNDFTTKADGTRTQWTLCTNGTRIRTFRNPLKNNQWDDEEIILTDQFKELFSKYQIEITGNLKDSINRQSEAAFYKDLMSLMKLLLQMRNSKTNSEVDYLFSPVADEQGVFYDSRNCGANLPNNADANGAYNIARKGLWVIRKIQSTSIDEKISLAITDKDWLNFVQNKSYLID

SEQ ID NO: 1706 - protein, 1239 aa, Unknown
  Description of Unknown: uncultivated organism sequence
  Category: MG75 effectors
  Description: MG75-192 effector
MEEFNQFTGLYPLSKTLRFELKPVGKTLENIVKHGLLEEDKHRADSYDKVKRIIDEYHKAFIDNALSDFKLKNGESKKYETLDQYFALYNKREKDENDKKDFSEIQKSLRKQIVDRLTGSEKYKNIFKKELIKHDLLKFCNEDDRKYVEEFKDFTTYFNGFNENRANMYSAEEQSTAIAYRLIHDNLPKFVDNINSFNKVLAVPEINEKLPKLYKDFESYLNVESISEMFQLDYFNMVLTQKQIDVYNAIIGGKDDGNEKIQGLNEFINLYNQKHKDTRLPKLKVLYKQILSDRNAISWLPEEFKDDNEVLIAINSCYKDLSEHVLGEKNLKILLENISQYQLDGIFIKNDFQLPYISQKLLGNWSVIQNAIIEDSKSFIKKKGKESENEYESRLNEIYKKQNSFSVAYINECLKNAGKEIGVENYFSALGAVHTETEQRENLFARISNAYSIVSDLLNVQYPEGRNLSQDKQNVSKIKDLLDALKALQHFIKPLLGNGDESGKDEKFYGEFTALWDELNKITSLYNMVRNYMTRKPYSEEKIKLNFQNSTLMDGWDYNKERDNTAVILRKDGLYYLGIMNKKYNKIFEPENVKHDGECFEKMIYKLLPGANKMLPKVFFSKSRIDEFKPSKEIVENYKNDTHKKGEKFNIEDCHRLIDFFKSSIEKHSDWSKFNFKFSDTSKYADLSGFYREVEHQGYKVTFVNISKDYVNSLVDEGKLYLFQIYNKDFSPYSKGTPNMHTLYWKMLFDERNLENVVYKLNGQAEIFYRKKSINYDRPTHPAHQPINNKNIQNKKKESLFSYDLIKNRRYTVDKFFFHVPITINFKGVDSENINDQVRRYLQKAKDTHVIGIDRGERNLLYLVVVDNKGNIVEQYSLNNIVNEYKGNTYSTDYHALLDAKEKERELARESWQTIENIKELKEGYLSQVIHKITELMIKYHAIVVLEDLNMGFKRGRQKVEKQVYQKFEKQLIDKLNYVVDKHKAPESDGGLLHAYQLTSKFDSFQKLGKQSGFLFYIPAWNTSKIDPVTGFVNLFDTRYVNIEKAKAFFCKFDIIRYNQDKGWFEFGFDYKNFTSKADESRTKWTLCTFGTRVETFRNKEKNSQWDNRNVDLTRAFKELFSKYNIDLTSNIKEAICIQTEKDFFESLLHLLKLTLQMRNSVTGTEIDYIISPVANENGEFFDSRTCSEKLPKDADANGAYNIARKGLMLIEQIKKAKDLQKLKFDISNKSWLQYVQNN

SEQ ID NO: 1707 - protein, 1236 aa, Unknown
  Description of Unknown: uncultivated organism sequence
  Category: MG75 effectors
  Description: MG75-193 effector
MKQLSELTGLYSLSKTLRFELKPIGKTLEHIESKGLIAQDEQRAEEYKKVKDIIDRYHKKFITMCLSDFKFEQNSLETYVALAEDTNRDEKAFDEIKKTLRKQIVETFKKGGSYSDLFKKELIQKHLPEFVSDEEEKKMIANFSKFTTYFNGFNENRKNMYSDEDKSTAIAYRLIHENLPMFVNNMKSFSRIADSDVHQHFTEIESSFSEYLGVEHLEEMFQLDYFSETLTQEQIAVYNHIIGGRALEDGTKLKGINEYVNLYNQQHKNSRLPLLKPLYKMILSDRVALPWFPSEEFASDEEMIRAINETYNTLKEVLSIDGDSSLRSLLLNISSYDIKHIYIANDLGLTDISQQMFGQYDVYTSAIKQELREKNAPTAKERRNPELYDERINKLFKSAKSFSIEHLNSLVDSEHTIQNYYKHLGAYDRNGEQRVNLFTQIEMAYVAAKEILSGKHGNISQSDAETAIIKGLLDAFKSLQRFIKPLLGNGEEADKDNEFDAKLREAWNTLDIVTPLYNKVRNWLTRKPYSTEKIKLNFENAQLLGGWDVNKEPDCTSILLRKNGLYYLAIMNKKYNHAFDIDNLPNDGKCYEKIDYKLLPGANKMLPKVFFSKSRIKEFAPSEIIVNAYKKGSHKKGANFSISDCRRLIDFFKASISKHEDWKNFPFSFSSTEKYEDISGFYREVEQQGYMLGFRNVSESFIKQLVDEGKLYLFQIWNKDFSDFSKGTPNMHTLYWKMLFDEHNLANVVYKLNGQAEVFYRKSSLDVANTTIHKAHQPIMNKNQEYKKRQSTFDYDIIKNRRYTVDKFQFHVPISINFKATGRDNVNDNVLDIIRNGGIKHIIGIDRGERHLLYLSLIDLKGNIVKQMTLNDIVNEYNGNTYATNYKNLLAEREGNRTEARKNWKKIENIKDIKKGYLSQVVHIISKMMVEYNAIVVLEDLNMGFMRGRQKIERSVYEQFEKMLIDKLNYYVDKQKNSDEAGGLLHALQLTSKFESFKKLGKQSGCLFYIPAWNTSKIDPVTGFVNLFDTRYTNADQARKFFSQFDSIRYNADKDWFEFAFDYNKFTAKAKDTRTKWTLCTYGTRIRTFRNPARLNQWDNEEVVLTDEFKKAFANADINIHGNLKEAICSLQDKKYLEPLMHLMKLLLQMRNSITNSEVDYLLSPVADENGTFYDSRICSASLPKDADANGAYNIARKGLWAIHQIQESPAGDRLNLAIKNKDWLNFAQQKPYMNE

SEQ ID NO: 1708 - protein, 700 aa, Unknown
  Description of Unknown: uncultivated organism sequence
  Category: MG75 effectors
  Description: MG75-194 effector
METFSGFTNLYPLSKTLRFRLIPVGETLKHFIGSGILEEDQHRAESYVKVKAIIDDYHRTYIENSLSGFELPLESTGKFNSLEEYYLYHNIRNKTEEIQNLSSKVRTNLRKQVVTQLTKNEIFKRIDKKELIQSDLIDFVKNEPDANEKIALISEFRNFTVYFKGFHENRRNMYSDEEKSTSIAFRLIHENLPKFIDNMEVFAKIQNTSISENFDAIQKELCPELVTLCEMFKLGYFNKTLSQKQIDAYNTVIGGKTTSEGKKIKGLNEYINLYNQQHKQEKLPKMKLLFKQILSDRESASWLLEKFENDSQVVGAMVNFWNTIHDTVLAEGGLKTIIASLGSYGLEGIFLKNDLQLTDISQKATGSWSKISSEIKQKIEAMNPQKKKESYESYQERIDKLFKSYKSFSLAFVNECLRGEYKIEDYFLKLGAVNSSLLQKENHFSHILNTYTDVKEVIGFYSESTDTKLIQDNDSIQKIKQFLDAVKDLQAYVKPLLGNSDETGKDERFYGDLIEYWSLLDLITPLYNMVRNYVTQKPYSVDKIKINFQNPTLLNGWDLNKEMDNTSVILRRDGKYYLAIMNNKSRKVFLKYPSGTDRNCYEKMEYKLLPGANKMLPKVFFSKSRINEFMPNERLLSNYEKGTHKKSGTCFSLDDCHTLIDFFKKSLNKHEDWKNFGFKFSDTSTYEDMKCTENSCQFED

SEQ ID NO: 1709 - protein, 1283 aa, Unknown
  Description of Unknown: uncultivated organism sequence
  Category: MG75 effectors
  Description: MG75-195 effector
MKQFSNLYQVSKTLRFELQPIGKTKENIESGGILQKDEQRAVNYKIVKGFIDEYHKQHIKNCLWNFELPLFNEGKHDSLEEYKILYETPQRNAVQEAAFTEVKDNLRAIIVKQLTKKGTAFDRIDKKELIREDLLNFLVKKEDRDIVQQFADFTTYFTGFHENRRNMYSSEEKSTAIAYRLIHQNLPKFMENMKAFATIAQTSIAEHFADIYAGWEEYLNVGSIEEMFNLDYFSHTLTQTGIEVYNYIIGKKILEDGTEIKGINEYVNLYNQQQKDKKQRLPLLIPLYKQILSDREKLSWISEEFDSDEKMLAAINGLYIHLHDLLMGKENESLRSLLIYLKDFNLEHIYITNDQSLTNISQHLFKQYDVYTQGILNHLRVNTPRKKKETDEDFEKRISQILKSKKSFSIAFLDHLPHPITEEGKPKSIEDYFQALGAVDSETIQKENIFAQIENAYENVYEVLQLKETGNSLSQDKSAVAKIKVLLDAFKELQHFIKPLLGSGEENEKDELFYGTFQMMWDELEAITPLYNKVRNWMTRKPYSTEKIKLNFDNAQLLDGWDENKETTNASIILRKGSYFFLGIMNKNYRQLLDKPMPSDGDCFDKVVYKFFKDITTMVPKCTTQMKSVAEHFKHSSEDYILFDKKKYNTPVVITKEIYELNNVTYNGTKKFQIEYLRSTGDSEGYQHALTVWKAFCLKFLKAYISTSVYDLTLIEQNINSYKNLSTFYNAVNLLLYNISYKRVSTEYINTLVDEGKLYLFRIWNKDFSEFSKGTPNLHTLYWRMLFDERNLADVVYKLNGQAEVFYRKASIKPENLIIHPANQAIANKNILNRKKTSTFEYDIIKNRRYTVDKFQFHVPITINFKAIAQKNINPIVQETIRNNGFTHVIGIDRGERHLLYLSLIDLKGNIIKQMTLNEIINEYNGQCFVTNYHDLLVAREGDRTKSRKSWDTIETIKELKEGYLSQVVHIISKMMIEYKAIVVLEDLNVGFMRGRQKIERQVYEKFEKMLIEKLNCYVDKQADPASEGGLLHPLQLVNESKSFQKHGKQCGCLFYVRAWNTSKIDPTTGFVNLFDTRYETREKARVFFSKFKRISFNKEKDWFEFSFDYNDFTTKADGTRTQWTLCTNGTRIRTFRNPLKNNQWDDEEIILTDQFKELFSKYQIEITGNLKDSINRQSEAAFYKDLMSLMKLLLQMRNSKTNSEVDYLFSPVADEQGVFYDSRNCGANLPNNADANGAYNIARKGLWVIRKIQSTSIDEKISLAITDKDWLNFVQNKSYLID

SEQ ID NO: 1710 - protein, 663 aa, Unknown
  Description of Unknown: uncultivated organism sequence
  Category: MG75 effectors
  Description: MG75-196 effector
MIPKCSTQLNKVKEHFAKSSTDITVFDSKTFTSPITITKEIFDLNNVTYDGKKKFLKEYLEKTGDQKGFSDALSTWKHFCLQFLKAYKSTANYDFSEIERNIDSYSDLPLFYQELNNILYKITFERVSADFIHQLVNEGCLYLFQIYSKDFSPYSKGKPNLHTIYWRMLFDEENLSNVVYKLNGEAEIFFRPSSIKCTGPTHLANRPIENKSEYNKKNKPSSTFGYDLFKDRRYTKDQFEFHVPITLNFKQPKPSMFNDEVRTFLKENGVRHIIGIDRGERNLLYLVMVDLDGNIIKQYSLNRIASNANNSNFEQDFRDILHKREGDRQEARRNWSTIQNIKELKEGYMSLVVHEIVKLMLKEDAIVVLESLNRSFMQIRGGIEKSVYQKFEKMLIDKLGYIVDKDKAPTENGGALHAIQLADTFENYNKYQSGIVRQCGFIFYVPAWCTSKIDPTTGFVPMLKCKYENIDSSQTFFSKFDSIRFNEAEEYFEFKTNYANFYTSSKGGKQQWNICTFGERILTQRAKDGHFESKTIALAPAFKELFAQAGINIQGNIKAQIVKQNDASFFKELHHLLRLTLQMRNSNSTTGDDYIISPVKNKDGEFFDSRRSGEKLPQDADANGAYNIARKGLMLLQQLNATKADSKFKPEISNEKWLEFAQK

SEQ ID NO: 1711 - protein, 1376 aa, Unknown
  Description of Unknown: uncultivated organism sequence
  Category: MG77 effectors
  Description: MG77-1 effector
MTVDNSAYYDSYTGRYPIRRTVQFSLIPQGETQKWIDQYGFVSADEKRDEDYKELKKIIDNYHRDFIARALDSFKKAIDWNNLIEALEQFQQSNETDKPKARKELEKVQANYQSEIAEAFRKQDDFNSLFKKDLITKILPDSINDEDKNELLARFRQFTSYFTGFNENRRNLYSDEAKATAISHRIVNENFPRFYANCKDWERLNKLYHGFGLQVQDSIEKLDQDIDIAQYFEPKNYSLVLTQEGIDVYNMILGGGFDSSRKKVSGLNNLANECWQKARSNERNGSQSEGIEEQRAPHKIILQQLHRQILSENVSSWSQLFEQYKNDGEVYDALKTLNKELLQPRNEEVSFLDQVVDLFRKLKEFDPAVIQVRSNRFFSFSRTCFGDGFYLENAIASCVDEKLAPVQGLSASVRNKWAKKEQRTLREIAQIVYAAEKSLKAKDADAIDLPNEQVWEILHVDNLIEDFYETRDEIVVREERLEEDLTGAKPDARKLMQKGELVQKIKAFLDSLLNYQRALQVFSLDANEERNPEFYAYYDSLRENWSIVPQIYDRVRNYVTQKPYSKEKFKLTFENPSFLNGWSLDKQDENYGALFLQDGKYYLGILNPNNKIKFESLHDAVEDKTEGVFQKVDYNLFPGATKMIPKCSIARNDVKNHFRKSKSDCSLDNEKFIKPLRIPYRIMELNYDMTADQPEKLKLKKYQVEYKRSTGDEAGFTEALADWIDFCLDFLESYRNTAGYDFSFCYGKEYKSLDQFYNDVDRITYSLSLRDVSKRQIDQLISDGKLFFFQLYNKDFAEKATGKKNLHTLYFEALFSKQNLNETVFKLDGEAEMFYRPASIDSPFTHNVGEYVVNRTYTEVIDGKEERKSLKDYVHRELYEFANGKKAKSKLSKDAIRAIELGHYTPKEVTHAITRDKRFSQPQYSLHIPLTINFGTKPIGGRDNNSDILKSIKRDKDIAIIGIDRGERNLLYYSVIDQAGKILDQGSLNAINGVDYHEKLDLRERERNEQRQSWKSIDKIKDLKKGYLSVAVHEIVSLMLKHNAVIVMEDLNAGFKRSRTKFEKQIYQNFEKQLIDKLNYCVIKPKTQGTSDEASNRGEHRDLDAPGGVLCGYQLANQFESFQKLGKQCGSIFYVPAWNTSRIDPTTGFVNLFRAAELRYKNLQQVQSFFQRFDGIRFNKDEDWFEFTFSYSNFNTSGTSLIDEWTVCARDVELPIVVKDDNEGRWNRQNTKNETINIKNKLEGLFAEYGIDYKSGEDLIEAITFINHSGFYKELLKYFKTLIALRHSTKAGTTPAVDCIVSPVMNEAGYFFDSREASPAFPQDADANGAYNIALKGLQIAKEFIDEATDAPWRVTYKNSNNEWLRFVQERAWKNQ

SEQ ID NO: 1712 - protein, 1234 aa, Unknown
  Description of Unknown: uncultivated organism sequence
  Category: MG77 effectors
  Description: MG77-2 effector
MSNFYSTFINLRPVSKTLRFSLIPIGKTRENIRSAEIISQDEKKSQDYVILKDVFDTYHKAYIDQHLCRIQGDWSELAKALEERQSSQSAETLNRVQTAYRKEIAKLLISEKATKLGKNDHLFLADDGVTFLQKNDLAKLIKLTVDEKRAAERENRRPEYLIPELGEHIKAVEQFDRFAGYFLAYQQARNNIYTDEGSTSVAHRVVNENFPKFMANIHTYRRLPESLKQEFEHSLEDLLYGVPLETVFSTDYFNAVLAQTGIERYNTLLGGKTEEGGVKIQGLNELCNLAFQQGILPKKVVFVPLYKQILSDRDRASFLPEKFKSAVEMLTALGHFMTELNEMIAAEHESVADNIKSGICDSDRVYIGKSQLASLSMLCFDNWNKLRDAVRPKEVYSLSELQLVSEKDILGIVREQFLAKLGKITEASTSLPPVLKKETLREEDYSKIKTYLDAVIDAQHLLKIFDADDDADKDSVFYGTSDALNETLRKGIPLYDKVRNFATGKPYSEEKFMLTFDAPTLLNGWDKNKERDNCCMLFRRDGLYYLGILNAKDKPTLTEEAEIDGPSYEKMVYKYLPTPSKMLPKVFNKSGRWIAAHGLDDEIRDGYEKGLHKVGPDFDPVFMHKLVDYYKVCISQYEDWATFRFRFSDTETYRTMADFYGEISAQSYNVSFTKVSERQINDAVDAGQMYLFQIYNKDFSEFSHGAPNLHTIYWRELFSAENLKNPLVKLNGEAEIFYRHPSVKNPFRHQKGDVLINKVDAEGVTVPDARYRTAASDAASSMPLEILRASYPELIFKIADREIVKDNRYTKESFAFHVPLTLNYGCDAGIRLNQTVCEKLQSDEPYYIMGIDRGERNLIYISVIDRHGRIVEQRSLNVVGQNKVDYQAKLDTLERERQDARKNWRAITAIKELKEGYLSFAIHEITELMMRYPCILVMEDLNFGFKRGRFHVEKQVYQKFEKMLIDKLGFCMLKDRTPEEEGSVRHAYQLTEPFESFQKLGKQSGVIFYVPAAYTSKIDPLTGFVNLFTSAQLNYTSVEAARTFFGTMREIGYDAQRDCYRFAFRYGDYDLNKKDYTDAWTVYTAGEDRIAHSVKNGRHEYETVDVTKRMKALFARFGIDPYASDLRAAIAAVDKKEFFSELLRLFRTTVQLRYEDQTQDFILSPVEKDGRFFDSRTAERDLPQDGDANGAYHIALQGLRLVWERIENGKVKTDGKGEQSYNWFRFVQKKEYRK

SEQ ID NO: 1713 - protein, 1236 aa, Unknown
  Description of Unknown: uncultivated organism sequence
  Category: MG78 active effectors
  Description: MG78-1 active effector
MQQFIGVYPDSKTLRFKLIPIGRTLEMMEKNAIIQNDTKKYEGYKRLKKIIDEYHKAFMDHSLKDLYLEGLEEYSELYNRSKRDVSQEKKYKELQANLRKQVINAIKKDPQFKRLFKKELITEDLYKFVGDNEEIIDLLQEFSEYTTYFTGFHQNRENMYTDEEKSTSIAYRLVNQNLPKYLDNIKIYELLMTSSVAEQVEGLEKELRSLYGVLSIKDYFTIDGFNLVLTQKGIDVYNTILGAYAKENGEKVQGLNEIINIYNQHVKEKAKRIPIMKELYKQILSDRDTVSFVNEKFESDEDVFEAIDLFSTELEQTIIMPQNDMAVKALLLNIADYDLKHIYINNDSFITTISKYLYGDWSCIHSAISDHYDALKGGKVKDRKYEEKKQKELKQVADYSISDLDNYVSKYKNESKKMEDYFTEQCASILAEIEKTKEKYLELSAHCKDKEDSAIRKDDKNIGIIKEYLDAIKKLQRLLKSLVLGQQEPDKDELFYGELIRIWDALNGITHLYNQVRNYVTQKPYSLEKIKINFEKSTLLAGWDKNKERDNLGVLLLKDGNYYLAIMDRKHNKSFLEVKAATSDVYQKMNYKLLPDPSKMLPKVFFSQKRIQEFAPGEEILQIRESGSFKKGDNFNLEDCHKLIDFYKASINKHEEWKNFGFSFSDTKDYADISGFYKEVSDQGYKITFEDVDADYIDRLVEEGKLYLFKIYCKDFSPYSTGKPNLHTMYWRALFDEENLKDIVYKLNGQAEVFYRKASIPLKITHPANEPIHNKDLNAKKQTSVFPYDLIKNRRYTCDQFQLHVPITMNFKASGENRFNKRVNQYIHDTKGMHVIGIDRGERNLLYICVIDENGKIVYQKSLNEIISCRTNEEANEGHCVDYHLLLDAREKQNKEARENWTTVNSIKELKEGYLSQVIHIITDLMIRYNAIVVLEDLNFGFMRGRQKFEKQVYQKFEKMLIDKLNYLVDKDKEWTEDGGVYRAYQLTDKFKSFQMLGKQSGFLFYIPAWMTSKIDPSTGFVNLFYTKYENMEAAKNFIHKFKRISYNEEKAYFEFEFDYKDFTYKADGTKTDWTVCSSGMRIKHFRDHEKNNNWSTKTIYLTDDFKELFDEYEVKLQADNMQDQLLGLSDVHFYKKFMELFSLMVQMRNSNEEGEDNITSPVLNQNGEFFCTHKNERGSDRIIPEDADANGAYNIAKKGVLIIEKIRKTDVNDLDKVKLAISNKEWLQYAQEHIL

SEQ ID NO: 1714 - protein, 1235 aa, Unknown
  Description of Unknown: uncultivated organism sequence
  Category: MG78 effectors
  Description: MG78-2 effector
MNRILADDFIGMYPVSKTLCFELRPIGKTLEHIERDGIIDTDVIRSENYAKVKKIIDEYHKAFIQKVLAKVQLDGLEDYYRFYNTIRRTDREEKAFLNCQENMRKQLSKAFKDDDAFKTIDKKELIKNDLVSFFAEDREKLDLIREFSDFTTYFTGFHQNRQNMYSDEAKSTSIAYRIVHENLPKYFDNIKVYDQIMATSISEQVAELESNLCVVFENFGKIGDYFIIPGYNAVISQEGIDRYNTIIGGYSEEDGKKIQGLNEIVNLYNQKHKVHLPKFKLLFKQILSDRERISFIPDEFASDIEVFDAVQGLLQRLDEELFENGEDNITISELFSDLSIYDLNGIYVTNDSSITTISQELFDDWSVIRNAIDRKYEEMNPIRRMKQEKYDEKKTTELKKIKSYSIGNLNALMEENLKSEGIEKYFTEKITHALLEIRTASENYRKIDVDKYQVGRALKGNDRDISLIKGLLDSLKELQWIIKPLNAGFEEAEKDELFYGEYTRIWDTLEAITPLYNKVRNYVTGKPYSTEKVKLNFGRATLLNGWDKNKERDNLGIILLKDNNYYLGIMNRDNTQCIDEAPQAGSEKVYEKMNYKLLPGPNKMLPKVFFSKSRIDEFSPTPELMHNYKKGTHKKGDLFNLDDCHKLIDFFKASIEKHEDWSQFGFQFSETGSYAELNDFYKEVSQQGYKITFSNIDESYIDKLVDEGSLYLFQIYNKDFSPYSKGTPNLHTLYWKAVFSKENLDNVVYKLNGEAEVFFRKASIRQEDIIVHPAGKEVANKDPFNEKKTSLFSYDIVKDRRFTCDKFSFHVPITMNFKADKQRNINERVNLALRAAKDIHIIGIDRGERNLLYVSVIDMNGKIVEQMSLNELLSYDKNKNLHRRDYHQILTERERENKSARQNWTTINTIKELKEGYLSQVVHVITDLMIKYNAIVVLEDLNFGFKRSRQKFERQVYQKFEKMLIDKLNYYVDKQKNYDENGGLLKAYQLTAKFTSFQTLGKQSGFLYYVPAWNTSKIDPTTGFTNLFSLRYESVEKTKAFIRNMDRIWYDADTGAYALSFNYDRFTYKAEGTKTDWIIYTFGKRIEHFRNKEKNSEWDVKYIDLTESFSELLAEYGISRELEDIKGEMLNISDAEFYKRFMKILSLTLQMRNSDEVNGVDEIISPVKNRRGEFFISGTCKDLPVDADANGAYNIAKKGLWLVEKIKETPEEDIANVKLALSNKEWLKFAQDNTL

SEQ ID NO: 1715 - protein, 1235 aa, Unknown
  Description of Unknown: uncultivated organism sequence
  Category: MG78 effectors
  Description: MG78-3 effector
MKKRIADEFINLYPVSKTLRFELKPIGRTLEYVERDGIIETDVARSQNYTEVKALIDEYHKAFIQKVLENTELSGLEGYMNLYSNAHRADREEKEFEACQSDLRKQISKSFKQDPAFATIDKKELIKNDLISFYEGDQEKQALIESFSEFTTYFKGFHENRQNMYVDEAKSTSIAYRVVNQNLPKYCDNIKVFQLISETTISVSVAELEEKLNAKYSDFGKIGDYFTIDGFNKVISQKGIDRYNVILGGYTTKDGEKIQGLNEFVNLYNQKYKEHLPKFKLLFKQILSDRDSASFIPDQFESDQQVFEDIEKIYQRIKEELLENEEEITISELFSDLSAYDLGGIYVKNDGSLTAISQELYGDWSVIKSAINSDYENNTPIKRTKREKYEETKKKELEKVKSYSILSLNSFMSNIHKEANVEKYFTNKVTDALDRVAKEYRIFNGIKTGKYENGKSLKSNDSDIAKIKGLLDSLKELQFSVKPLIAGTDEAGKDEVFYGEFLRIWECLDIITPLYSKVRNYVTSKPYSTEKVKLNFGKSTLLDGWDKNKEQDNLGVVFLKDGNYYLGIMNRRDTGCIDSAPIANSDHVYKKMNYKLLPGPNKMFPKVFFSKSRIDEFAPSEELLSNYRKGTYKKGDNFSLEDCHDLIDFFKQSILKHEDWSQFNFKFSDTKDYENISEFYKEVADQGYKINFNDIDESYINKLIDEGSLYLFQIYNKDFSKYSKGMPNLHTLYWKALFMPVNLKNVVFKLNGEAEVFFRKASIRQQDIISHAAGQKIKNKDPLNEKTESLFEYDIVKDRRFTCDKFMFHVPITINFKAAGERYMNLRVNNMIHNADEMHIIGIDRGERNLLYTCVIDLNGNIVEQMSLNEILSYDKNNNLHRRDYQRMLTEREKENISARQNWTTINTIKELKEGYLSQVIHVITNLMIKYNAIIVLEDLNFGFKRGRQKFERQVYQKFEKMLIDKLNLYVDKQKAVDENGGLLNAYQLTAKFESFQKLGKQSGFLYYVPAWNTSKIDPTTGFTNLFYTRYESVEKTKMFIQNMDRIWYDESTAAYAFSFDYNRFTYKAEGTKTEWTIYTNGRRIERFRNPEKNSEWDVKSVDLTAAFDELMTEYSISKDTEDLRNTILEIQEADFFKRFMKLISLTVQMRNSDEKNGVDEIISPVKNARGEFFVSSGTEKYLPVDADANGAYNIAKKGLWIIQKIKETPEDEMAKLKLTMSNKEWLKFAQENTL

SEQ ID NO: 1716 - protein, 1245 aa, Unknown
  Description of Unknown: uncultivated organism sequence
  Category: MG78 effectors
  Description: MG78-4 effector
MNQEKGNLLSEFTNLYPVSKTLRFELKPVGRTQEHIEYDGILDADFQRAEDYKKVKKIIDRYHKEFIEISLRNVFLTKEDLNTYKELYETNAAARDEKWEKHFNKAKESLRKQIERCFKDAPAYKNLFKKELVQKDLIEFVKGSEEETKLVQGFKDFTTYFQGFYENRKNMYSAEDKSTAIAYRLIHQNLPKFIDNMHIFQKVEQSPIKDQLNTMFYELKAKIDIASISDYFALEGFSKVLTQSGIDVYNTILGGYAEGNVKVQGLNERINLYNQQLSKEEKKQLSIPKLKPLFKQILSDRESISFIPEQFADDQELLDAISEFYRNIQQTIFENEELITISQLFGQSDSYNWNRIYVKNDAFITTMSKQYLGDWSIVTRALEMDYDLAHASKKKGAKYEEKRGKELKRVKYYAVQKLNQIVMQYYGQECQIQQWMNQQIQETLQMIYENYDAASALLNTTYVTKKSLCNNQQAIGQIKLLLDSLKQLQNLIKPIANTQNETDKDELFYSELIRIWNELDPLTLLYNRVRNYVTKKPYSLEKVKLNFNKSTLLNGWDKNKERDNLGIILRKDGLYYLGIINPKCTNVIEKAPEATESTCYEKMEYKLLPGANKMLPKVFFAEKNIEEFNPSEEILAIREDESFKKGNNFSLENCHKLIDFYKQSISKHKDWSKFGFEFTSTSEYQDISGFYREVENQGYKISFRDIDVSYIDELVEQGQLYLFQIYNKDFSPYSKGTPNLHTLYWKALFSPENLSNVVYKLNGEAEVFYRKASIAETDKVVHKANEPVKNKDVHTEKETSVFEYDLVKDKRYTVDKYQFHVPITMNFQAQGENYMNRKVNQMIHDNKGIHVIGIDRGERNLLYLTLVDPEGRIIKQMSLNEIISYDKQNRKHVKNYHDLLDVREKENKSDRQNWKTVNTIKELKEGYLSQVIHVITKLMVEYNAIVVLEDLNSGFMRGRQKFEKQVYQKFEKMLIDKLNYCVDKTINPEQSGGLLHAYQLTKRFDSFKKLGKQSGFLFYIPAWNTSKMDPTTGFVNLFYVKYESVDKTKEFIKKFDSISYNSERSYFEFAFDYSKFTYKADGTRLHWTICTHGERIENFRNPEKNNEWDSRKITLTTAWKKLLEKFEIDYTQKNLIDQMLQCNDTEFFKTFMRYFRLILQMRNSDAKTGEDWICSPVMNEHGKFYFSGEESTLPLDADANGAYNIARKGLWVIEQIQSAQLDKLDKIKLAISNKEWLKYAQEHTL

SEQ ID NO: 1717 - protein, 1208 aa, Unknown
  Description of Unknown: uncultivated organism sequence
  Category: MG78 effectors
  Description: MG78-5 effector
MKDEHRAESYKKVKKIIDRYHQQFIDNVLDNIALEGLNEYQEYYCIKNRNEQQEKQFENIKKKIRKQISDAFTGNPKFKCIFSKDMIENELLEYTKDNTDEQELIYEFDKFTTYFQGFYDNRKNMYSCDGKSTEVAYRIVDQNLPKYIDNISIYKTALSAGLDKQISDAINKIKTYYNIPLSEQLFDVNGFNNVLSQKGISIYNYIIGGFSDKERSKIQGINEIINIYNQHVDKKDGKKIPKCKQLFKQILSDREDAPFIIEQFESDEEVFSAIDNFYCEMNVSIFNNVDSINVQQLLSGINNYNLSGIFIKNGLAITDISKNLFSDWSIINHALEMNYDKNNNTKNKQTEAYIEKRKKVIKKQKAYSIEFLNNVVTEYTDKEVHIEKYYVDKFNNEDNLVNKIIEQKRHYDELLATSRKKPLRKNDVLIENIKQLLDLFNELQRLIQPLINYDESAKDPLFYSEIERIWNILDLLTPLYNKVRNYITKKPYSIEKSKINFNSPTLLKGWDKNKEETNLAIIFEKNGLFYLGVIDKNNNKVITKAPKAKSNNVYKKMIYKQIPNPSRDFPHVFLAKGNIDYYKPDNELLKKYEQKTHLKNNPNFCLEDCHKLIDFFKQSIKKNEDWAKFNFVFSDTKTYKDLSDFYREVDAQRYKITFENIDEDYINQLVSEGKLYLFQIYNKDFSEYSKGKPNLHTLYWKMLFAPENLENVVYKLNGEAEIFYRRASIKQDEIIKHPANEPINNKNELNKKAKSVFEYDLIKDKRYTIDKYQFHVPITMNFGAQGDNHFNLSVNKAIKYADDVNVIGIDRGERNLLYLVVINSKGEIIKQKSLNEIITVNNNKTEFHTDYHILLDKREKENVSARQNWKTINTIKELKEGYLSQVIHVITEWMLEYNAIVVLEDLNFGFKRGRQKFEKQVYQKFEKMLIDKLNYIVDKNKDIYESAGLLNALQLTNKFETFKTLGKQSGFLYYVPAWLTSKIDSTTGFANLFNNNDIRYSSVEASKEFFSKFISITYNPLGIHGSDYFEFSFDYNDFTYRAADTQTHWTVCSYGERIHHFRNQEKNNEWDTQYVDLTKSMKNLFDNYNINYQNVDIKEDILKISEKAFFKELLWLFSLILQMRNSDSDNNVDRLISPVLNDKNEFFDTGLKIEEYPIDADANGAYNIARKGLWVINQIKLCDDDKLNKLKLAMSNKEWLQFAQENRL

SEQ ID NO: 1718 - protein, 1299 aa, Unknown
  Description of Unknown: uncultivated organism sequence
  Category: MG79 effectors
  Description: MG79-1 effector
MNNLSQFTNLYLVSKTLRFELKPIGKTLENIEKDGIISEDEKRAENYKKVKIIIDKYHKWFIEKSLSCVKLPEEKLNIYYNLYKATPDVKKEEKWNKEFEDIKKELRKEITNSFSSDEVKDLYKDLGKKELIRDILPEWKELDEEEKQLFGDFYQFTTYFVGFNENRKNMYSSEEKSTAISYRIINDNLPKFIDNIETFKIIKKTEFYSLFNNIYSELEPWLNISSIDEIFELTYLNEVLSQSQIEEYNFIIGGRSGEDRNDKIRGLNQYINEYNQKHEKKDRLPKFKMLYKQILSDREKISFLPESFENVNDLFVSVETYYKSNLLCVKNENNEEINIFDELSKLMSEISSYDLSKIYIKNDKNITDISQKLFGNYGVITSSINYYYESFINPNYKDDYARAKTESKRDRIEKDKEKYTKQKYLSLLEIQEAIKKYLEYTNEYSDSVVSYDKCLINYFSKIFDEKDKTNKIKDVYDKYTLLEPVLNVSYPETKKLSKNEKKLLKDFLDAILEIEHLVKPIYITSDEYSENDLTFYSQFNELYSHLDLLISLYNKVRSFVTKKPYSTEKIKLNFNSPTLLNGWDKNKEQDNLGIILIKNEKYYLGIISHKNRFIIDDFCTDASMENGYKKVVYRQIADASKDLPNLIEVNEKTIRKTGRKNDKGVNVILEEFKETYLPKKINQIRKSESYKISSKNFSKEDLTAYIDYYMQRIIAYKSDFTFIFKKPEEYNSYTEFIKDIDRQKYYLSYEYISYEDIKSLVDTGKLYLFQIYNKDFSASSKGKKNLHTMYWKALFDEKNLKDIVYKLNGQAEIFYRKASIPQESIVRHQKGDEMEFKNPLRNGNGERFKYEIVKDRRYTVDKFQFHVPITMNFKSPGDFKINSEVRKYIRNNPDVNILGVDRGERNLIYISLIDQKGNVIFDEDGKPIQYSLNTIESKYKKGDETVTFKTPYHTLLDEREKSRKQARQQWDDIEGIKELKDGYISQVVSLVTRLMVKYNAILVMEDLNFGFKKGRIRVEKQVYQKFEKMLIDKLNYLVFKDSKPGEVGELYNALQLTNKFTSFSSLGKQTGFIFYVPAWDTSKIDPVTGFVNLFPRCNTVKERQEFFNKFDFIKFDGENFVFSFDYDNFTSRATETKTKWTISTQGGERYFWNNRADNGKGATEKINVTEAMKKSLSEAGIQLEKDMDLKEKISSLDGKYIGKIYRLFNIVLAMRYSKDEEDFILSPVADENGKFFDSRNAANNLPKDADANGAYNIARKGLWYIMQLNDASGDLMKTNLAITNKEWLSFAQNKPYLDN

SEQ ID NO: 1719 - protein, 1230 aa, Unknown
  Description of Unknown: uncultivated organism sequence
  Category: MG79 effectors
  Description: MG79-2 effector
MKDFNQFTNLYQQSKTLRFELKPVGDTLTHIQKNGILDRDYARAENYRKMKKTIDEYHKDFIDRALRGTNLDGLDAFAKLYAASVEEKRTEKWKKEYASCKQALRKEIAECFKRQAGFSDLDRKELIRNRLKAWIDQNQSDLFYTEEFYEFTTYFTGYNQNRMNMYSDEEKATAISHRLVDENLPKFLDNAAAFRKLKDSPVADHFSQLCADMEPWLNRSSLDDVFSVPHFNSVLTQAEIDAYNVLLGGRREEDRKLRGLNEYINLYNQKHPDAKLPRMKMLYKQILSDRESISWLPMEFRNAVELLEAVSGYSREAVDTVARAESALLELPNCDLTHVYVRGDALGAISSKLFGVYYVLSDALGLEDREDYYSMAELQTALDGYAKTVDRSVIPNADALVPDCLIAYFKNGLLQLAKDLHEALDKATPLLQIQQPEDYSLSQSDKSQLKSFLDAAMEILHFLKPLYLPADSELEKDDVFYGAFAPVYEDLQPITKLYDMVRNFATKKPYSTEKVKLNFDCSTLLDGWDTNKETQNLGVLFLRDGCYYLGIMDKRHNRVMEKAEGSQEEECYQKVQYKLLPGANKMFPKVFFSKSRINEFAPNEEIMRIYKSGSYKKGANFSLKDCHTLVDFYKASIQKHPEWKQFEFRFSPTESYQDINGFFQEVDKQGYRLTYTPVSAAYIDALVREGKLYLFQIYNKDFSPYSKGRPNLHTMYWKALFSEENLRDVVYKLNGKAEVFYRKRSISDANLVIHPAGQPIAKKNPMLSGQSSCFTYGITKDRRYTVDKFQFHVPITMNFKASGAVPINEVNKKVCAYIKNNPDVNIIGIDRGERHLLYISLIDRNGRVVKDENGCDIQYSLNTVTGSYRSSDGRPVGFETPYHDLLDQKEHERQAARQNWDTVENIKELKEGYLSQIVYHIAKMMVRYHAIVVLEDLNSGFKRGRIKVEKQVYQNFEKALIEKLNYLVFKDAEEGQPGDLYHALQLTEKFESFKKLTKQSGFLFYVPAWNTSKIDPVTGFADLLKPRYTNVNDAKAFFNKFKRISYDARNDWFCFSFDYRDFTQKAGESRAEWELCTFGAERYAFNRNLNGSRGGYEKWNLTERLKKLFEDYGIDFRRENLENAITMQTKAPFFSSLIKILQVLLAMRYSSAEDGRDFILSPVMGPDGSFFCSENLTPGLPADADANGAFNIARKGLWVLQQIDRAEKYTDWTTKVQNTQWLSFVQQLTP

SEQ ID NO: 1720 - protein, 1332 aa, Unknown
  Description of Unknown: uncultivated organism sequence
  Category: MG79 effectors
  Description: MG79-3 effector
MREKNSGLEQFTNLYSLSKTLRFELIPVEGTAEAIQQNGILAEDKKLADSYQKIKPTLDAFHRAFIDRCLSEVKLENLDRYYDLYHVGDEEKRTKKYQDEFKSVKNALRKEVVSYFKKDKRYPKGLFGKELLKTHLPKWIEETGEDWYQDESFVNFTTYFSGYNENRENMYKDKEQSTSIAYRMIDENLPKFVYNMRLFNRLSDTDISGSFSVISEELAPFIFTSSLEEMFELSTFNKLMTQDHIDALNTIIGGYKEGEKVVKGLNGYINEYNQAHPKNRLPMMQMLYKQILSESNSASWLPDAFDSAAELFSGMNNFCDCGLRMNENPSLLEEMKKVLQEIKACDAAGIYIRNDSSINTISNAIFGHYGVIRNALETYYECQVFPEYRKRLISAKSAKSAEKIKKAKETYVTGTGYFSVREIQDALELYIDTAELGSNPEIKNRYFKDCISVYLAEGSATYVSRIKEAYNNVSGMIKASYASDYRLNEDDKDGLKHFLDAVLSLLHYCKPLYVKAEAGIKVDEVFYGQFNPLYEQLQTVTVIYDKVRNYATQKPYSEEKIKLNFGIKGNFLSGWVESKTDASDNGTQYGGYLFRKRNYIGEYDYYLGISSNSKLFRYFNSISAEEASKYERLNYYQPKEQSVYGSAYKGRHSYADDKALLMSTILDFMKKTKDTEFYEGFLAYSQTDLATPSGCLSRIKEFSTELYENLLRDEKFKDANEEVMQALKATIHSMGRLKGTEAVTERQYGVFTEMMNDINTLMSNNVYQYSAVSETELREALQDKKKPLYLFRITNKDLAYAERLEQGKDRKHRGRDNLHTMYFKALMSGEQNVYDIGSGTVFYRPASIARKVTHPAGIPINSKNPNLKDHKNIFEYDLIKDRRFTEDKFQFHLSIIQNYSASGIKSSDYNEKVCQYLRNNPNVNILGIDRGERNLLYISMIDRNGNIVRDENGQLIQYSLNNLTGEYTNASGEIVKFTTPYHTLLDRREKDNADNQRSWGTIGKIKDLKAGYMSQVISHITRLMVKYNAIIVMEDLNSRFINSRRKVDKQVYQNFERALIEKLNYLVFKDIPVEESGGLYNALQLADRFTSFRDLQKQSGFIFYIPAWNTSRIDPVTGFVNLLKPKSDNLKQARDFFGKYESICFNSKSDWFEFAFDYSNFLSGADYLKSRWTVCTHGDCRYIYDKKMNNNKGGYKKINVTKTIKELFNEYGIDYAEGDDLKEQIVSQNRTAFFSKLIECLKVTLAMRYSNGDGGRDFILSPVADENGHFFNSEEAAANRDDLPWDADANGAYNIARKGLLVLRNIDKSDSVKDWTTKISNREWLEFAQSFN

SEQ ID NO: 1721 - protein, 1227 aa, Unknown
  Description of Unknown: uncultivated organism sequence
  Category: MG79 effectors
  Description: MG79-4 effector
MNDLSLFTNLYPKSKTLRFELKPVGETLENIQRSGIIERDTARAESYRKMKKTIDAFHKSFIDRALTKANLTKLDEFDALYRASADEKRTDEWKKAFDSCKQALRKEIVAYFIIQEDFSDLNKKELIRNRLKTWIDQNHSDLYFTEEFRDFTTYFTGYNENRMNMYSDQEKATAVSHRLIDENLPKFLDNIAVYNKVKASPVAERFAQVCTDMEPWLNVASLDDVFSVSYYNCTLTQLQIDAYNVLLGGWRNGDQKRQGLNEYINLYNQTHPDAKLPQMKMLYKQILSDRESISWLPAEFENASELLDVVQAFSESLKSPVENAGRILWELPGCDKSKVYVRGDALGKISAGLFGAYHVISDALGEEERVDYYALDTLQSALLAYAETTDHEMIPNGEAIKPDCISQYYVQGIQALSDALNASYSDVADLLNTAHTAEYRLSQTDKAKLKAYLDAAMEILHFLKPLYLPSDFELEKDEVFYGAFAPVYEELQPMTKLYDMVRNYATKKPFSTEKVKLNFDCSTLLDGWDVNRETQNLGVLFLRGGNYYLGIMDKRNNRILEQVEASSEEGCYQKVQYKLLPGPNKMLPKVFFSKSRIAEFAPSEEVLRIYKSGSFKKGSAFSREDCHTLIDFYKSSIQKHPEWSQFGFCFSPTETYEDISGFFREISEQGYKLSYLPVSSSYVDELVRDGKLYLFQIYNKDFSPYSKGRPNLHTMYWKALFSEENLRDVVYKLNGQAEVFYRKRSISDDDLVTHPANQPIAKKNPALAGQNSTFSYDIVKDRRYAVDKFQFHVPITMNFKAGGTARINEKVCAYLKNNPDVNIIGIDRGERHLLYVSMIDRNGRVVRDENGKYIQYSLNTITGCYRDSAGKQVAFETPYHDLLDQKERERQSARQNWDTVETIKELKEGYMSQVVHHIARLMVKYNAVVVMEDLNSGFKRSRIKVEKQVYQNFEKALIEKLNYLVFKDTPADHPGGLYHALQLTESFESFKKLTKQSGFLFYVPAWNTSKIDPVTGFVDLLKPKYTNAVAAKAFFSKFQGISFDPENDWFRFRFDYRDFTEKAGESRTEWELCTAGELRYAFNRKLNGNHGGYEQWNVTERLKTLFDRYGVDWRTGDLRKAITERTEAPFFAALVKNLQVLLAMRYSCAEDGKDFILSPVAGPDGAFFCSENGMPGLPQDADANGAYNIARKGLWVLRQIDRAESFNDWTTKVQNAQWLTFVQELTP

SEQ ID NO: 1722 - protein, 1233 aa, Unknown
  Description of Unknown: uncultivated organism sequence
  Category: MG79 effectors
  Description: MG79-5 effector
MKDLSTFISQYDVSKTLRFELIPTPETEKHIREKGILDADEKLAVSYKRMKETMDEFHKDFIDRALSTAQLRHIDEYCALYWADAEEKNSKKYADRLKAASAELRKEIVQCFDADDAFKKIDKKEFIKDELETWINEKHPMLYYDPDFKKFTTYFEGYRKNRMNLYSDEEKVGSVAYRLIGENLPKFLDNIRIYEKVKASKVAGKFSKLCKDMEQYMNGRSLDEMFSARAYPSTLTQTQIDQYNTVIGGRNDGSSKLQGLNEYINLYNQQHPDAKLPIFKMLYKQLLSDRISASWLPEAFDSAQALFDGVEAFAQEVLTDTVLNDLQTVLNELPERDAALIYVRKSSVNDISSRLFGYYSVFNDALDAMGENEKTGYISLARLQSAVDGYIPTLDKDEYESIVSEYAPNCVTACFFDNLHEYIENISDAYEALRPCFGVEHDENYQLSEKERTWLKAYLDGVIALLHFIKPLYIDKDFALEKDEVFYSDFMPLYEKLSQVTKLYDKVRSFASKKPYSTKKIKLNFGCSTLLSGWDVNKETQNLGVLLIKDGNYYLGIMDKANNKLFSDAPECQSEDCYQKVVYKLLQEPYKMLPKVFFSKSRINEFAPSEEIISIRINETFKKGPKFIAADCHKLVDFYKTSISKHPDWRRFEFKFSPTGTYVDINDFYQEVAEQGYKLFFKPVSTAYIDSAVSEGKLYLFRIYNKDFSPSAKGKPNLHTMYWKALFDEKNLADVVYKLSGHGEVFYRSRSIDDEKRVIHPANKPIDKRNSGMSGETSVFDYDIIKDRRYTVDKFQFHVPISLNFKAHGVSNFNEKVCTYLKNNPDVNIIGIDRGERNLLYISMIDRSGRVVKDSRGNYIQYSLNTITGEYKNADGAPVKFSTPYHELLDKKEKNRREARENWGDIESIKELKAGYMSQVVYHISRLMVEYNAIVVMEDLNSGFKNGRKKVEKQVYQNFEKALIEKLNYLVFKDYPVDTCGGLYRALQLTDKFKSFGMLTKQTGFLFYVPAWNTSKIDPVTGFVDMLKPKYKSIPDARVFFSKFNYIRYNDQKDWFEFSFDYGNFTDRADGTKTDWTLCTYGSLRYAYNKSLNNGHGGYEKWNVTDKLKALFSANGIEYADGKDLKTKITAQNKADFYAILVKCLQVTLAMRYSSVEDGKDFILSPVADENGVFFCSEGRNDGLPQDADANGAYNIARKGLCVLEHIDVAEKYSDWSTKISNKEWLNFVQTRA

SEQ ID NO: 1723 - protein, 1316 aa, Unknown
  Description of Unknown: uncultivated organism sequence
  Category: MG80 effectors
  Description: MG80-1 effector
MSRATGGGGAFESLMNMLKRRRIWGMGIFDKFVRQYSLSKTLRFELKPVGKTLENMRNHLGFDEKLQTFFADQEIKDAYMTLKPIFDSIHEKFITESLASSVAKKINFLEYFKKYKNRKELGEKEFQNIEKQLRTKFNDAYIEAAESLRKKAGKDEKGKYVLRDASYKVLTEQGILKYIAKNTVEFGNIESREKIDHALKAFEGFFTYFGGFNQNRENYYETGKEASTAVATRVVHENLPKFCDNVLFFEAHTDGYKQIHGYLKKKGRNLVNKKGVTLFPIAKDVFEISYFSKCLSQNEIETYNDAIGNANFLINLYNQALSEGKKSLPLPFFKTLFKQIGCGKRDALFFTITHDTKADANKARVKKAEAFSVEEVLELAAGAGEKYFSGTSDDGMINTVPEFLEHLRHRTDYRGIYWKRAAVNTVAGKYFAGWVDIKEHLLKEKVFHKNSGSGEIVVPEVVELNGLFKALSKVENWKNILFKPSIIKEKDQGKIIERSQYVSQAVLGLVERDIELRKSEFLAGSFAVLSSKRYKKPNEIEKIKSWMDGGLAVIQMLKYFDVRENKAKGDPIDSMLSEGLNNLVRAKDAPWFMWYDGLRNYLTRKPQEGTKDNKLKLNFENSTLGDGWDVNKEPDNYCVLLQDSNKHYFLAVITRQKDIKGYNKIFVKDEQNELFSTRGSNEWKKIEYKLLPGPNKMLPKCLLPGNNRTKYGATETVLDIYDKGGFKKNESSFSPSSLGKIIDFYKEALKKYEDWRCFNFSFKETASYKDISQFYLDVERQGYKLDMIDINKSVLDHWVDEGMIYLFAINNQDYNRGKRVGHKNNLQTTYWNAIFKILENRPKLNGGAEIFYRRALASDQLEKVSDKDSNLKHFRFSKEKFMFHVPITLNPTLKNPRMNNLINDTLKKQKDVNFLGIDRGEKHLAYYSLIDRNGNIKEQGTLNMPFLDKQGKQRIIKADKRTIGEDEKEQIKIVDCKDYNDLLDARAGDRDYARLNWQAIRTIKELKDGYISQVVRKICDLAIQHNALIILEDLNTGFKRGRQKIEKSVYQKLELALAKKLNFLVDKNAKIGELGSVTNALQLTPLISNFGDIENRKQVGIMLYVRANYTSQTDPITGWRRSIYLKNGSEKSIKEQILKYFTDFGFKDDDYYFTYKDENKNWTLFSGTKGKGLDRFRRRMGLKKDTWTIEKQDIVKILDEVFIGFDKERSFYSQIKAGKELHGWGNLRFAIEMIQQIRNTGTTDADDDFIVSPVRDATGNHFDSRRAKKNQPDSGDANGAYNIARKGIMMLDRIASDENPYIRDSEWDAWLSKNSR

SEQ ID NO: 1724 - protein, 741 aa, Unknown
  Description of Unknown: uncultivated organism sequence
  Category: MG81 effectors
  Description: MG81-1 effector
MPIISPGNQESNADGAIELRIAADIDETTGCTFSATGLPDGLEFERKKFEDDEEHTWQTGRIIGTPKRAGIYQVTVTAIDKAGTKTTASFVWTVCAMRAYRFALDLSDPQITAMQQHAGTARWAYNKALEAKVNAHRAYTERLKALLASGLTPQQAKAQMKKESAALKAQTAIWEHHRQCLTAMNLGRALPAKTPRGPQELIDDLAAIRAMVPDGVDPALLTLVGNWKGQPPTALCWARDRHEARQKWIKTHLVMARQTVTHLKQQLFDLGDTIPNMIENLANWRNTRDLPKEEGGSPWWQEVSSYVFSGGMGRADAAWSNWLKSLSGQRAGKAVGYPRFKKRGQCADSFPLFHDVTNPSIRIEGYRHLRLPNIGEVRVHNSGHRSGTRNRVTATNAKGVKRTVSGQSKGRLGSTKRLVRMIERGDAIVQSVTVVRGGHRWYANVLVKLTPEAMRQREMVARAHQKVSKKRAQGRGNVGVEWGVRTLATLSNGESFANPKPGKKNQRRLRVASQKVSRKPHKRGQPISANRAAAIRQLGRVHHEIAETRKGNHHQISAAISLGYRGVAVRGLDVKSMTKSAKGTVEKPGKHVKVKSTFNRAALDAAPGMLQNQISYKTTQYGAKFGVAPKDLPSSQTCSACGWRDPSIPLTQMTFRCGNVECGKKIDREVNAARNIRNSVFPVASDSGDTLNACVDGIGPPGSRGQPSPKQEDPEPHPPPEDGPAEGHSGEAIPRRSHTPG

SEQ ID NO: 1725 - protein, 607 aa, Unknown
  Description of Unknown: uncultivated organism sequence
  Category: MG81 effectors
  Description: MG81-3 effector
MPTEPRLIQKAYKFALDPTPTQARAFASHAGGARFAYNWGISTYAAALDARKAQTDAGQDPTVDVPNHFALCKAWTQYKDTYRLTGDPDGRPVHWVEDNFVGTYQAALRDAHGAWQKMWDSRNGQRKGRAVGRPRFKKKGRSPDSFQMHGDSLRLDSGRALRPADATARKPLNRAERAKLAPTPGMTPTERSAAQKRLRAGRKARAGHVHGPQVSQSGTIYVNLPKVGPVRVPGRVRIPQVTPSVAGWVDRNSRTARKLLRQLAKAATTGPVVCPTCAGTGTVTVTTKKGERRDTKCGKYHPTVRPEDKLPGCQGKGKVEPARIVRATISRGASGTWWCSITTEQVITVPVITTRRPAHPTRRQLADGSIGVDLGVKYLAVLSTGDTYMNSRFLDSALTDLKRMQKVLSRTAKDSHRRLKARRRVGTLHEQVALMRRDATNRVTTELARKYATISVEGWDAQRLAELGSKDLPKRLRRNRNRALADAAPGMLRWQLEYKTSWYGSTLFKGEPHWETGRICSVCGTARTKPVPLAEEQFRCPQGHVLPRRVNSARVMDRVARGLVAAPATPEPRGGDVRPATPRRGGPSPAKRVARSRKRGKTGTPDP

SEQ ID NO: 1726 - protein, 632 aa, Unknown
  Description of Unknown: uncultivated organism sequence
  Category: MG81 effectors
  Description: MG81-4 effector
MTTETVMQQLAFKVALDPTPRQARAMGSHAGGARFAYNWGIARIAEALKQREAERQAGGEPTTPVPDHFALCKLWTQWKDTAEWVDRATGEVTRGVPWVAENFVGTYQAALRDAARAWANYFDSRTGQRAGRAIGKPRFKSKRTARKSFQVHGSSLRLVSAVKVNLPKIGTVTVMSDDSRHPAMARSRRRVPGQRHMGNRRRSRQLWQRLRHGQALAERAAEILSAAYADGNPDRVLEHLTALADERARARAVAAAEERLQKAKAAAAKAKPEKREKAQQRVAQAEEALRRAQAITANRKDGWSARKLAEVCRTGLITPVQAADLAEVFGLGEQQRAALAEAALQPRLVKATVTLGADGLWWLSLSAEVPVRVRTSPSRRQRERGATGLDLGVRNVVTSSKRLGGDQNLPNPRYLEQALVELRAAQKHLSRCTPGSARHAKAKARVGLIHADVARLREQHHHRLSTRLVRTFAGIAVEGYDLQELARRGSEGLPGEVRRRRNRALADTGAGMLRQQLQYKTARYGSHLVVAEPDAPTGRTCATCGQAKAKPVPPYHEVFACEACGRTRPRRLNTALALEAVAASSGSPHGGSDQPRGEDVRPAASRRGGQSSMKRAARSRPPGRGQTGTPGP

SEQ ID NO: 1727 - protein, 545 aa, Unknown
  Description of Unknown: uncultivated organism sequence
  Category: MG81 effectors
  Description: MG81-5 effector
MATTDKKDKDREKLRAYKFRLDPNQAQTTALYQAVGAARYTYNMLTAYNSEVNRLRDDYWKKRHDEGISDADIKKELKALAKEDKRYKQLKYGAFSTQYLTPERDRHKDAALRIKNGEDPSVVWNQETERSANPWLHTVNRRVLVSGLQNASDAWDNFWDSRMGKRAGRLVGTPRFKKKGVSRDSFTVPAAKEKEKMGAYGAAYLRGEPAYKQGRRKITDYRHVRLSYLGTIRTFNSTKPLVKAVAAGAKIRSYTVSRNADRWYVSFLVKFSEPIRRSATKRARAAGSVGVDLGVKYLASLSDSEAPQRFPNLKFVEGLPSLENPRWSGTSSRRLRKLQRALARSQKGSNRRSRLVKQIARLHHMTALRRESNLHQLTKKLATGYTLVGFEDLNVSGMTASAKGTVENPGKNVAQKSGLNRVVLDAAFGVFRNQLEYKAVWYGSAFEKVNRYFASSQTCSECGRKAKTKLTLRDRVFDCVYCGNMMDRDFNAAVNICREAQRLFDEKLASEDGESLNGRGSRGALRGAKTVEASRPPASHRRGSP

SEQ ID NO: 1728 - protein, 512 aa, Unknown
  Description of Unknown: uncultivated organism sequence
  Category: MG81 effectors
  Description: MG81-6 effector
MPTKQKEDSNRCVLTLPLLTEPWQEHIIEKRFKIIEHLKNQLISIELRKLKKLQRTKAYKNLIKQIESVPKSERTALYKERNKMLKDAGFSQYTFMDDMAGKKSLMQKHFESHINVQIAHKAAIDVWSSFEKFLFGTGQIVHYQKRGTLSSVASKSPKTGMFYYSDENIFKWSGGGTKPKGGIILCLRVASVKTNYEKEMVANNEIKYYRVVRKWMKTKYKYYLQITFAGKPADKHREISTGRVGIDIGTQTIAIASDKSVKLLELADKVNKNHIKKCELQRKLDRSRRYTNPDNFNPDGTVKRGTKGHKLKWNKSKHYIEIAGKIRELERKNADIRKYQHTCLANDILAMGNQIYIEPMNYKGLQKRAKETQVDEKGRYKKKKRFGKSLANKAPAMFVTILKTKAEQHGGEVYEVDIMSYRASQCDHTTGEYTKHGLNDRWRILGNGDKVQRDLYSAFLIKNSNKTHDEIDLDKCSKTYDNFKKLHDTEIENIRNEVKLRERKNISSYGIA

SEQ ID NO: 1729 - protein, 512 aa, Unknown
  Description of Unknown: uncultivated organism sequence
  Category: MG81 effectors
  Description: MG81-7 effector
MPAKQKEGGNRCVLTLPLLTELWQEHIIEKRFKIIEHLKNQLISIELRKLKNLQRTKAYKNLIKQIESVPKSERTVLYKERNKMLKDAGFSQYTFMDDMAGKKSLMQKHFESHINVQIAHKAAIDVWSSFEKFLFGTGQIVHYQKRGTLSSVASKSPKTGMFYYSDENIFKWSGGGTKPKGGIILCLRVASVKTNYEKEMVANNEIKYYRVVRKWMKTKYKYYLQITFAGKPADKHREISTGRVGIDIGTQTIAIASDKSVKLLELADKVNKNHIKKCELQRKLDRSRRYTNPDNFNPDGTVKRGTKGHKLKWNKSKHYLEIAGKIRELERKNADIRKYQHTCLANDILAMGNQIYIEPMNYKGLQKRVKETQVDEKGRYKKKKRFGKSLANKAPAMFVTILKTKAEQHGGEVYEVDIMSYRASQCDHTTGEYTKHGLNDRWRILGNGDKVQRDLYSAFLIKNSNKTHDEIDLDKCSKTYDNFKKLHDKEIENIRNEVILRKRRNISSYGIA

SEQ ID NO: 1730 - protein, 512 aa, Unknown
  Description of Unknown: uncultivated organism sequence
  Category: MG81 effectors
  Description: MG81-8 effector
MPTKQKEDSNRCVLTLPLLTEPWQEHIIEKRFKIIEHLKNQLISIELRKLKKLQRTKAYKNLIKQIESVPKSERTALYKERNKMLKDAGFSQYTFMDDMAGKKSLMQKHFESHINVQIAHKAAIDVWSSFEKFLFGTGQMIHYQKRGTLSSVASKSPKTGMFYYSDENIFKWSGGGTKPKGGIILCLRVASVKTNYEKEMVANNEIKYYRVVRKWMKTKYKYYLQITFAGKPADKHREISTGRVGIDIGTQTIAIASDKSVKLLELADKINKNHIKKCELQRKLDRSRRYTNPDNFNPDGTVKRGTKGHKLKWNKSKHYIEIAGKIRELERKNADIRKYQHTCLANDILAMGNQIYIEPMNYKGLQKRAKETQVDEKGRYKKKKRFGKSLANKAPAMFVTILKTKAEQHGGEVYEVDIMSYRASQCDHTTGEYTKHGLNDRWRILGNGDKVQRDLYSAFLIKNSNKTHDEIDLDKCSKTYDSFKKLHDKEIENIRNEVKLRERKNISSYGIA

SEQ ID NO: 1731 - protein, 512 aa, Unknown
  Description of Unknown: uncultivated organism sequence
  Category: MG81 effectors
  Description: MG81-9 effector
MPTKQKEGGNRCVLTLPLLTEPWQEHIIEKRFKIIEHLKNQLISIELRKLKNLQRTKAYKNLIKQIESVPKSERTALYKERNKMLKDAGFSQYTFMDDMAGKKSLMQKHFESHINVQIAHKAAIDVWSSFEKFLFGSGQMIHYQKRGTLSSVASKSPKTGMFYYSDENIFKWSGGGTKPKGGIILCLRVASVKTNYEKEMVANNEIKYYRVVRKWMKTKYKYYLQITFAGKPADKHREISTGRVGIDIGTQTIAIASDKSVKLLELADKVNKNHIKKCELQRKLDRSRRYTNPDNFNPEGTVKRGTKGHKLKWNKSKHYIEIAGKIRELERKNADIRKYQHTCLANDILAMGNQIYIEPMNYKGLQKRAKETQVDEKGRYKKKKRFGKSLANKAPAMFVTILKTKVEQHGGEVYEVDIMSYRASQCDHTTGEYTKHGLNDRWRILGNGDKVQRDLYSAFLIKNSNKTHDEIDLDKCSKTYDNFKKLHDKEIENIRNEVKLRERKNISSYGIA

SEQ ID NO: 1732 - protein, 512 aa, Unknown
  Description of Unknown: uncultivated organism sequence
  Category: MG81 effectors
  Description: MG81-10 effector
MPTKQKEDSNRCVLTLPLLTEPWQEHIIEKRFKIIEHLKNQLISIELRKLKKLQRTKAYKNLIKQIESVPKSERTALYKERNKMLKDAGFSQYTFMDDMAGKKSLMQKHFESHINVQIAHKAAIDVWSSFEKFLFGTGQMIHYQKRGTLSSVASKSPKTGMFYYSDENIFKWSGGGTKPKGGIILCLRVASVKTNYEKEMVANNEIKYYRVVRKWMKTKYNYYLQITFAGKPADKHREISTGRVGIDIGTQTIAIASDKSVKLLELADKINKNHIKKCELQRKLDRSRRYTNPDNFNPDGTVKRGTKGHKLKWNKSKHYIEIAGKIRELERKNADIRKYQHTCLANDILAMGNQIYIEPMNYKGLQKRAKETQVDEKGRYKKKKRFGKSLANKAPAMFVTILKTKAEQHGGEVYEVDIMSYRASQCDHTTGEYTKHGLNDRWRILGNGDKVQRDLYSAFLIKNSNKTHDEIDLDKCSKTYDSFKKLHDKEIENIRNEVKLRERKNISSYGIA

SEQ ID NO: 1733 - protein, 512 aa, Unknown
  Description of Unknown: uncultivated organism sequence
  Category: MG81 effectors
  Description: MG81-11 effector
MPTKQKEDSNRCVLTLPLLTEPWQEHIIEKRFKIIEHLKNQLISIELRKLKNLPRTKAYKNLMKRIESVPKSERTALYKERNKMLKDAGFSQYTFMDDMAGKKSLMQKHFESHINVQIAHKAAIDVWSSFEKFLFGSGQMIHYQKRGTLSSVASKSPKTGMFYYPDENIFKWSGGGTKPKGGIILCLRVASVKTNYEKEMIANNEIKYYRVVRKWMKTKYKYYLQITFAGKPADKHREISTGRVGIDIGTQTIAIASDKSVKLLELADKVNKNHIKKCELQRKLDRSRRYTNPDNFNPDGTVKRGTKGHKLKWNKSKHYLEIAGKIRELERKNADIRKYQHTCLANDILAMGNQIYIEPMNYKGLQKRAKETQVDEKGRYKKKKRFGKSLANKAPAMFVTILKTKAEQHGGEVYEVDIMSYRASQCDHTTGEYTKHGLNDRWRILGNGDKVQRDLYSAFLIKNSNKTHDEIDLDKCSKTYDSFKKLHDKEIENIRNEVKLRERKNISSYGIA

SEQ ID NO: 1734 - protein, 512 aa, Unknown
  Description of Unknown: uncultivated organism sequence
  Category: MG81 effectors
  Description: MG81-12 effector
MPTKQKEDSNRCVLTLPLLTEPWQEHIIEKRFKIIEHLKNQLISIELRKLKNLQRTKAYKNLIKQIESVPKSERTVLYKERNKMLKDAGFSQYTFMDDMAGKKSLMQKHFESHINVQIAHKAAIDVWSSFEKFLFGTDQMIHYQKRGTLSSVASKSPKTGMFYYSDENIFKWSGGGTKPKGGIILCLRVASVKTNYEKEMVANNEIKYYRVVRKWMKTKYKYYLQITFAGKPADKHREISTGRVGIDIGTQTIAIASDKSVKLLELADKVNKNHIKKCELQRKLDRSRRYTNPDNFNPDGTVKRGTKGHKLKWNKSKHYLEIAGKIRELERKNADIRKYQHTCLANDILAMGNQIYIEPMNYKGLQKRAKETQVDEKGRYKKKKRFGKSLANKAPAMFVTILKTKVEQHGGEVYEVDIMSYRASQCDHTTGEYTKHGLNDRWRILGNGDKVQRDLYSAFLIKNSNKTHDEIDLDKCSKTYDSFKKLHDKEIENIRNEVKLRERRNISSYGIA

SEQ ID NO: 1735 - protein, 512 aa, Unknown
  Description of Unknown: uncultivated organism sequence
  Category: MG81 effectors
  Description: MG81-13 effector
MPTKQKEGGNRCVLTLPLLTEPWQEHIIEKRFKIIEHLKNQLISIELRKLKNLQRTKAYKNLIKQIESVPKSERTALYKERNKMLKDAGFSQYTFMDDMAGKKSLMQKHFESHINVQIAHKAAIDVWSSFEKFLFGSGQMIHYQKRGTLSSVASKSPKTGMFYYSDENIFKWSGGGTKPKGGIILCLRVASVKTNYEKEMVANNEIKYYRVVRKWMKTKYKYYLQITFAGKPADKHREISTGRVGIDIGTQTIAIASDKSVKLLELADKVNKNHIKKCELQRKLDRSRRYTNPDNFNPDGTVKRGTKGHKLKWNKSKHYLEVAGKIRELERKNADIRKYQHTCLANDILAMGNQIYIEPMNYKGLQKRAKETQVDEKGRYKKKKRFGRSLANKAPAMFVTILKTKAEQHGGEVYEVDIMSYRASQCDHTTGEYTKHGLNDRWRILGNGDKVQRDLYSAFLIKNSNKTHDEIDLDKCSKTYDSFKKLHDKEIENIRNEVKLRERKNISSYGIA

SEQ ID NO: 1736 - protein, 531 aa, Unknown
  Description of Unknown: uncultivated organism sequence
  Category: MG81 effectors
  Description: MG81-14 effector
MILLAKNNNNNNNTDTCVLTLPLRVEKWQEDCLLKRFEAARRIYNSLLNFELKKLRQLERTVEYRQIQSVISSAYRSNTKDSPECKDAFKRREKLISANGISEYGFKSDVKFFYKHFDGLIGSNVAVHCIAVQLWAAFDKYLRGSGKEIHFKRLGDISSLKGYSVKGKSGGCEIIFRGQYIEWTRKKKKLLLPLKIDPDNEYEREMLSRRVKYVRIIKKPGKNRLRWYAQLTLEGKPALKYSAETGKPIHSVGKGNVGIDIGPQTVAYASDKEVALLELADRVTNIEHQKKKLQRKLDRSRRATNPDNYKPDGTIKRGVKLTRNKSKRYLKLQSKLAYIQHRQAEIRKLQHTCLANHMLTLGDRFFVEKMNWPGLAHRAKETSISEKTGRYKRKKRFGKSLANKAPAMFISILKRKCETLGLPGVVEVDTYSLKASQYNHLSDTYEKKSLSERWNYMPISDGSDSSKTKRIQRDLYSAFLLQHTIPQPCSFDKKALRIDYPNFVTMHDAEIHRLESLPKTITSMGVRRSHS

SEQ ID NO: 1737 - protein, 512 aa, Unknown
  Description of Unknown: uncultivated organism sequence
  Category: MG81 effectors
  Description: MG81-15 effector
MPTKQKEDINRCVLTLPLLTEPWQEHIIEKRFKIIEHLKNQLISIELRKIKNLQRTKAYKNLIKQIESVPKSERTALYKERNKMLKDAGFSQYTFMDDMAGKKSLMQKHFESHINVQIAHKAAIDVWSSFEKFLFGTGQIVHYQKRGTLSSVASKSPKTGMFYYSDENIFKWSGGGTKPKGGIILCLRVASVKTNYEKEMVANNEIKYYRVVRKWMKTKYKYYLQITFAGKPADKHREISTGRVGIDIGTQTIAIASDKSVKLLELADKVNKNHIKKCELQRKLDRSRRYTNPDNFNPDGTVKRGTKGHKLKWNKSKHYIEIAGKIRELERKNADIRKYQHTCLANDILAMGNQIYIEPMNYKGLQKRVKETQVDEKGRYKKKKRFGKSLANKAPAMFVTILKTKAEQHGGEVYEVDIMSYRASQCDHTTGEYTKHGLNDRWRILGNGDKVQRDLYSAFLIKNSNKTHDEIDLDKCSKTYDSFKKLHDKEIENIRNEVKLRERRNISSYGIA

SEQ ID NO: 1738 - protein, 512 aa, Unknown
  Description of Unknown: uncultivated organism sequence
  Category: MG81 effectors
  Description: MG81-16 effector
MPTKQKEGGNRCVLTLPLLTEPWQEHIIEKRFKIIEHLKNQLISIELRKLKNLQRTKAYKNLMKRIESVPKSERTALYKERNKMLKDAGFSQYTFMDDMAGKKSLMQKHFESHINVQIAHKAAIDVWSSFEKFLFGSGQMIHYQKRGTLSSVASKSPKTGMFYYSDENIFKWSGGGTKPKGGIILCLRVASVKTNYEKEMVANNEIKYYRVVRKWMKTKYKYYLQITFAGKPADKHREISTGRVGIDIGTQTIAIASDKSVKLLELADKVNKNHIKKCELQRKLDRSRRYTNPDNFNPDGTVKRGTKGHKLKWNKSKHYIEIAGKIRELERKNADIRKYQHTCLANDILTMGNQIYIEPMNYKGLQKRAKETQVDEKGRYKKKKRFGKSLANKAPAMFVTILKTKAEQHGGEVYEVDIMSYRASQCDHTTGEYTKHGLNDRWRILGNGDKVQRDLYSAFLIKNSNKTHDEIDLDKCSKTYDSFKKLHDKEIENIRNEVILRERRNISSYGIA

SEQ ID NO: 1739 - protein, 512 aa, Unknown
  Description of Unknown: uncultivated organism sequence
  Category: MG81 effectors
  Description: MG81-17 effector
MPTKQKEGGNRCVLTLPLLTEPWQEHIIEKRFKIIEHLKNQLISIELRKLKKLQRTKAYKNLIKQIESVPKSERTVLYKERNKMLKDAGFSQYTFMDDMAGKKSLMQKHFESHINVQIAHKAAIDVWSSFEKFLFGTGQIVHYQKRGTLSSVASKSPKTGMFYYSDENIFKWSGGGTKPKGGIILCLRVASVKTNYEKEMVANNEIKYYRVVRKWMKTKYKYYLQITFAGKPADKHREISTGRVGIDIGTQTIAIASDKSVKLLELADKVNKNHIKKCELQRKLDRSRRYTNPDNFNPDGTVKRGTKGHKLKWNKSKHYLEVAGKIRELERKNADIRKYQHTCLANDILAMGNQIYIEPMNYKGLQKRAKETQVDEKGRYKKKKRFGKSLANKAPAMFVTILKTKAEQHGGEVYEVDIMSYRASQCDHTTGEYTKHGLNDRWRILGNGDKVQRDLYSAFLIKNSNKTHDEIDLDKCSKTYDSFKKLHDKEIENIRNEVILRKRRNISSYGIA

SEQ ID NO: 1740 - protein, 530 aa, Unknown
  Description of Unknown: uncultivated organism sequence
  Category: MG81 effectors
  Description: MG81-18 effector
MILLANNNNNNNTDTCVLTLPLRVEKWQEDCLLKRFEAARRIYNSLLNFELKKLRQLERTVEYRQIQSVISSAYRSNTKDSPECKDALKRREKLISANGLAEYGFKSDVKFFYKHFDGLIGSNVAVHCIAVQLWAAFNKYLSGSGKEIHFKRLGEISSLKGYSVKGKSGGREIIFRGQYIEWTRKKKKLLLPLKIDPDNEYEREMLSRRVKYVRIIKKPGKNRLRWYAQLTLEGKPALKYSAETGKPIHSVGKGNVGIDIGPQTIAYASDKEVALLELADRVTNIEHQKKKLQRKLDRSRRATNPDNYKPDGTIKRGVKLTRNKSKRYLKLQSKLAYIQHRQAEIRKLQHTCLANHMLTLGDRFFVEKMNWSGLAHRAKETSISEKTGRYKRKKRFGKSLANKAPAMFISILKRKCETLGLPGVVEVDTYSLKASQYNHLSDTCEKKSLSERWNYMPISDGSDSSKTKRIQRDLYSAFLLQHTIPQPCSFDKEALRIDYPKFVIMHDAEIHRLESLPKTVTSMGVRRSHS

SEQ ID NO: 1741 - protein, 512 aa, Unknown
  Description of Unknown: uncultivated organism sequence
  Category: MG81 effectors
  Description: MG81-19 effector
MPTKQKEGGNRCVLTLPLLTEPWQEHIIEKRFKIIEHLKNQLISIELRKLKKLQRTKAYKNLIKQIESVPKSERTVLYKERNKMLKDAGFSQYTFMDDMAGKKSLMQKHFESHINVQIAHKAAIDVWSSFEKFLFGTGQIVHYQKRGTLSSVASKSPKTGMFYYSDENIFKWSGGGTKPKGGIILCLRVASVKTNYEKEMVANNEIKYYRVVRKWMKTKYKYYLQITFAGKPADKHREISTGRVGIDIGTQTIAIASDKSVKLLELADKVNKNHIKKCELQRKLDRSRQYTNPDNFNPDGTVKRGTKGHKLKWNKSKHYLEVAGKIRELERKNADIRKYQHTCLANDILAMGNQIYIEPMNYKGLQKRAKETQVDEKGRYKKKKRFGKSLANKAPAMFVTILKTKAEQHGGEVYEVDIMSYRASQCDHTTGEYTKHGLNDRWRILGNGDKVQRDLYSAFLIKNSNKTHDEIDLDKCSKTYDSFKKLHDKEIENIRNEVILRKRRNISSYGIA

SEQ ID NO: 1742 - protein, 512 aa, Unknown
  Description of Unknown: uncultivated organism sequence
  Category: MG81 effectors
  Description: MG81-20 effector
MPTKQKEGGNRCVLTLPLLTEPWQEHIIEKRFKIIEHLKNQLISIELRKLKKLQRTKAYKNLIKQIESVPKSERTVLYKERNKMLKDAGFSQYTFMDDMAGKKSLMQKHFESHINVQIAHKAAIDVWSSFEKFLFGTGQIVHYQKRGTLSSVASKSPKTGMFYYSDENIFKWSCGGTKPKGGIILCLRVASVKTNYEKEMVANNEIKYYRVVRKWMKTKYKYYLQITFAGKPADKHREISTGRVGIDIGTQTIAIASDKSVKLLELADKVNKNHIKKCELQRKLDRSRRYTNPDNFNPDGTVKRGTKGHKLKWNKSKHYLEVAGKIRELERKNADIRKYQHTCLANDILAMGNQIYIEPMNYKGLQKRAKETQVDEKGRYKKKKRFGKSLANKAPAMFVTILKTKAEQHGGEVYEVDIMSYRASQCDHTTGEYTKHGLNDRWRILGNGDKVQRDLYSAFLIKNSNKTHDEIDLDKCSKTYDSFKKLHDKEIENIRNEVILRKRRNISSYGIA

SEQ ID NO: 1743 - protein, 512 aa, Unknown
  Description of Unknown: uncultivated organism sequence
  Category: MG81 effectors
  Description: MG81-21 effector
MPTKQKEDSNRCVLTLPLLTEPWQEHIIEKRFKIIEHLKNQLISIELRKLKKLQRTKAYKNLIKQIESVPKSERTALYKERNKMLKDAGFSQYTFMDDMAGKKSLMQKHFESHINVQIAHKAAIDVWSSFEKFLFGTGQIVHYQKRGTLSSVASKSPKTGMFYYSDENIFKWSGGGTKPKGGIILCLRGASVKTNYEKEMVANNEIKYYRVVRKWMKTKYKYYLQITFAGKPADKHREISTGRVGIDIGTQTIAIASDKSVKLLELADKVNKNHIKKCELQRKLDRSRRYTNPDNFNPDGTVKRGTKGHKLKWNKSKHYIEIAGKIRELERKNADIRKYQHTCLANDILAMGNQIYIEPMNYKGLQKRAKETQVDEKGRYKKKKRFGKSLANKAPAMFVTILKTKAEQHGGEVYEVDIMSYRASQCDHTTGEYTKHGLNDRWRILGNGDKVQRDLYSAFLIKNSNKTHDEIDLDKCSKTYDNFKKLHDTEIENIRNEVKLRERKNISSYGIA

SEQ ID NO: 1744 - protein, 512 aa, Unknown
  Description of Unknown: uncultivated organism sequence
  Category: MG81 effectors
  Description: MG81-22 effector
MPTKQKEDSNRCVLTLPLLTEPWQEHIIEKRFKIIEHLKNQLISIELRKLKKLQRTKAYKNLIKQIESVPKSERTVLYKKRNKMLKDAGFSQYTFMDDMAGKKSLMQKHFESHINVQIAHKAAIDVWSSFEKFLFGSGQMIHYQKRGTLSSVASKSPKTGMFYYSDENIFKWSGGGTKPKGGIILCLRVASVKTNYEKEMVANNEIKYYRVVRKWMKTKYKYYLQITFAGKPADKHHEVSTDRVGIDIGTQTIAIASDKSVKLLELADKVNKNHIKKCELQRKLDRSRRYTNPDNFNPDGTVKRGTKGHKLKWNKSKHYIEIAGKIRELERKNADIRKYQHTCLANDILAMGNQIYIEPMNYKGLQKRAKETQVDEKGRYKKKKRFGKSLANKAPAMFVTILKTKAEQHGGEVYEVDIMSYRASQCDHTTGEYTKHGLNDRWRILGNGDKVQRDLYSAFLIKNSNKTHDEIDLDKCSKTYDNFKKLHDKEIENIRNEVILRKRRNISSYGIA

SEQ ID NO: 1745 - protein, 528 aa, Unknown
  Description of Unknown: uncultivated organism sequence
  Category: MG81 effectors
  Description: MG81-23 effector
MILLTKNNNNTDTCVLTLPLRVEKWQEDCLLKRFEAARRIYNSLLNFELKKLRQLERTVEYRQIQSVISSAYRSNTKDSPECKDAFKRREKLISANGISEYGFKSDVKFFYKHFDGLIGSNVAVHCIAVQLWAAFDKYLRGSGKEIHFKRLGDISSLKGYSVKGKSGGCEIIFRGQYIEWTRKKKKLLLPLKIDPDNEYEREMLSRRVKYVRIIKKPGKNRLRWYAQLTLEGKPALKYSAETGKPIHSVGKGNVGIDIGPQTVAYASDKEVALLELADRVTNIEHQKKKLQRKLDRSRRATNPDNYKPDGTIKRGVKLTRNKSKRYLKLQSKLAYIQHRQAEIRKLQHTCLANHMLTLGDRFFVEKMNWPGLAHRAKETSISEKTGRYKRKKRFGKSLANKAPAMFISILKRKCETLGLPGVVEVDTYSLKASQYNHLSDTYEKKSLSERWNYMPISDGSDSSKTKRIQRDLYSAFLLQHTIPQPCSFDKKALRIDYPNFVTMHDAEIHRLESLPKTITSMGVRRSHS

SEQ ID NO: 1746 - protein, 512 aa, Unknown
  Description of Unknown: uncultivated organism sequence
  Category: MG81 effectors
  Description: MG81-24 effector
MPTKQKEDSNRCVLTLPLLTEPWQEHIIEKRFKIIEHLKNQLISIELRKLKNLQRTKAYKNLIKQIESVPKSERTVLYKERNKMLKDAGFSQYTFMDDMAGKKSLMQKHFESHINVQIAHKAAIDVWSSFEKFLFGTGQIVHYQKRGTLSSVASKSPKTGMFYYSDENIFKWSGGGTKPKGGIILCLRVASVKTNYEKEMVANNEIKYYRVVRKWMKTKYKYYLQITFAGKPADKHREISTGRIGIDIGTQTIAIASDKSVKLLELADKVNKNHIKKCELQRKLDRSRRYTNPDNFNPDGTVKRGTKGHKLKWNKSKHYIEIAGKIRELERKNADIRKYQHTCLANDILAMGNQIYIEPMNYKGLQKRVKETQVDEKGRYKKKKRFGKSLANKAPAMFVTILKTKAEQHGGEVYEVDIMSYRASQCDHTTGEYTKHGLNDRWRILGNGDKVQRDLYSAFLIKNSNKTHDEIDLDKCSKTYDSFKKLHDKEIENIRNEVKLRERKNISSYGIA

SEQ ID NO: 1747 - protein, 512 aa, Unknown
  Description of Unknown: uncultivated organism sequence
  Category: MG81 effectors
  Description: MG81-25 effector
MPTKQKEGGNRCVLTLPLLTEPWQEHIIEKRFKIIEHLKNQLISIELRKLKNLQRTKAYKNLIKQIESVPKSERTALYKERNKMLKDAGFSQYTFMDDMAGKKSLMQKHFESHINVQIAHKAAIDVWSSFEKFLFGTGQIVHYQKRGTLSSVASKSPKTGMFYYPDENIFKWSGGGTKPKGGIILCLRVASVKTNYEKEMVANNEIKYYRVVRKWMKTKYKYYLQITFAGKPADKHREISTGRVGIDIGTQTIAIASDKSVKLLELADKVNKNHIKKCELQRKLDRSRRYTNPDNFNPDGTVKRGTKGHKLKWNKSKHYIEIAGKIRELERKNADIRKYQHTCLANDILAMGNQIYIEPMNYKGLQKRAKETQVDEKGRYKKKKRFGKSLANKAPAMFVTILKTKAEQHGGEVYEVDIMSYRASQCDHTTGEYTKHGLNDRWRILGNGDKVQRDLYSAFLIKNSNKTHDAIDLDKCSKTYDSFKKLHDKEIENIRNEVKLRERKNISSYGIA

SEQ ID NO: 1748 - protein, 512 aa, Unknown
  Description of Unknown: uncultivated organism sequence
  Category: MG81 effectors
  Description: MG81-26 effector
MPTKQKEDSNRCVLTLPLLTEPWQEHIIEKRFKIIEHLKNQLISIELRKLKNLQRTKAYKNLMKRIESVPKSERTALYKERNKMLEGKGFSQYTFMDDMAGKKSLMQKHFESHINVQIAHKAAIDVWSSFEKFLFGSGQMIHYQKRGTLSSVASKSPKTGMFYYPDENIFKWSGGGTKPKGGIILCLRVASVKTNYEKEMVANNEIKYYRVVRKWMKTKYKYYLQITFAGKPADKHREISTGRVGIDIGTQTIAIASDKSVKLLELADKVNKNHIKKCELQRKLDRSRRYTNPDNFNPDGTVKRGTKGHKLKWNKSKHYLEIAGKIRELERKNADIRKYQHTCLANDILAMGNQIYIEPMNYKGLQKRAKETQVDEKGRYKKKKRFGKSLANKAPAMFVTILKTKAEQHGGEVYEVDIMSYRASQCDHTTGEYTKHGLNDRWRILGNGDKVQRDLYSAFLIKNSNKTHDEIDLDKCSKTYDSFKKLHDKEIENIRNEVKLRERKNISSYGIA

SEQ ID NO: 1749 - protein, 527 aa, Unknown
  Description of Unknown: uncultivated organism sequence
  Category: MG81 effectors
  Description: MG81-27 effector
MAKNNNNNNTDTCVLTLPLRVEKWQEDCLLKRFEAARRIYNSLLNFELKKLRQLERTVEYRQIQSVISSAYRSNTKDSPECKDAFKRREKLISANGISEYGFKSDVKFFYKHFDGLIGSSVAVHCIAVQLWAAFDKYLRGSGKEIHFKRLGEISSLKGYSVKGKSGGLEIIFRGQYIEWTRKKKKLLLPLKIDPDNEYEREMLSRRVKYVRIIKKPGKNRLRWYAQLTLEGKPALKYSAETGKPIHSVGKGNVGIDIGPQTVAYASDKEVALLELADRVTNIEHQKKKLQRKLDRSRRATNPDNYKPDGTIKRGVKLTRNKSKRYLKLQSKLAYIQHRQAEIRKLQHTCLANHMLTLGDRFFVEKMNWPGLAHRAKETSISEKTGRYKRKKRFGKSLANKAPAMFISILKRKCETLGLPGVVEVDTYNLKASQYNHLSDTYEKKSLSERWNYMPISDGSDSSKTKRIQRDLYSAFLLQHTIPQPCSFDKEALRIDYPNFVTMHDAEIHRLESLPKTVTSMGVRRSHS

SEQ ID NO: 1750 - protein, 512 aa, Unknown
  Description of Unknown: uncultivated organism sequence
  Category: MG81 effectors
  Description: MG81-28 effector
MPTKQKEDSNRCVLTLPLLTEPWQEHIIEKRFKIIEHLKNQLIFIELRKLKNLQRTKAYKNLIKQIESVPKSERTALYKERNKMLKDAGFSQYTFMDDMAGKKSLMQKHFESHINVQIAHKAAIDVWSSFEKFLFGTGQIVHYQKRGTLSSVASKSPKTGMFYYSDENIFKWSGGGTKPKGGIILCLRVASVKTNYEKEMVANNEIKYYRVVRKWMKTKYKYYLQITFAGKPADKHREISTGRVGIDIGTQTIAIASDKSVKLLELADKVNKNHIKKCELQRKLDRSRRYTNPDNFNPDGTVRRGTKGHKLKWNKSKHYIEIAGKIRELERKNADIRKYQHTCLANDILAMGNQIYIEPMNYKGLQKKAKETQVDEKGRYKKKKRFGKSLANKAPAMFVTILKTKAEQHGGEVYEVDIMSYRASQCDHTTGEYTKHGLNDRWRILGNGDKVQRDLYSAFLIKNSNKTHDEIDLDKCSKTYDNFKKLHDKEIENIRNEVKLRERKNISSYGIA

SEQ ID NO: 1751 - protein, 512 aa, Unknown
  Description of Unknown: uncultivated organism sequence
  Category: MG81 effectors
  Description: MG81-29 effector
MPTKQKEDSNRCVLTLPLLTEPWQEHIIEKRFKIIEHLKNQLISIELRKLKNLQRTKAYKNLIKQIESVPKSERTVLYKERNKMLKDAGFSQYTFMDDMAGKKSLMQKHFESHINVQIAHKAAIDVWSSFEKFLFGTDQMIHYQKRGTLSSVASKSPKTGMFYYSDENIFKWSGGGTKPKGGIILCLRVASVKTNYEKEMVANNEIKYYRVVRKWMKTKYKYYLQITFAGKPADKHREISTGRVGIDIGTQTIAIASDKSVKLLELADKVNKNHIKKCELQRKLDRSRRYTNPDNFNPDGTVKRGTKGHKLKWNKSKHYLEIAGKIRELERKNADIQKYQHTCLANDILAMGNQIYIEPMNYKGLQKRAKETQVDEKGRYKKKKRFGKSLANKAPAMFVTILKTKVEQHGGEVYEVDIMSYRASQCDHTTGEYTKHGLNDRWRILGNGDKVQRDLYSAFLIKNSNKTHDEIDLDKCSKTYDSFKKLHDKEIENIRNEVKLRERRNISSYGIA

SEQ ID NO: 1752 - protein, 512 aa, Unknown
  Description of Unknown: uncultivated organism sequence
  Category: MG81 effectors
  Description: MG81-30 effector
MPTKQKEDSNRCVLTLPLLTEPWQEHIIEKRFKIIEHLKNQLISIELRKLKNLQRTKAYKNLIKQIESVPKSERTALYKERNKMLKDAGFSQYTFMDDMAGKKSLMQKHFESHINVQIAHKAAIDVWSSFEKFLFGTGQIVHYQKRGTLSSVASKSPKTGMFYYSDENIFKWSGGGTKPKGGIILCLRVASVKTNYEKEMVANNEIKYYRVVRKWMKTKYKYYLQITFAGKPADKHREISTGRVGIDIGTQTIAIASDKSVKLLELADKVNKNHIKKCELQRKLDRSRRYTNPDNFNPDGTVKRGTKGHKLKWNKSKHYLEIAGKIRELERKNADIRKYQHTCLANDILAMGNQIYIEPMNYKGLQKRVKETQVDEKGRYKKKKRFGKSLANKAPSMFVTILKTKAEQHGGEVYEVDIMSYRASQCDHTTGEYTKHGLNDRWRILGNGDKVQRDLYSAFLIKNSNKTHDEIDLDKCSKTYDNFKKLHDKEIENIRNEVKLRERRNISSYGIA

SEQ ID NO: 1753 - protein, 531 aa, Unknown
  Description of Unknown: uncultivated organism sequence
  Category: MG81 effectors
  Description: MG81-31 effector
MILLANNNNNNNNTDTCVLTLPLRVEKWQEDCLLKRFEAARRIYNSLLNFELKKLRQLERTAEYRQIQSVISSAYRSNTKDSLECKDAFKRREKLISANGISENGFKSDVKFFYKHFDGLIGSSVAVHCIAVQLWAAFDKYLSGSGKEIHFKRLGDISSLKGYSVKGKSGGCEIIFRGQYVEWTRKKKKLLLPLKIDPDNEYEREMLSRRVKYVRIIKKPGKNRLRWYAQLTLEGKPALKYSAGTGKPIHSVGKGNVGIDIGPQTVAYASDKEVALLELADRVTNIEHQKKKLQRKLDRSRRATNPDNYKPDGTIKRGVKLTRNKSKRYLKLQSKLAYIQHRQAEIRKLQHTCLANHMLTLGDRFFVEKMNWPGLAHRAKETSISEKTGRYKRKKRFGKSLANKAPAMFISILKRKCETLGLPGVVEVDTYSLKASQYNHLSDTYEKKSLSERWNYMPISDGSDSSKTKRIQRDLYSAFLLQHTIPQPCSFDKEALRIDYPNFVTMHDAEIHRLESLPKTVTSMGVRRSHS

SEQ ID NO: 1754 - protein, 512 aa, Unknown
  Description of Unknown: uncultivated organism sequence
  Category: MG81 effectors
  Description: MG81-32 effector
MPTKQKEGGNRCVLTLPLLTEPWQEHIIEKRFKIIEHLKNQLISIELRKLKKLQRTKAYKNLIKQIESVPKSERTVLYKERNKMLKDAGFSQYTFMDDMAGKKSLMQKHFESHINVQIAHKAAIDVWSSFEKFLFGTGQIVHYQKRGTLSSVASKSPKTGMFYYSDENIFKWSGGGTKPKGGIILCLRVASVKTNYEKEMVANNEIKYYRVVRKWMKTKYKYYLQITFAGKPADKHREISTGRVGIDIGTQTIAIASDKSVKLLELADKVNKNHIKKCELQRKLDRSRRYTNPDNFNPDGTVKRGTKGHKLKWNKSKHYLEVAGKIRELERKNADIRKYQHTCLANDILAMGNQIYIEPMNYKDLQKRAKETQVDEKGRYKKKKRFGKSLANKAPAMFVTILKTKAEQHGGEVYEVDIMSYRASQCDHTTGEYTKHGLNDRWRILGNGDKVQRDLYSAFLIKNSNKTHDEIDLDKCSKTYDSFKKLHDKEIENIRNEVILRKRRNISSYGIA

SEQ ID NO: 1755 - protein, 534 aa, Unknown
  Description of Unknown: uncultivated organism sequence
  Category: MG81 effectors
  Description: MG81-33 effector
MILLANNNNNNNNNNNTDTCVLTLPLRVEKWQEDCLLKRFEAARRIYNSLLNFELKKLRQLERTVEYRQIQSVISSAYRSNTKDSLECKDAFKRREKLISANGISENGFKSDVKFFYKHFDGLIGSSVAVHCIAVQLWAAFDKYLSGSGKEIHFKRLGDISSLKGYSVKGKSGGLEIIFRGQYVEWTRKKKKLLLPLKIDPDNEYEREMLSRRVKYVRIIKKPGKNRLRWYAQLTLEGKPALKYSAGTGKPIHSVGKGNVGIDIGPQTVAYASDKEVALLELADRVTNIEHQKKKLQRKLDRSRRATNPDNYKPDGTIKCGVKLTRNKSKRYLKLQSKLAYIQHRQAEIRKLQHTCLANHMLTLGDRFFVEKMNWPGLAHRAKETSISEKTGRYKRKKRFGKSLANKAPAMFISILKRKCETLGLPGVVEVDTYSLKASQYNHLSDTYEKKSLSERWNYMPISDGSDSSKTKRIQRDLYSAFLLQHTIPHPCSFDKEALRIDYPNFVIMHDAEIHRLEFLPKTVTSMGVRRSHS

SEQ ID NO: 1756 - protein, 528 aa, Unknown
  Description of Unknown: uncultivated organism sequence
  Category: MG81 effectors
  Description: MG81-34 effector
MILLANNNNNTDTCVLTLPLRVEKWQEDCLLKRFEAARRIYNSLLNFELKKLRQLERTVEYRQIQSVISSAYRSNTKDSLECKDAFKRRKKLTDENGISEYGFKSDVKFFYKHFDGLIGSNVAVHCIAVQLWAAFDKYLSGSGKEIHFKRLGDISSLKGYSVKGKSGGCEIIFRGQYVEWTRKKKKLLLPLKIDPDNEYEREMLSRRVKYVRIIKKPGKNRLRWYAQLTLEGKPALKYSAETGKPIHSVGKGNVGIDIGPQTVAYASDKEVALLELADRVTNIEHQKKKLQRKLDRSRRATNPDNYKPDGTIKRGVKLTRNKSKRYLKLQSKLAYIQHRQAEIRKLQHTCLANHMLTLGDRFFVEKMNWPGLAHRAKETSISEKTGRYKRKKRFGKSLANKAPAMFISILKRKCETLGLPGVVEVDTYNLKASQYNHLSDTCEKKSLSERWNYMPISDGSDSSKTKRIQRDLYSAFLLQHTIPQPCSFDKEALRIDYPNFVIMHDAEIHRLESLPKTITSMGVRRSHS

SEQ ID NO: 1757 - protein, 536 aa, Unknown
  Description of Unknown: uncultivated organism sequence
  Category: MG81 effectors
  Description: MG81-35 effector
MANNNNNNNNNNNNNNNNTDTCVLTLPLRVEKWQEDCLLKRFEAARRIYNSLLNFELKKLRQLERTVEYRQIQSVISSAYRSNTKDSLECKDAFKRRKKLTDENGISEYGFKSDVKFFYKHFDGLIGSNVAVHCIAVQLWAAFDKYLRGSGKEIHFKRLGDISSLKGYSVKGKSGGREIIFRGQYVEWIRKKKKLLLPLKIDPDNEYEREMLSRRVKYVRIIKKPGKNRLRWYAQLTLEGKPALKYSAGTGKPIHSVGKGNVGIDIGPQTVAYASDKEVALLELADRVTNIEHQKKKLQRKLDRSRRATNPDNYKPDGTIKRGVKLTRNKSKRYLKLQSKLAYIQHRQAEIRKLQHTCLANHMLTLGDRFFVEKMNWPGLAHRAKETSFSEKTGRYKRKKRFGKSLANKAPAMFISILKRKCETLGLPGVVEVDTYNLKASQYNHLSDTYEKKSLSERWNYMPISDGSDSSKTKRIQRDLYSAFLLQHTIPQPCSFDKEALRIDYPNFVTMHDAEIHRLESLPKTVTSMGVRRSHS

SEQ ID NO: 1758 - protein, 512 aa, Unknown
  Description of Unknown: uncultivated organism sequence
  Category: MG81 effectors
  Description: MG81-36 effector
MPTKQKEGGNRCVLTLPLLTEPWQEHIIEKRFKIIEHLKNQLISIELRKLKNLQRTKAYKNLIKQIESVPKSERTALYKERNKMLKDAGFSQYTFMDDMAGKKSLMQKHFESHINVQIAHKAAIDVWSSFEKFLFGTGQIVHYQKRGTLSSVASKSPKTGMFYYSDENIFKWSGGGTKPKGGIILCLRVASVKTNYEKEMVANNEIKYYRVVRKWMKTKYKYYLQITFAGKPADKHREISTGRVGIDIGTQTIAIASDKSVKLLEFADKVNKNHIKKCELQRKLDRSRQYTNPDNFNPDGTVKRGTKGHKLKWNKSKHYLEVAGKIRELERKNADIRKYQHTCLANDILAMGNQIYIEPMNYKGLQKRVKETQVDEKGRYKKKKRFGKSLANKAPAMFVTILKTKAEQHGGEVYEVDIMSYRASQCDHTTGEYTKHGLNDRWRILGNGDKVQRDLYSAFLIKNSNKTHDEIDLDKCSKTYDNFKKLHDKEIENIRNEVILRERRNISSYGIA

SEQ ID NO: 1759 - protein, 528 aa, Unknown
  Description of Unknown: uncultivated organism sequence
  Category: MG81 effectors
  Description: MG81-37 effector
MILLTKNNNNTDTCVLTLPLRVEKWQEDCLLKRFEAARRIYNSLLNFELKKLRQLERTVEYRQIQSVISSAYRSNTKDSLECKDAFKHREKLISANGISKNGFKSDVKFFYKHFDGLIGSSVAVHCIAVQLWAAFDKYLSGSGKEIHFKRLGDISSLKGYSVKGKSGGCEIIFRGQYVEWTRKKKKLLLPLKIDPDNEYEREMLSRRVKYVRIIKKPGKNRLRWYAQLTLEGKPALKYSAETGKPIHSVGKGNVGIDIGPQTVAYASDKEVALLELADRVTNIEHQKKKLQRKLDRSRRATNPDNYKPDGTIKRGVKLTRNKSKRYLKLQSKLAYIQHRQAEIRKLQHTCLANHMLTLGDRFFVEKMNWPGLAHRAKETSISEKTGRYKRKKRFGKSLANKAPAMFISILKRKCETLGLPGVVEVDTYSLKASQYNHLSDTCEKKSLSERWNYMPISDGSDSSKTKRIQRDLYSAFLLQHTIPQPCSFDKEALRIDYPNFVIMHDAEIHRLESLPKTITSMGVRRSHS

SEQ ID NO: 1760 - protein, 526 aa, Unknown
  Description of Unknown: uncultivated organism sequence
  Category: MG81 effectors
  Description: MG81-38 effector
MAKKNSNDTDTCVLTLPLRVEKWQEDCLLKRFEAARRIYNSLLNFELKKLRQLERTVEYRQIQSVISSAYRSNTKDSPECKDAFKRREKLISANGISEYGFKSDVKFFYKHFDGLIGSSVAVHCIAVQLWAAFDKYLRGSGKEIHFKRLGEISSLKGYSVKGKSGGLEIIFRGQYIEWTRKKKKLLLPLKIDPDNEYEREMLSRRVKYVRIIKKPGKNRLRWYAQLTLEGKPALKYSAETGKPIHSVGKGNVGIDIGPQTVAYASDKEVALLELADRVTNIEHQKKKLQRKLDRSRRATNPDNYKPDGTIKRGVKLTRNKSKRYLKLQSKLAYIQHRQAEIRKLQHTCLANHMLTLGDRFFVEKMNWPGLAHRAKETSISEKTGRYKRKKRFGKSLANKAPAMFISILKRKCETLGLPGVVEVDTYSLKASQYNHLSDTYEKKSLSERWNYMPISDGSDSSKTKRIQRDLYSAFLLQHTIPQPCSFDKEALRIDYPNFVIMHDAEIHRLESLPKTITSMGVRRSHS

SEQ ID NO: 1761 - protein, 530 aa, Unknown
  Description of Unknown: uncultivated organism sequence
  Category: MG81 effectors
  Description: MG81-39 effector
MILLAKNNNNNNTDTCVLTLPLRVEKWQEDCLLKRFEAARRIYNSLLNFELKKLRQLERTVEYRQIQSVISSAYRSNTKDSPECKDAFKRREKLISANGISENGFKSDVKFFYKHFDGLIGSNVAVHCIAVQLWAAFDKYLSGSGKEIHFKRLGDISSLKGYSVKGKSGGCEIIFRGQYVEWTRKKKKLLLPLKIDPDNEYEREMLSRRVKYVRIIKKPGKNRLRWYAQLTLEGKPALKYSAETGKPIHSVGKGNVGIDIGPQTVAYASDKEVALLELADRVTNIEHQKKKLQRKLDRSRRATNPDNYKPDGTIKCGVKLTRNKSKRYLKLQSKLAYIQHRQAEIRKLQHTCLANHMLTLGDRFFVEKMNWPGLAHRAKETSISEKTGRYKRKKRFGKSLTNKAPAMFISILKRKCETLGLPGVVEVDTYSLKASQYNHLSDTYEKKSLSERWNYMPISDGSDSSKTKRIQRDLYSAFLLQHTIPHPCSFDKKALRIDYPNFVTMHDAEIHRLESLPKTITSMGVRRSHS

SEQ ID NO: 1762 - protein, 526 aa, Unknown
  Description of Unknown: uncultivated organism sequence
  Category: MG81 effectors
  Description: MG81-40 effector
MAKKNNNDTDTCVLTLPLRVEKWQEDCLLKRFEAARRIYNSLLNFELKKLRQLERTVEYRQIQSVISSAYRSNTKDSLECKDAFKRREKLISANGISENGFKSDVKFFYKHFDGLIGSSVAVHCIAVQLWAAFDKYLSGSGKEIHFKRLGDISSLKGYSVKGKSGGCEIIFRGQYVEWTRKKKKLLLPLKIDPDNEYEREMLSRRVKYVRIIKKPGKNRLRWYAQLTLEGKPALKYSAETGKPIHSVGKGNVGIDIGPQTVAYASDKEVALLELADRVTNIEHQKKKLQRKLDRSRRATNPDNYKPDGTIKRGVKLTRNKSKRYLKLQSKLAYIQHRQAEIRKLQHTCLANHMLTLGDRFFVEKMNWPGLAHRAKETSISEKTGRYKRKKRFGKSLANKAPAMFISILKRKCETLGLPGVVEVDTFRLRASQYNHLSDTYEKKSLSERWNYMPISDGSDSSKTKRIQRDLYSAFLLQHTIPQPCSFDKKALRIDYPNFVTMHDAEIHRLESLPKTITSMGVRRSHS

SEQ ID NO: 1763 - protein, 524 aa, Unknown
  Description of Unknown: uncultivated organism sequence
  Category: MG81 effectors
  Description: MG81-41 effector
MAKNNNTDTCVLTLPLRVEKWQEDCLLKRFEAARRIYNSLLNFELKKLRQLERTVEYRQIQSVISSAYRSNTKDSPECKDAFKRREKLISANGISEYGFKSDVKFFYKHFDGLIGSSVAVHCIAVQLWAAFDKYLRGSGKEIHFKRLGEISSLKGYSVKGKSGGLEIIFRGQYIEWTRKKKKLLLPLKIDPDNEYEREMLSRRVKYVRIIKKPGKNRLRWYAQLTLEGKPALKYSAETGKPIHSVGKGNVGIDIGPQTVAYASDKEVALLELADRVTNIEHQKKKLQRKLDRSRRATNPDNYKPDGTIKRGVKLTRNKSKRYLKLQSKLAYIQHRQAEIRKLQHTCLANHMLTLGDRFFVEKMNWPGLAHRAKETSISEKTGRYKRKKRFGKSLANKAPAMFISILKRKCETLGLPGVVEVDTYNLKASQYNHLSDTYEKKSLSERWNYMPISDGSDSSKTKRIQRDLYSAFLLQHTIPQPCSFDKEALRIDYPNFVTMHDAEIHRLESLPKTVTSMGVRRSHS

SEQ ID NO: 1764 - protein, 341 aa, Unknown
  Description of Unknown: uncultivated organism sequence
  Category: MG81 effectors
  Description: MG81-42 effector
MLPLKIDPDNEYEREMLSRRVKYVRIIKKPGKNRLRWYAQLTLEGKPALKYSAETGKPIHSVGKGNVGIDIGPQTVAYASDKEVALLELADRVTNIEHQKKKLQRKLDRSRRATNPDNYKPDGTIKRGVKLTRNKSKRYLKLQSKLAYIQHRQAEIRKLQHTCLANHMLTLGDRFFVEKMNWPGLAHRAKETSISEKTGRYKRKKRFGKSLANKAPAMFISILKRKCETLGLPGVVEVDTYNLKASQYNHLSDTYEKKSLSERWNYMPISDGSDSSKTKRIQRDLYSAFLLQHTIPQPCSFDKEALRIDYPNFVTMHDAEIHRLESLPKTVTSMGVRRSHS

SEQ ID NO: 1765 - protein, 534 aa, Unknown
  Description of Unknown: uncultivated organism sequence
  Category: MG81 effectors
  Description: MG81-43 effector
MILLANNNNNNNNNNNTDTCVLTLPLRVEKWQEDCLLKRFEAARRIYNSLLNFELKKLRQLERTVEYRQIQSVISSAYRSNTKDSPECKDAFKRREKLISANGISEYGFKSDVKFFYKHFDGLIGSNVAVHCIAVQLWAAFDKYLRGSGKEIHFKRLGDISSLKGYSVKGKSGGCEIIFRGQYIEWTRKKKKLLLPLKIDPDNEYEREMLSRRVKYVRIIKKPGKNRLRWYAQLTLEGKPALKYSAETGKPIHSVGKGNVGIDIGPQTVAYASDKEVALLELADRVTNIEHQKKKLQRKLDRSRRATNPDNYKPDGTIKRGVKLTRNKSKRYLKLQSKLAYIQHRQAEIRKLQHTCLANHMLTLGDRFFVEKMNWPGLAHRAKETSISEKTGRYKRKKRFGKSLANKAPAMFISILKRKCETLGLPGVVEVDTYSLKASQYNHLSDTYEKKSLSERWNYMPISDGSDSSKTKRIQRDLYSAFLLQHTIPQPCSFDKKALRIDYPNFVTMHDAEIHRLESLPKTITSMGVRRSHS

SEQ ID NO: 1766 - protein, 511 aa, Unknown
  Description of Unknown: uncultivated organism sequence
  Category: MG81 effectors
  Description: MG81-44 effector
MKKSNTDTCCLTLPLKLEKWQEDRLAKRFEIARQIYNTMVHAELKKLRNIENSQPYRQIQKQIEALNWKNQNDKARLKSLYNDRNKLLNTIGFSEYGFKADIKYYYKHFNDNIGSSVAVHGIAPQVWAAFEKMLFHKEGKKVHYKKKDDIHSLHGYSVTGKSGGVEIIFRKTYIEWKGLKLPLKRSPDNAYETEMLGRRVKYVRLLRKPGKRKDCWYAQLSLEGKPAIKRDPESGKRRHSIGRGAVGLDIGPQTLAYSACGAADLVELADQVQNIEQMKRRLQRKLDRSRRATNPDNYADNGTIRRGVKLTHNKSNRYRRTQRELRYLQHCQAEIRKRQHIELANHLLALGDCFYVEDMAWPSLTHRAKETAISEKTGRIKRKKRFGKSVANKAPATLIGILEQKCNSLGLPGVMKVPTSLRASQYNHQSGEYTSKPLSQRWNNMPDGERIQRDLYSAFLLQHYDPKAGNFDSALLQQDYPQFVQYHHRAIQRLSTVPKTLSSMGIQRSLR

SEQ ID NO: 1767 - protein, 512 aa, Unknown
  Description of Unknown: uncultivated organism sequence
  Category: MG81 effectors
  Description: MG81-45 effector
MPTKQKEDSNRCVLTLPLLTEPWQEHIIEKRFKIIEHLKNQLISIELRKFKNLQRTKAYKNLIKQIESVPKSERTVLYKERNKMLKDAGFSQYTFMDDMAGKKSLMQKHFESHINVQIAHKAAIDVWSSFEKFLFGSGQMIHYQKRGTLSSVASKSPKTGMFYYSDENIFKWSGGGTKPKGGIILCLRVASVKTNYEKEMVANNEIKYYRVVRKWMKTKYKYYLQITFAGKPADKHREISTGRVGIDIGTQTIAIASDKSVKLLELADKVNKNHIKKCELQRKLDRSRRYTNPDNFNPDGTVKRGTKGHKLKWNKSKHYLEIAGKIRELERKNADIRKYQHTCLANDILAMGNQIYIEPMNYKGLQKRAKETQVDEKGRYKKKKRFGKSLANKAPAMFVTILKTKVEQHGGEVYEVDIMLYRASQCDHTTGEYTKHGLNDRWRILGNGDKVQRDLYSAFLIKNSNKTHDEIDLDKCSKTYDNFKKLHDKEIENIRNEVKLRERKNISSYGIA

SEQ ID NO: 1768 - protein, 530 aa, Unknown
  Description of Unknown: uncultivated organism sequence
  Category: MG81 effectors
  Description: MG81-46 effector
MILLAKNNNNNNTDTCVLTLPLRVEKWQEDCLLKRFEAARRIYNSLLNFELKKLRQLERTVEYRQIQSVISSAYRSNTKDSPECKDAFKRREKLISANGISEYGFKSDVKFFYKHFDGLIGSSVAVHCIAVQLWAAFDKYLSGSGKEIHFKRLGDISSLKGYSVKGKSGGREIIFRGQYIEWTRKKKKLLLPLKIDPDNEYEREMLSRRVKYVRIIKKPGKNRLRWYAQLTLEGKPALKYSAGTGKPIHSVGKGNVGIDIGPQTVAYASDKEVALLELADRVTNIEHQKKKLQRKLDRSRRATNPDNYKPDGTIKRGVKLTRNKSKRYLKLQSKLAYIQHRQAEIRKLQHTCLANHMLTLGDRFFVEKMNWPGLAHRAKETSISEKTGRYKRKKRFGKSLANKAPAMFISILKRKCETLGLPGVVEVDTYSLKASQYNHLSDTYEKKSLSERWNYMPISDGSDSSKTKRIQRDLYSAFLLQHTIPQPCSFDKEALRIDYPNFVTMHDAEIHRLESLPKTVTSMGVRRSHS

SEQ ID NO: 1769 - protein, 1338 aa, Unknown
  Description of Unknown: uncultivated organism sequence
  Category: MG81 effectors
  Description: MG81-47 effector
MKFSKYEHKSAAVVLKNSAAEKRVSDNVEGILFPLQKETLDNYVEKRIDKVQEKYAVLVNAKISKKDKEEKTKEEAIKYFNEFMDYLFVKWHDREQGVSAKTAKNKEQLKKLVEKLVKFLRNKGRDNLYIGKRKTKIKDINLELSDESVHELVRTKIRGSLRKNFCYKVSGKTAVCYLPDVIGKLMKIVCVESDFVSGMRRIPKEELEKTFLIIATEYNKKIKEDNVVKSIQNQNVRVQVFYEEGEARLELANARHRKKKCIFDLQRRFALGDQNERKKILCELAKLIILFTAGTDVYHKIKNRDIPLWNFNFLDDVLTEETKIFHQECVDIINNRDQIQDKLKKQDEESIEKEKNIRKVNNFNKEIRKGIYQKIRSRYQEYKKLKGNELPDESEFWIEEIERDIEGMFLKDKKRWIRQEELDVKRMCGRLWEKRIEYLRSKYVDIGKGVYHFAMPDLHNLIEKKEIKIGEVQPEFQKGITSFDYERIKAEENLERSFIIYITFAVNNFARAVYPPTFYKKNGNEDILQIKDPETIRESRHGDAGRRIMQFFGGVSQWKEVLGISENIPSDYTEKLIVDIQKAMNQIRNVSFHYASSFPKRVYEEDSPLIKIFNKEREGLSKLYCEKIFSNNVPKFYKINDITKLMDHLYEDTKVDLEAQIPSFKKVLSPGKFIEQINDFVDKEAYENLNEKDIFHHALYYTLKQIYYNCFIKSENLKEKFIEALNEMKKNPQDDTEKWALNSLCKRIDEYEKNISFGNLCQRIMTDYALQNSEMKVQIDKDNSKTDKKYEHFIMLLYKGIRKIFISYYNGEWEGSGEKFDYDFLKKPEFNAEDKEISKEEFCAQWEKELYSDLASEKEGWIISWFIVAHFMTPTHVNHLRGEIKGYFGYVNGIENRRYNIMKKSRPIDEEIKKRYEKVLKVLNLASEYCGLVSAKWEDYYSDENDFAEDIRKYVQYENQEPDKSQQEQLKQFCSKTAADSPSGYINIYEAGGVPIVNRNIIHAKMYGTEKLLSKCFTDDRITEEEIRDFYKKRKELEELFRKGICKEKEEEESKRKYQQKKNRIELQDIQKYSDILNDLMSQLISWCYLRERDKMYFQLGLHYIRLYHDKEKKIVEESSKLRVLKRYDEDHAAEIQIISDGALLYQLAAIYTYELPIFEIQNRGMAKIVSSTQNGSMISASERVFRKKYLGENKSKNSLLEVGMELFENKKKEKFIREYRNYLDHFKYYARNDMSMMELYNKMFFLFFSNDIKLRKSVTVVFRNILARHFVLSKLVFCKESSIEGGKRFVLKDNLKSKTTTHKPEKNIEFEVDYYDEHFLKRLQKILEYKTKIMDEK

SEQ ID NO: 1770 - protein, 538 aa, Unknown
  Description of Unknown: uncultivated organism sequence
  Category: MG81 effectors
  Description: MG81-48 effector
MGLEFKKYDVVMVDFPERKCGSIQSGLRPAIIIQNDIGNQYSPTLLVIPLTTKIKSLNQPTHTLIKKAIGNGLDQDSMLLAEQTTAICKEHAKKIGEIRNETVKKQILTCFLNEANKLLKDAGISQFDFIKDISSLQKHFAPHIAQKVGAAAARSHVWSAFDKVVFGKGQRIHFHKKGDLKSITSGYFGISMTVKNGYFIWSGGTKDEKDRKVNPITISVKIKQPETYYEKEMLQKQIKYVTIVRKWIKNRYKYYLQFMLVGNPVVKPRVIANGKRVGIDIGPSSAAIVSEKEVKLVELADKVQKNHDKKTQLQRSMDRSRRAMNPQNFNKNGTIKRGIKLIWNESNHYKEMRGQVRELERKNADIRKYQHTCLANYVMSLGTEVYVEQMNFKGLQKRAKETKYDENGRPKRKKRFGKSIANRAPAMFITILNNKLFGIAGEELHKVNTFTFKASQYDHTNDTYKKKLLKDRWAELSNGDKIQRDLYSAFLIMNSDAEMQQADLRKCEETYKRFKEQHDGLIVKMKESNHIRLSSFGF

SEQ ID NO: 1771 - protein, 533 aa, Unknown
  Description of Unknown: uncultivated organism sequence
  Category: MG81 effectors
  Description: MG81-49 effector
MANNNNNNNNNNNNNTDTCVLTLPLRVEKWQEDCLLKRFEAARRIYNSLLNFELKKLRQLERTVEYRQIQSVISSAYRSNTKDSLECKDAFKRRKKLTDENGISEYGFKSDVKFFYKHFDGLIGSNVAVHCIAVQLWAAFDKYLRGSGKEIHFKRLGDISSLKGYSVKGKSGGCEIIFRGQYVEWTRKKKKLLLPLKIDPDNEYEREMLSRRVKYVRIIKKPGKNRLRWYAQLTLEGKPALKYSAGTGKPIHSVGKGNVGIDIGPQTVAYASDKEVALLELADRVTNIEHQKKKLQRKLDRSRRATNPDNYKPDGTIKRGVKLTRNKSKRYLKLQSKLAYIQHRQAEIRKLQHTCLANHMLTLGDRFFVEKMNWPGLAHRAKETSISEKTGRYKRKKRFGKSLANKAPAMFISILKRKCETLGLPGVVEVDTYNLKASQYNHLSDTYEKKSLSERWNYMPISDGSDSSKTKRIQRDLYSAFLLQHTIPQPCSFDKEALRIDYPNFVTMHDAEIHRLESLPKTVTSMGVRRSHS

SEQ ID NO: 1772 - protein, 561 aa, Unknown
  Description of Unknown: uncultivated organism sequence
  Category: MG81 effectors
  Description: MG81-50 effector
MNISRSHRIRLFPTKEQERFLQDCAFVARTAWNFGLSFLIESNRRVIADWNALSDAERLARDPALKPKKESKRKKKKTEVSDDKKKKQSKPKVEWASYTDDDRLKRAPTGWDSAPASAAWTQVKKTSASGQLRGAVIANAVPAMVGFNAFIDLNKAWNKYFKECGSKPCSRRKDDKNCWCKDFPAWMGCGHPRFKNRSSGKSFLLPGSDKSGCNAIFGVDGKHFVFTGNKYHQRITMAEELRFQGRVASARVFEDNRHWYASIQVMDITVPDPAAHAGPSVGVDLGVASTATLSTGEKIDNLHAARKNEPRIAKLNQAISLKSIWLPCPACAGEPDKKKECKRCSGAGQVQDRRAVTCEVCKGTGKDLEDESKRCRRCRGCGRQKSQRMIDLEAKITKLQQHAANQRNDHMHKATTRIVQTYSFIGLEDINFNEMKTQNAEKMTGEGKRKRGFQRSLTDACPGEFRRQLEYKAPAYGGRSVRIDKWSASSKICSACGERVDDLPMSVRTWTCPVCGVSHDRDINAAVNILRKALDEAKTTGEQSAVVKKPRCAKKELHDAR

SEQ ID NO: 1773 - protein, 512 aa, Unknown
  Description of Unknown: uncultivated organism sequence
  Category: MG81 effectors
  Description: MG81-51 effector
MPTKQKEDSNRCVLTLPLLTEPWQEHIIEKRFKIIEHLKNQLISIELRKLKNLQRTKAYKNLMKRIESVPKSERTALYKERNKMLKDAGFSQYTFMDDMAGKKSLMQKHFESHINVQIAHKAAIDVWSSFEKFLFGTGQIVHYQKRGTLSSVASKSPKTGMFYYPDENIFKWSGGGTKPKGGIILCLRVASVKTNYEKEMIANNEIKYYRVVRKWMKTKYKYYLQITFAGKPADKHREISTGRVGIDIGTQTIAIASDKSVKLLELADKVNKNHIKKCELQRKLDRSRRYTNPDNFNPDGTVKRGTKGHKLKWNKSKHYLEVAGKIRELERKNADIRKYQHTCLANDILAMGNQIYIEPMNYKGLQKRAKETQVDEKGRYKKKKRFGKSLANKAPAMFVTILKTKAEQHGGEVYEVDIMSYRASQCDHTTGEYTKHGLNDRWRILGNGDKVQRDLYSAFLIKNSNKTHDEIDLDKCSKTYDSFKKLHDKEIENIRNEVILRKRRNISSYGIA

SEQ ID NO: 1774 - protein, 512 aa, Unknown
  Description of Unknown: uncultivated organism sequence
  Category: MG81 effectors
  Description: MG81-52 effector
MPTKQKEGGNRCVLTLPLLTEPWQEHIIEKRFKIIEHLKNQLISIELRKLKNLQRTKAYKNLIKQIESVPKSERTVLYKKRNKMLKDAGFSQYTFMDDMAGKKSLMQKHFESHINVQIAHKAAIDVWSSFEKFLFGSGQMIHYQKRGTLSSVASKSPKTGMFYYSDENIFKWSGGGTKPKGGIILCLRVAPVKTNYEKEMVANNEIKYYRVVRKWMKTKYKYYLQITFAGKPADKHHEVSTDRVGIDIGTQTIAIASDKSVKLLELADKVNKNHIKKCELQRKLDRSRRYTNPDNFNPDGTVKRGTKGHKLKWNKSKHYIEIAGKIRELERKNADIRKYQHTCLANDILAMGNQIYIEPMNYKGLQKRVKETQVDEKGRYKKKKRFGKSLANKAPAMFVTILKTKAEQHGGEVYEVDIMSYRASQCDHTTGEYTKHGLNDRWRILGNGDKVQRDLYSAFLIKNSNKTHDEIDLDKCSKTYDNFKKLHDKEIENIRNEVILRERRNISSYGIA

SEQ ID NO: 1775 - protein, 512 aa, Unknown
  Description of Unknown: uncultivated organism sequence
  Category: MG81 effectors
  Description: MG81-53 effector
MPTKQKEDSNRCVLTLPLLTEPWQEHIIEKRFKIIEHLKNQLISIELRKLKNLQRTKAYKNLMKRIESVPKSERTALYKERNKMLEGKGFSQYTFMDDMAGKKSLMQKHFESHINVQIAHKAAIDVWSSFEKFLFGSGQMIHYQKRGTLSSVASKSPKTGMFYYPDENIFKWSGGGTKPKGGIILCLRVASVKTNYEKEMVANNEIKYYRVVRKWMKTKYKYYLQITFAGKPADKHREISTGRVGIDIGTQTIAIASDKSVKLLELADKVNKNYIKKCELQRKLDRSRRYTNPDNFNPDGTVKRGTKGHKLKWNKSKHYLEIAGKIRELERKNADIRKYQHTCLANDILAMGNQIYIEPMNYKGLQKRAKETQVDEKGRYKKKKRFGKSLANKAPAMFVTILKTKAEQHGGEVYEVDIMSYRASQCDHTTGEYTKHGLNDRWRILGNGDKVQRDLYSAFLIKNSNKTHDEIDLDKCSKTYDSFKKLHDKEIENIRNEVKLRERKNISSYGIA

SEQ ID NO: 1776 - protein, 512 aa, Unknown
  Description of Unknown: uncultivated organism sequence
  Category: MG81 effectors
  Description: MG81-54 effector
MPTKQKEGGNRCVLTLPLLTEPWQEHIIEKRFKIIEHLKNQLISIELRKLKNLQRTKAYKNLIKQIESVPKSERTALYKERNKMLKDAGFSQYTFMDDMAGKKSLMQKHFESHINVQIAHKAAIDVWSSFEKFLFGTGQIVHYQKRGTLSSVASKSPKTGMFYYSDENIFKWSGGGTKPKGGIILCLRVASVKTNYEKEMVANNEIKYYRVVRKWMKTKYKYYLQITFAGKPADKHREISTGRVGIDIGTQTIAIASDKTVKLLELADKVNKNHIKKCELQRKLDRSRRYTNPDNFNPDGTVKRGTKGHKLKWNKSKHYIEIAGKIRELERKNADIRKYQHTCLANDILAMGNQIYIEPMNYKGLQKRAKETQVDEKGRYKKKKRFGKSLANKAPAMFVTILKTKAEQHGGEVYEVDIMSYRASQCDHTTGEYTKHGLNDRWRILGNGDKVQRDLYSAFLIKNSNKTHDEIDLDKCSKTYDSFKKLHDKEIENIRNEVKLRERRNISSYGIA

SEQ ID NO: 1777 - protein, 512 aa, Unknown
  Description of Unknown: uncultivated organism sequence
  Category: MG81 effectors
  Description: MG81-55 effector
MPTKQKEGGNRCVLTLPLLTEPWQEHIIEKRFKIIEHLKNQLISIELRKLKKLQRTKAYKNLIKQIESVPKSERTALYKERNKMLKDAGFSQYTFMDDMAGKKSLMQKHFESHINVQIAHKAAIDVWSSFEKFLFGTGQIVHYQKRGTLSSVASKSPKTGMFYYSDENIFKWSGGGTKPKGGIILCLRVASVKTNYEKEMVANNEIKYYRVVRKWMKTKYKYYLQITFAGKPADKHREISTGRVGIDIGTQTIAIASDKSVKLLELADKVNKNHIKKCELQRKLDRSRRYTNPDNFNPDGTVKRGTKGHKLKWNKSKHYIEIAGKIRELERKNADIRKYQHTCLANDILAMGNQIYIEPMNYKGLQKRAKETQVDEKGRYKKKKRFGKSLANKAPAMFVTILKTKAEQHGGEVYEVDIMSYRASQCDHTTGEYTKHGLNDRWRILGNGDKVQRDLYSAFLIKNSNKTHDEIDLDKCSKTYDNFKKLHDKEIENIRNEVILRERKNISSYGIA

SEQ ID NO: 1778 - protein, 512 aa, Unknown
  Description of Unknown: uncultivated organism sequence
  Category: MG81 effectors
  Description: MG81-56 effector
MKKSSTDTCCLTLPLKLEKWQEDRLAKRFEIARQLYNTLVHAELKRLVQIKRTAEYLENEQKIRALDRNNPADRAKLQELYKEQRKSLKTAGFTDYSFTTDMGKYYKHFRDNIGSSVAVHGIAPQVWAAFDKVLFKKGGKKVHYKRPGEVNSVQGYSRTGKSGGTEIMFRGPYIEWKGLKLPLKLSPDNAYETDMLQRRVKLVRLVRRPGKRRDRWYAQLVLEAKPAIKADPVTGKAVHPIGSGPVGLDIGPQTLAYSAAGAAGLVELADRVQNIEQEKRRLQRKMDRSRRAANPDNYAEDGTIRRGVKLTHNKSKRYRRSQQELKYLQHRQAEIRKLQHIQLANHLLSLGDHFYVEKMEWSSLTHRAKETVISEKTGKPRSKRRFGKSIANKAPAMLIEILRQKCKSLGLSDVVEINPADIKASQYNHLTGKYVKKSLSRRWNDMQDGEHLQRDLYSAFLLQHYDSCSKTLDLDSLARDYPAFVQYHHREIERLHALPKTPSSMGIRRSIA

SEQ ID NO: 1779 - protein, 512 aa, Unknown
  Description of Unknown: uncultivated organism sequence
  Category: MG81 effectors
  Description: MG81-57 effector
MPAKQKEGSNRCVLTLPLLTEPWQEHIIEKRFKIIEHLKNQLISIELRKLKNLQRTKAYKNLMKRIESVPKSERTALYKERNKMLKDAGFSQYTFMDDMAGKKSLMQKHFESHINVQIAHKAAIDVWSSFEKFLFGTGQIVHYQKRGTLSSVASKSPKTGMFYYSDENIFKWSGGGTKPKGGIILCLRVAPVKTNYEKEMVANNEIKYYRVVRKWMKTKYKYYLQITFAGKPADKHHEVSTGRVGIDIGTQTIAIASDKSVKLLELADKVNKNHIKKCELQRKLDRSRRYTNPDNFNPDGTVKRGTKGHKLKWNKSKHYIEIAGKIRELERKNADIRKYQHTCLANDILAMGNQIYIEPMNYKGLQKRAKETQVDEKGRYKKKKRFGKSLANKAPAMFVTILKTKAEQHGGEVYEVDIMSYRASQCDHTTGEYTKHGLNDRWRILGNGDKVQRDLYSAFLIKNSNKTHDEIDLDKCSKTYDNFKKLHDKEIENIRNEVKLRERRNISSYGIA

SEQ ID NO: 1780 - protein, 512 aa, Unknown
  Description of Unknown: uncultivated organism sequence
  Category: MG81 effectors
  Description: MG81-58 effector
MPTKQKEDSNRCVLTLPLLTEPWQEHIIEKRFKIIEHLKNQLISIELRKLKKLQRTKAYKNLIKQIESVPKSERTALYKERNKMLKDAGFSQYTFMDDMAGKKSLMQKHFESHINVQIAHKAAIDVWSSFEKFLFGTGQIVHYQKRGTLSSVASKSPKTGMFYYPDENIFKWSGGGTKPKGGIILCLRVASVKTNYEKEMVANNEIKYYRVVRKWMKTKYKYYLQITFAGKPADKHREISTGRVGIDIGTQTIAIASDKSVKLLELADKVNKNHIKKCELQRKLDRSRRYTNPDNFNPDGTVKRGTKGHKLKWNKSKHYLEIAGKIRELERKNADIRKYQHTCLANDILAMGNQIYIEPMNYKGLQKRAKETQVDEKGRYKKKKRFGKSLANKAPAMFVTILKTKAEQHGGEVYEVDIMSYRASQCDHTTGEYTKHGLNDRWRILGNGDKVQRDLYSAFLIKNSNKTHDEIDLDKCSKTYDSFKKLHDKEIENIRNEVILRKRRNISSYGIA

SEQ ID NO: 1781 - protein, 512 aa, Unknown
  Description of Unknown: uncultivated organism sequence
  Category: MG81 effectors
  Description: MG81-59 effector
MPTKQKEDSNRCVLTLPLLTEPWQEHIIEKRFKIIEHLKNQLISIELKKLKNLQRTKAYKNLIKQIESVPKSERTALYKERNKMLKDAGFSQYTFMDDMAGKKSLMQKHFESHINVQIAHKAAIDVWSSFEKFLFGTGQMIHYQKRGTLSSVASKSPKTGMFYYSDENIFKWSGGGTKPKGGIILCLRVASVKTNYEKEMVANNEIKYYRVVRKWMKTKYKYYLQITFAGKPADKHREISTGRVGIDIGTQTIAIASDKSVKLLELADEVNKNHIKKCELQRKLDRSRRYTNPDNFNPDGTVKRGTKGYKLKWNKSKHYIEIAGKIRELERKNADIRKYQHTCLANDILAMGNQIYIEPMNYKGLQKRAKETQVDEKGRYKKKKRFGKSLANKAPAMFVTILKTKAEQHGGEVYEVDIMSYRASQCDHTTGEYTKHGLNDRWRILGNGDKVQRDLYSAFLIKNSNKTHDEIDLDKCSKTYDNFKKLHDKEIENIRNEVILRKRRNISSYGIA

SEQ ID NO: 1782 - protein, 185 aa, Unknown
  Description of Unknown: uncultivated organism sequence
  Category: MG81 effectors
  Description: MG81-60 effector
MKNKYKRTGTTVSIQQHNELANRLLSFGSEHYIEEMRFRALAKQAKETKFNSKGRPVRKKRFGKSIFNKAPALFAKTIKRKVLNAGGSFQRVDTFSVKASQFNHLTETYTKKSLGKRWNTMPDGTKVQRDLYSAFLIQNVDDSLKQVDVERCNQSYDSFLALHDREIRRLSYLLTPNSMGAQHSA

SEQ ID NO: 1783 - protein, 512 aa, Unknown
  Description of Unknown: uncultivated organism sequence
  Category: MG81 effectors
  Description: MG81-61 effector
MPTKQKEDSNRCVLTLPLLTEPWQEHIIEKRFKIIEHLKNQLISIELRKLKNLQRTKAYKNLIKQIESVPKSERTVLYKERNKMLKDAGFSQYTFMDDMAGKKSLMQKHFESHINVQIAHKAAIDVWSSFEKFLFGTGQMIHYQKRGTLSSVASKSPKTGMFYYSDENIFKWSGGGTKPKGGIILCLRVASVKTNYEKEMVANNEIKYYRVVRKWMKTKYKYYLQITFAGKPADKHREISTGRVGIDIGTQTIAIASDKSVKLLELADKVNKNHIKKCELQRKLDRSRRYTNPDNFNPDGTVKRGTKGHKLKWNKSKHYLEIAGKIRELERKNADIRKYQHTCLANDILAMGNQIYIEPMNYKGLQKRAKETQVDEKGRYKKKKRFGKSLANKAPAMFVTILKTKVEQHGGEVYEVDIMSYRASQCDHTTGEYTKHGLNDRWRILGNGDKVQRDLYSAFLIKNSNKTHDEIDLDKCSKTYDSFKKLHDKEIENIRNEVKLRERRNISSYGIA

SEQ ID NO: 1784 - protein, 511 aa, Unknown
  Description of Unknown: uncultivated organism sequence
  Category: MG81 effectors
  Description: MG81-62 effector
MAKCSTDTCCLTLPLRLEKWQEDRLAKRFEIARRIYNTMVRAELKKLRAIEQSEPYKANQEKIQALDWKTQADKQALKALYKERDKLLRDGGFSERGFKSDIKNYYKHFNNNIGSNVAAHGIAPQVWAAFEKMLFKKEGKKVHFKKKGDIRSLRGYSVTGKSGGVEIIFRETYIEWKGLKLPLKLSPDNIYETQMLSYRVKYVRLLRKPGKRKDRWYAQLSLEGKPVIKYNPKTGEVRHPIGKGAVGLDIGPQTLAYSAATGADLVELANQVQNVEQEKRRLQRKLDRSRRATNPGNYADDGTIRRGIALTHNKSKRYLRTQQELKYLQHQQAEIRKRQHTELANHLLSLGDCFYVEKMVWTSLTHRAKETEISEKTGKIKRKKRFGKSVANKAPATLIGILQLKSAALGIPGVIEVPTSVKASQYNHQSGTYTPKPLSQRWNNMPDGERIQRDLYSAFLLQHYDPQTNTFDANSLHQDYPQFVQYHHDAVLRLYAMPKTPSSMGIKRSLR

SEQ ID NO: 1785 - protein, 511 aa, Unknown
  Description of Unknown: uncultivated organism sequence
  Category: MG81 effectors
  Description: MG81-63 effector
MGKSSTDTCCLTLPLKLEKWQEDRLAKRFEIARQIYNTMVRAELKRLRQVEQSPQYRSNKKAIQALDWKNTADKPKLKTLYRERDKLLKGGGFTEYGFKSDIKNFYKHFAENIGSSVAVHGIAPQVWAAFERVLFKKEGKKVHFKKTGDIRSLRGYSVTGKSGGVEIIFRGSYIEWKGLDLPLKLSPDNAYETEMLSYRVKYVRILRKPGKTRDRWYAQLSLEGKPAIKRNPASGNPVHPVGQGAVGLDIGPQTLAYAAEKEANLVELADRVQNIEREKHLLQRKMDRSRRAANPDNYAENGTIRRGVKLTHNKSKRYLRLQRELCYLQHCQAETRKRQHTELANHLLSLGSCFYVEDMAWPSLTHRAKKTEISDKTGRIKRKKRFGKSIANKAPAALINILRTKCVSLGIPGVVEVPTSLKASQYNHQSKEYTPKPLSQRWNDMPDGSRIQRDLYSAFLLQHYDPQSGNFDQASLEADYPQFVQLHNQSIQRLLTVPKTPSSMGIRRSVS

SEQ ID NO: 1786 - protein, 525 aa, Unknown
  Description of Unknown: uncultivated organism sequence
  Category: MG81 effectors
  Description: MG81-64 effector
MAKNNNDTDTCVLTLPLRVEKWQEDCLLKRFEAARRIYNSLLNFELKKLRQLERTVEYRQIQSVISSAYRSNTKDSPECKDAFKRREKLISANGISENGFKSDVKFFYKHFDGLIGSSVAVHCIAVQLWAAFDKYLSGSGKEIHFKRLGDISSLKGYSVKGKSGGREIIFRGQYIEWTRKKKKLLLPLKIDPDNEYEREMLSRRVKYVRIIKKPGKNRLRWYAQLTLEGKPALKYSAETGKPIHSVGKGNVGIDIGPQTVAYASDKEVALLELADRVTNIEHQKKKLQRKLDRSRRATNPDNYKPDGTIKRGVKLTRNKSKRYLKLQSKLAYIQHRQAEIRKLQHTCLANHMLTLGDRFFVEKMNWPGLAHRAKETSISEKTGRYKRKKRFGKSLANKAPAMFISILKRKCETLGLPGVVEVDTFRLRASQYNHLSDTYEKKSLSERWNYMPISDGSDSSKTKRIQRDLYSAFLLQHTIPQPCSFDKEALRIDYPNFVTMHDAEIHRLESLPKTVTSMDVRRSHS

SEQ ID NO: 1787 - protein, 512 aa, Unknown
  Description of Unknown: uncultivated organism sequence
  Category: MG81 effectors
  Description: MG81-65 effector
MPTKQKEGGNRCVLTLPLLTEPWQEHIIEKRFKIIEHLKNQLISIELRKLKNLQRTKAYKNLIKQIESVPKSERTALYKERNKMLKDAGFSQYTFMDDMAGKKSLMQKHFEGHINVQIAHKAAIDVWSSFEKFLFGTGQIVHYQKRGTLSSVASKSPKTGMFYYSDENIFKWSGGGTKPKGGIILCLRVASVKTNYEKEMVANNEIKYYRVVRKWMKTKYKYYLQITFAGKPADKHREISTGRVGIDIGTQTIAIASDKSVKLLELADKVNKNHIKKCELQRKLDRSRRYTNPDNFNPDGTVKRGTKGHKLKWNKSKHYIEIAGKIRELERKNADIRKYQHTCLANDILAMGNQIYIEPMNYKGLQKRAKETQVDEKGRYKKKKRFGKSLANKAPAMFVTILKTKAEQHGGEVYEVDIMSYRASQCDHTTGEYTKHGLNDRWRILGNGDKVQRDLYSAFLIKNSNKTHDEIDLDKCSKTYDNFKKLHDKEIENIRNEVKLRERKNISSYGIA

SEQ ID NO: 1788 - protein, 523 aa, Unknown
  Description of Unknown: uncultivated organism sequence
  Category: MG81 effectors
  Description: MG81-66 effector
MPTKQKEGGNRCVLTLPLLTEPWQEHIIEKRFKIIEHLKNQLISIELRKLKNLQRTKAYKNLIKQIESVPKSERTVLYKERNKMLKDAGFSQYTFMDDMAGKKSLMQKHFESHINVQIAHKAAIDVWSSFEKFLFGSGQMIHYQKRGTLKSIASKSPKNGMHYFPESNTFKWSGGKQKKIGQKGEQKKVSIKPISLCLRVSPLKTDYEKEMVANNEIKYYRVVRKWMKTKYKYYLQITFAGKPADKHREISTGRVGIDIGTQTIAIASDKSVKLLELADKVNKNHIKKCELQRKLDRSRRYTNPDNFNPDGTVRRGTKGHKLKWNKSKHYLEIAGKIRELERKNSDIRKYQHTCLANDILAMGNQIYIEPMNYKGLQKRAKETQVDEKGRYKKKKRFGKSLANKAPSMFVTILKTKAEQHGGEVYEVDIMSYRASQCDHTTGEYTKHGLNDRWRILGNGDKVQRDLYSAFLIKNSNKTHDEIDLDKCSKTYDNFKKLHDTEIENIRNEVKLRERKNISSYGIA

SEQ ID NO: 1789 - protein, 511 aa, Unknown
  Description of Unknown: uncultivated organism sequence
  Category: MG81 effectors
  Description: MG81-67 effector
MREDSQNTCCLTLPLKIEKWQADRLIKRFEIARQIYNTLVHAELKKLQKMEASAEYRQIQDRIRELNPSDVRAKKEWKILKDKQEKLWKAWKITEYGFKSDIKAYYKYFNENIGSAVATHDIAPRVWAAFEKKLNDRTGKVKIQYKKAGDIRSLKGFSVSGKSGGTEIIFHKTYIAWKGLTLPLKLSPDNAYEKEMLMRRIKYVRILRKPGKHKDRWYAQLSLEGNPVVKLDPVSGLPRHPIGKGAVGIDIGPQTLAYSAEGGADLVELADQVQCIEQEKSRLQRKMDRSRRASNPDNYAQDGTIKRGVKLTHNKSRRYCKLQKELAYMLYRQAETRKRQHRELINRLLTMGDCFYIEDMHWNSLAHRAKKTEISEKTGRYKRKKRFGKSIANKAPAMLVDMLEQKCKSLELDVVMVNTSLKASQYNHQTGKYEKKTLSQRWNYMPDGEQIQRDLYSAFLLQHVVPEKNAFDNEALCRDYPKFVQYHHEVIERLRSLPKTISSMGIRQSVS

SEQ ID NO: 1790 - protein, 511 aa, Unknown
  Description of Unknown: uncultivated organism sequence
  Category: MG81 effectors
  Description: MG81-68 effector
MAKCSTDTCCLTLPLRLEKWQEDRLAKRFEIARQIYNTMVRAELKKLRAMEQSEPYKANQEKIQALDWKTQTDKQALKALYKERDKLLRDGGFSEYGFKSDIKNYYKHFNNNIGSNVAFHGIAPQVWAAFEKMLFKKEGKKVHFKKKGDIHSLRGYSAAGKSGGVEIIFRETYIEWKGLKLPLKLSPDNIYETQMLSYRVKYVRLLRKPGKRKDRWYAQLSLEGKPVIKYNPKTGEVRHPIGKGAVGLDIGPQTLAYSAATGADLVELANQVQNVEQEKRRLQRKLDRSRRATNPGNYADDGTIRRGIALTHNKSKRYLRTQQELKYLQHQQAEIRKRQHTELANHLLSLGDCFYVEKMVWTSLTHRAKETEISEKTGKIKRKKRFGKSVANKAPATLIGILQRKSAALGIPGVIEVPTSVKASQYNHQSGTYTPKPLSQRWNNMPDGERIQRDLYSAFLLQHYDPQTNTFDANSLHQDYPQFVQYHHDAVLRLYAMPKTPSSMGIKRSLR

SEQ ID NO: 1791 - protein, 523 aa, Unknown
  Description of Unknown: uncultivated organism sequence
  Category: MG81 effectors
  Description: MG81-69 effector
MPTKQKEGGNRCVLTLPLLTEPWQEHIIEKRFKIIEHLKNQLISIELRKLKNLQRTKAYKNLIKQIESVPKSERTALYKERNKMLKDAGFSQYTFMDDMAGKKSLMQKHFESHINVQIAHKAAIDVWSSFEKFLFGSGQMIHYQKRGTLKSIASKSPKNGMHYFPESNTFKWSGGKQKKIGQKGEQKKVSIKPISLCLRVSPLKTDYEKEMVANNEIKYYRVVRKWMKTKYKYYLQITFAGKPADKHREISTGRVGIDIGTQTIAIASDKSVKLLELADKVNKNHIKKCELQRKLDRSRRYTNPDNFNPDGTVRRGTKGHKLKWNKSKHYLEIAGKIRELERKNSDIRKYQHTCLANDILAMGNQIYIEPMNYKGLQKRAKETQVDEKGRYKKKKRFGKSLANKAPSMFVTILKTKAEQHGGEVYEVDIMSYRASQCDHTTGEYTKHGLNDRWRILGNGDKVQRDLYSAFLIKNSNKTHDEIDLDKCSKTYDNFKKLHDKEIENIRNEVKLRERRNISSYGIA

SEQ ID NO: 1792 - protein, 529 aa, Unknown
  Description of Unknown: uncultivated organism sequence
  Category: MG81 effectors
  Description: MG81-70 effector
MILLAKKNNNDTDTCVLTLPLRVEKWQEDCLLKRFEAARRIYNSLLNFELKKLRQLERTVEYRQIQSVISSAYRSNTKDSPECKDAFKRREKLISANGISEYGFKSDVKFFYKHFDGLIGSSVAVHCIAVQLWAAFDKYLSGSGKEIHFKRLGDISSLKGYSVKGKSGGREIIFRGQYIEWTRKKKKLLLPLKIDPDNEYEREMLSRRVKYVRIIKKPGKNRLRWYAQLTLEGKPALKYSAGTGKPIHSVGKGDVGIDIGPQTVAYASDKEVALLELADRVTNIEHQKKKLQRKLDRSRRATNPDNYKPDGTIKRGVKLTHNKSKRYLKLQSKLAYIQHRQAEIRKLQHTCLANHMLTLGDRFFVEKMNWPGLAHRAKETSISEKTGRYKRKKRFGKSLANKAPAMFISILKRKCETLGLPGVVEVDTYSLKASQYNHLSDTYEKKSLSERWNYMPISDGSDSSKTKRIQRDLYSAFLLQHTIPQPCSFDKEALRIDYPNFVTMHDAEIHRLGSLPKTITSMGVRRSHS

SEQ ID NO: 1793 - protein, 512 aa, Unknown
  Description of Unknown: uncultivated organism sequence
  Category: MG81 effectors
  Description: MG81-71 effector
MKKSSTDTCCLTLPLKLEKWQEDRLAKRFEIARQLYNTLVHAELKRLAQVKQTAEYRENERKIRTLDWNDPGDQAKLKGLYKERRKSLKTAGFTDYSFTTDMGKYYKHFRDNIGSSVAVHGIAPQVWAAFDKLLFKKGGKKVHYKKPGEVNSVQGYSRTGKSGGTEIMFRGPYIEWKGLKLPLKLSPDNAYETDMLQRRVKLVRLVRRPGKRRDRWYAQLVLEGKPAIKADPVTGKAVHPIGSGPVGLDIGPQTLAYSAAGAAGLVELADRVQNIEQEKRCLQRKMGRSRRATNPDNYAEDGTIRRGVKLTHNKSKRYRRSQQELKYLQRRQAEIRKLQHIQLANHLLSLGDHFYVEKMEWSSLTHRAKKTVISEKTGKPRSKKRFGKSIANKAPAMLIEILRQKCKSLGLPNVVEINPADIKASQYNHLTGEYVKKSLSRRWNEMQDGEHLQRDLYSAFLLQHYDSMSKALDLDSLARDYPAFVQYHHREIERLHALPKTPASMGIRRSIA

SEQ ID NO: 1794 - protein, 1362 aa, Unknown
  Description of Unknown: uncultivated organism sequence
  Category: MG81 effectors
  Description: MG81-72 effector
MKISKIKNSRPGISVTENKNEEQLSRQSLLYYAPVKDGKIRLESKDLEQHVTECNEKAQKLYNVITPEINFYRDENRQKMVENLARNFNAVINNALRSIRNPKEKKERRVEKEVAFILNLSKKSIKLKENVFVKSTDLIVKFPENNKYNKKNSKGTGSKEAYIQKMISDLVLRKLKNTLRKEVKLENGCRMQMTEITISLMSAICLYGNAESFDPAILKAFFEKVDSDYTKYKYVEQIVKSIESQSAKLKVVEKDGRHLLISANADHRKKKYVFEFMRMYAAADEKEKRELTEHIQDLIGLYLCGKAGYENAENRFSDMIESHNCICGKIEEILNELEEPENLSQQKKEKLKNTTVKVMALKYRAAVNYLADEVGKTVLGEIREKKVRSCADLYWIEYIDSTVEKLLLKSRNKDGYRYEIGFLSKHIWKEWTQYISGKYIEMGKGVYHFAIPDLSGALEGESVSICEVKPEYRNGVSGFDYERIRAEESLEREMEKYVLFAVNNFARAVTPEEEREKSGHEDVLLMKTLSEIEESQTKEERQKKHDNNVKNAITLYADADRRILQFFGGQSRFREKEDSLINLYSGEDLYKEIRKELYAIRNITFHYTTKAEKDQTQKHDLAEYLFEEEFSDITELFREKYYANNVWKYYDAEVINTIMENIYCGRKYRAAQVPAFKNIISRPELPQVMNGFVKGNSLRRLMNCPDRDVINKYWSALFFVLKELYYYDFLQEQKRPEDNVKERFFRAIKKLSGQEKGDKEQKAWESFENRIDQIGRDRSFGAICQGLMIEYMLQNSDISMVQTETDNGKANNKKQIYKHYRTLLYNCISEAFIEYLREKWKELRTPVLTAKEWSKEEFCRADGLKHLSLFDHLKETFNDAESGSSWYMAAHFINQKYLNHLLGSIRNYLQFTEDIEDRAISLGDCVDNKREEKNLRYRNTLEILEFVAQFCERTTNVMEDYFESNQEYAEYLSGFVDYNTTKKETDIEKALYSFCKQKFKVDGKEYMAGIYYDGENLIPNRNIIRANMYGTTSCLKPCMDRITLKEIRTMYADQNKLDLVLKEGVCHTEEEQKAYREYQNEKNRIELFDVCTYTQILNDMQARLIGWSYMRERDLMYYQLGYYYTKLFWTDSISEEDARRRLVGNLVNVEDGAILYQILAFNSYNLPIIANKNNTVTLLKDEGSIGGKAITAFFKNYENAEMIYEEALDLFENMDEHAAIINTRNYIEHFKYFIKSDRSMMDLYSEIYDRFFRHDHNRKKNVPDSLKNVLADNFMIVDIDMELGSKKVGEKKKGFREHKAARIEFTDSGIRSTDMTYTIKPDIKDNKKDNKKDKKVLVPARSEVFLKQFRKILEYRIQDKTQ

SEQ ID NO: 1795 - protein, 512 aa, Unknown
  Description of Unknown: uncultivated organism sequence
  Category: MG81 effectors
  Description: MG81-73 effector
MPTKQKEDSNRCVLTLPLLTELWQEHIIEKRFKIIEHLKNQLISKELRKLKNLQRTKAYKNLMKRIESVPKSERTALYKERNKMLKDAGFSQYAFMDDMAGKKSLMQKHFESHINVQIAHKAAIDVWSSFEKFLFGTGQIVHYQKRGTLSSIASKSPKTGMFYYSDENIFKWSGGGTKPKGGIILCLRVASVKTNYEKEMVANNEIKYYRVVRKWMKTKYKYYLQITFAGKPADKHREISTGRVGIDIGTQTIAIASDKSVKLLELADKVNKNHIKKCELQRKLDRSRRYTNPDNFNPDGTVKRGTKGHKLKWNKSKHYIEIAGKIRELERKNADIRKYQHTCLANDILAMGNQIYIEPMNYKGLQKRAKETQVDEKGRYKKKKRFGKSLANKAPAMFVTILKTKAEQHGGEVYEVDIMSYRASQCDHTTGEYTKHGLNDRWRILGNGDKVQRDLYSAFLIKNSNKTHDEIDLDKCSKTYDNFKKLHDKEIENIRNEVKLRERKNISSYGIA

SEQ ID NO: 1796 - protein, 530 aa, Unknown
  Description of Unknown: uncultivated organism sequence
  Category: MG81 effectors
  Description: MG81-74 effector
MILLAKNNNNNNTDTCVLTLPLRVEKWQEDCLLKRFEAARRIYNSLLNFELKKLRQLERTVEYRQIQSVISSAYRSNTKDSPECKDAFKRREKLISANGISKNGFKSDVKFFYKHFDGLIGSSVAVHCIAVQLWAAFDKYLSGSGKEIHFKRLGDISSLKGYSVKGKSGGCEIIFRGQYVEWTRKKKKLLLPLKIDPDNEYEREMLSRRVKYVRIIKKPGKNRLRWYAQLTLEGKPALKYSAETGKPIHSVGKGNVGIDIGPQTVAYASDKEVALLELADRVTNIEHQKKKLQRKLDRSRRATNPDNYKPDGTIKRGVKLTRNKSKRYLKLQSKLAYIQHRQAEIRKLQHTCLANHMLTLGDRFFVEKMNWPGLAHRAKETSISEKTGRYKRKKRFGKSLANKAPAMFISILKRKCETLGLPGVVEVDTYNLKASQYNHLSDTCEKKSLSERWNYMPISDGSDSSKTKRIQRDLYSAFLLQHTIPQPCSFDKEALRIDYPNFVIMHDAEIHRLESLPKTITSMGVRRSHS

SEQ ID NO: 1797 - protein, 528 aa, Unknown
  Description of Unknown: uncultivated organism sequence
  Category: MG81 effectors
  Description: MG81-75 effector
MILLTKNNNNTDTCVLTLPLRVEKWQEDCLLKRFEAARRIYNSLLNFELKKLRQLERTVEYRQIQSVISSAYRSNTKDSPECKDAFKRREKLISANGISEYGFKSDVKFFYKHFDGLIGSNVAVHCIAGQLWAAFDKYLRGSGKEIHFKRLGDISSLKGYSVKGKSGGCEIIFRGQYIEWTRKKKKLLLPLKIDPDNEYEREMLSRRVKYVRIIKKPGKNRLRWYAQLTLEGKPALKYSAETGKPIHSVGKGNVGIDIGPQTVAYASDKEVALLELADRVTNIEHQKKKLQRKLDRSRRATNPDNYKPDGTIKRGVKLTRNKSKRYLKLQSKLAYIQHRQAEIRKLQHTCLANHMLTLGDRFFVEKMNWPGLAHRAKETSISEKTGRYKRKKRFGKSLANKAPAMFISILKRKCETLGLPGVVEVDTYSLKASQYNHLSDTYEKKSLSERWNYMPISDGSDSSKTKRIQRDLYSAFLLQHTIPQPCSFDKKALRIDYPNFVTMHDAEIHRLESLPKTITSMGVRRSHS

SEQ ID NO: 1798 - protein, 512 aa, Unknown
  Description of Unknown: uncultivated organism sequence
  Category: MG81 effectors
  Description: MG81-76 effector
MPTKQKEGGNRCVLTLPLLTEPWQEHIIEKRFKIIEHLKNQLISIELRKLKNLQRTKAYKNLMKRIESVPKSERTALYKERNKMLKDAGFSQYTFMDDMAGKKSLMQKHFESHINVQIAHKAAIDVWSSFEKFLFGSGQMIHYQKRGTLSSVASKSPKTGMFYYSDENIFKWSGGGTKPKGGIILCLRVASVKTNYEKEMVANNEIKYYRVVRKWMKTKYKYYLQITFAGKPADKHREISTGRVGIDIGTQTIAIASDKSVKLLELADKVNKNHMKKCELQRKLDRSRRYTNPDNFNPDGTVKRGTKGHKLKWNKSKHYIEIAGKIRELERKNADIRKYQHTCLANDILTMGNQIYIEPMNYKGFQKRAKETQVDEKGRYKKKKRFGKSLANKAPAMFVTILKTKAEQHGGEVYEVDIMSYRASQCDHTTGEYTKHGLNDRWRILGNGDKVQRDLYSAFLIKNSNKTHDEIDLDKCSKTYDSFKKLHDKEIENIRNEVILRERRNISSYGIA

SEQ ID NO: 1799 - protein, 529 aa, Unknown
  Description of Unknown: uncultivated organism sequence
  Category: MG81 effectors
  Description: MG81-77 effector
MILLANNNNNNTDTCVLTLPLRVEKWQEDCLLKRFEAARRIYNSLLNFELKKLRQLERTVEYRQIQSVISSAYRSNTKDSPECKDAFKRREKLISANGISKNGFKSDVKFFYKHFDGLIGSSVAVHCIAVQLWAAFDKYLSGSGKEIHFKRLGDISSLKGYSVKGKSGGCEIIFRGQYVEWTRKKKKLLLPLKIDPDNEYEREMLSRRVKYVRIIKKPGKNRLRWYAQLTLEGKPALKYSAETGKPIHSVGKGNVGIDIGPQTVAYASDKEVALLELADRVTNIEHQKKKLQRKLDRSRRATNPDNYKPDGTIKRGVKLTRNKSKRYLKLQSKLAYIQHRQAEIRKLQHTCLANHMLTLGDRFFVEKMNWPGLAHRAKETSISEKTGRYKRKKRFGKSLANKAPAMFISILKRKCETLGLPGVVEVDTYNLKASQYNHLSDTCEKKSLSERWNYMPISDGSDSSKTKRIQRDLYSAFLLQHTIPQPCSFDKEALRIDYPNFVIMHDAEIHRLESLPKTITSMGVRRSHS

SEQ ID NO: 1800 - protein, 511 aa, Unknown
  Description of Unknown: uncultivated organism sequence
  Category: MG81 effectors
  Description: MG81-78 effector
MREDSQNTCCLTLPLKIEKWQADRLIKRFEIARQIYNTLVHAELKKLQKMEASAEYRQIQDRIRELNPSDARAKKEWKILKDKQEKLWKAWKITEYGFKSDIKAYYKYFNENIGSAVATHDIAPQVWAAFEKKLNDRTGKVKIQYKKAGDIRSLKGFSVSGKSGGTEIIFHKTYIAWKGLTLPLKLSPDNAYEKEMLMRRIKYVRILRKPGKHKDRWYAQLSLEGNPVVKLDPVSGLPRHPIGKGAVGIDIGPRTLAYSAEGGADLVELADQVQCIEQEKSRLQRKMDRSRRASNPDNYAQDGTIKRGVKLTHNKSRRYCKLQKELAYMLYRQAETRKRQHRELINRLLTMGDCFYIEDMHWNSLAHRAKKTEISEKTGGYKRKKRFGKSIANKAPAMLVDMLEQKCKSLELDVVMVNTSLKASQYNHQTGKYEKKTLSQRWNHMPDGEQIQRDLYSAFLLQHVVPEKNAFDNEALCRDYPKFVQYHHEVIERLRSLPKTISSMGIRRSVS

SEQ ID NO: 1801 - protein, 524 aa, Unknown
  Description of Unknown: uncultivated organism sequence
  Category: MG81 effectors
  Description: MG81-79 effector
MAKNNNTDTCVLTLPLRVEKWQEDCLLKRFEAARRIYNSLLNFELKKLRQLERTVEYRQIQSVISSAYRSNTKDSPECKDAFKRREKLISANGISEYGFKSDVKFFYKHFDGLIGSNVAVHCIAVQLWAAFDKYLRGSGKEIHFKRLGDISSLKGYSVKGKSDGREIIFRGQYIEWTRKKKKLLLPLKIDPDNEYEREMLSRRVKYVRIIKKPGKNRLRWYAQLTLEGKPALKYSAGTGKPIHSVGKGNVGIDIGPQTVAYASDKEVALLELADRVTNIEHQKKKLQRKLDRSRRATNPDNYKPDGTIKRGVKLTRNKSKRYLKLQSKLAYIQHRQAEIRKLQHTCLANHMLTLGDRFFVEKMNWPGLAHRAKETSISEKTGRYKRKKRFGKSLANKAPAMFISILKRKCETLGLPGVVEVDTYSLKASQYNHLSDTYEKKSLSERWNYMPISDGSDSSKTKRIQRDLYSAFLLQHTIPQPCSFDKEALRIDYPNFVTMHDAEIHRLESLPKTVTSMGVRRSHS

SEQ ID NO: 1802 - protein, 532 aa, Unknown
  Description of Unknown: uncultivated organism sequence
  Category: MG81 effectors
  Description: MG81-80 effector
MILLAKKNNNNNNNTDTCVLTLPLRVEKWQEDCLLKRFEAARRIYNSLLNFELKKLRQLERTVEYRQIQSVISSAYRSNTKDSPECKAALKRREKLIDENGLTKNGFKNDVKFFYKHFDGLIGSSVAVHCIAVQLWAAFNKYLCGNGKEIHFKRLGDISSLKGYSVKGKSGGCEIIFRGQYVEWTRKKKKLLLPLKIDPDNEYEREMLSRRVKYVRIIKKPGKNRLRWYAQLTLEGKPALKYSAETGKPIHSVGKGDVGIDIGPQTVAYASDKEVALLELADRVTNIEHQKKKLQRKLDRSRRATNPDNYKPDGTIKRGVKLTRNKSKRYLKLQSKLAYIQHRQAEIRKLQHTCLANHMLTLGDRFFVEKMNWPGLAHRAKETSISEKTGRYKRKKRFGKSLANKAPAMFISILKQKCETLGLPGVVEVDTFRLKASQYNHLSDTCEKKSLSERWNYMPISDGSDSSKTKRIQRDLYSAFLLQHTIPQSCSFDKEALRIDYPNFVTMHDAEIHRLESLPKTITSMGVRRSHS

SEQ ID NO: 1803 - protein, 512 aa, Unknown
  Description of Unknown: uncultivated organism sequence
  Category: MG81 effectors
  Description: MG81-81 effector
MKKSSTDTCCLTLPLKLEKWQEDRLAKRFEIARQLYNTLVHAELKRLVQIKRTAEYLENEQKIRALDRNNPADRAKLQELYKEQRKSLKTAGFTDYSFTTDMGKYYKHFRDNIGSSVAVHGIAPQVWAAFDKVLFKKGGKKVHYKKPGEVNSVQGYSRTGKSGGTEIMFRGPYIEWKGLKLPLKLSPDNAYETDMLQRRVKLVRLVRRPGKRRDRWYAQLVLEGKPAIKADPVTGKAVHPIGSGPVGLDIGPQTLAYSAAGVAGLVELADRVQNIEQEKRCLQRKMDRSRRAANPDNYAEDGTIRRGVKLTHNKSKRYRRSQQELKYLQHRQAEIRKLQHIQLANHLLSLGDHFYVEKMEWSSLTHRAKKTVISEKTGKPRSKKRFGKSIANKTPAMLIEILRQKCKSLGLLNVVEINPADIKASQYNHLTGEYVKKSLSRRWNEMQDGEHLQRDLYSAFLLQHYDSMSKALDLDSLARDYPAFVQYHHREIERLHALPKTPASMGIRRSIA

SEQ ID NO: 1804 - protein, 554 aa, Unknown
  Description of Unknown: uncultivated organism sequence
  Category: MG81 effectors
  Description: MG81-82 effector
MDNEEKKEDGATCCLTLPLKLEKWQSDHLEKRFEIARQLYNTLVHAELKRIHRIERMPEYREIERLIEATTDKKEKWALKNQKKQFLRKNGINRNTFTTDMKRLYKHFNDNIGSNVAQHGIVSQVLTAFEKVYIENQSGEVHFKKPGDLRSVQGYSQKESGGKEIMFRNGKIIWTQQENDDRKKSPKYQQRKKRQNYKGVKGIAREFPVVFSKNNPYEAEMLTKHVKFVRILRKDGKTKPHWYAQLVLEGKPAIKRDPASGAPKHPVGHGVVGIDIGTRTLAYSTDKEVNLLELADRVQNIEQEKRRLQRKMDRSRRAMNPENYNSDGTFKRGVKLTRNKSKRYRRIQHQLAMIQHHQADIRKQQHNELANYLLTLGDCFFVENMSYCDLVHRANKTEISEKTGRYKRKKRFGKSIANKAPAMLITMLKQKCQSRGLKGVKEVDTHVRASQYNHQTDTCIEKALENRWNVMPDGERIQRDLYSAFLLQHCKQGLPKYNRKELKKEFGEELYRVFDREALQRDYPQFVAYHHMTIQRLSELPHTIPSMGIRRIIS

SEQ ID NO: 1805 - protein, 512 aa, Unknown
  Description of Unknown: uncultivated organism sequence
  Category: MG81 effectors
  Description: MG81-83 effector
MPTKQKEDSNRCVLTLPLLTEPWQEHIIEKRFKIIEHLKNQLISIELRKLKNLQRTKAYKNLMKRIESVPKSERTALYKERNKMLKDAGFSQYTFMDDMAGKKSLMQKHFESHINVQIAHKAAIDVWSSFEKFLFGTGQIVHYQKRGTLSSVASKSPKTGMFYYSDENIFKWSGGGTKPKGGIILCLRVASVKTNYEKEMVANNEIKYYRVVRKWMKTKYKYYLQITFAGKPADKHREISTGRVGIDIGTQTIAIASDKSVKLLELVDKVNKNHIKKCELQRKLDRSRRYTNPDNFNPDGTVKRGTKGHKLKWNKSKHYLEIAGKIRELERKNTDIRKYQHTCLANDILAMGNQIYIEPMNYKGLQKRAKETQVDEKGRYKKKKRFGKSLANKAPAMFVTILKTKAEQHGGEVYEVDIMSYRASQCDHTTGEYTKHGLNDRWRILGNGDKVQRDLYSAFLIKNSNKTHDEIDLDKCSKTYDSFKKLHDKEIENIRNEVILRKRRNISSYGIA

SEQ ID NO: 1806 - protein, 512 aa, Unknown
  Description of Unknown: uncultivated organism sequence
  Category: MG81 effectors
  Description: MG81-84 effector
MPTKQKEGGNRCVLTLPLLTEPWQEHIIEKRFKIIEHLKNQLISIELRKLKNLQRTKAYKNLIKQIESVPKSERTALYKERNKMLKDAGFSQYTFMDDMAGKKSLMQKHFESHINVQIAHKAAIDVWSSFEKFLFGTGQIVHYQKRGTLSSVASKSPKTGMFYYSDENIFKWSGGGTKPKGGIILCLRVASVKTNYEKEMVANNEIKYYRVVRKWMKTKYKYYLQITFAGKPADKHREISTGRVGIDIGTQTIAIASDKSVKLLELADKVNKNHIKKCELQRKLDRSRQYTNPDNFNPDGTVGRGTKGHKLKWNKSKHYLEIAGKIRELERKNADIRKYQHSCLANDILAMGNQIYIEPMNYKGLQKRAKETQVDEKGRYKKKKRFGKSLANKAPAMFVTILKTKAEQHGGEVYEVDIMSYRASQCDHTTGEYTKHGLNDRWRILGNGDKVQRDLYSAFLIKNSNKTHDEIDLDKCSKTYDNFKKLHDKEIENIRNEVILRKRRNISSYGIA

SEQ ID NO: 1807 - protein, 505 aa, Unknown
  Description of Unknown: uncultivated organism sequence
  Category: MG81 effectors
  Description: MG81-85 effector
MGKEEDKEPRCVLTLPLYPEPWQVDIIEKRFHIMEHIENSLTAIELRKLKNVERAKKYKDVVAAIKEEKDDKKRSKLWKERNKLLKDAGINQFDFIKDVSLLQKHFASHIAQKVAAAAARTHVWSSFDRVVFGNGRKIHFHKKGDLKSITSGYFGVSMTVKNGYFIWSGGTKDEKDRKVNPITISIRIKQPETYYEKEMLQKQIKYVTIVRKWIKNKYKYYLQFMLVGNPVVKPRTIANGKRVGIDIGTSSAAIVSGKEIKLVELADHIQNNYDKEIQLQRSMDRSRRVMNPQNFNEDGTIKRGIKLIWIESKHYKEMKGQVRELERKNADIRKYQHTCLANYVLSLGTEVYIEQMSFKGLQRKVKETKYDKNGKPKRKKRFGKSIANRAPATFVMILKNKLSGIAGEELHKVNTFTFKASQYDHTNNTYQKKLLGHRWAKLSNGDKIQRDLYSAFLLMNSDTDMQYTDQNKCKRNYKKFKIQHDELIKAMQESSKRYPKSFGIN

SEQ ID NO: 1808 - protein, 538 aa, Unknown
  Description of Unknown: uncultivated organism sequence
  Category: MG81 effectors
  Description: MG81-86 effector
MNNEEKEKEGATCCLTLPLKLEKWQSDHLEKRFEIARQLYNTLVHAELKKKCQVERMPEYQEIMKMIDTASNQKEKWALEKKRKAFLEENGFSRNAFKADMEKYYKHFNDNIGANVALHGITAQVWIAFDKVFVDNYKQKGKVHFKKPGELCSVQGYSQKKSGGKEIMFREDRIIWNQQGNRDRKKVKREFLLKLSPNNPYEAEMLKRHVKFVRILRKDGKTKPHWYAQLVLEGKPAVKRDPISSAPKHPVGHGVVGIDIGTRTLAYSTDKEVNLLELADHVQNIEQEKRRLQRKMDRSRRATNPENYNPDGTFKRGVKLTRNKSKRYRRIQHQLAMIQHHQADIRKQQHNELANYLLTLGDCFFVENMSYCDLAHRANKTEISEKTGRYKRKKRFGKSIANKAPAMLITMLKQKCQSRGLEGVKEVDTHVCASQYNHQTDTCIKKALENRWNIMPDGERIQRDLYSAFLLQHCRRDLPEYNRKELQKEFGEELYRVFDREALQRDYPQFVAYHHMTIQRLSELPHTIPSMGIRRIIS

SEQ ID NO: 1809 - protein, 512 aa, Unknown
  Description of Unknown: uncultivated organism sequence
  Category: MG81 effectors
  Description: MG81-87 effector
MPTKQKEDSNRCVLTLPLLTEPWQEHIIEKRFKIIEHLKNQLISIELRKLKNLQRTKAYKNLIKQIESVPKSERTALYKERNKMLKDAGFSQYTFMDDMAGKKSLMQKHFESHINVQIAHKAAIDVWSSFEKFLFGSGQMIHYQKRGTLSSVASKSPKTGMFYYSDENIFKWSGGGTKPKGGIILCLRVASVKTNYEKEMVANNEIKYYRVVRKWMKTKYKYYLQITFAGKPADKHREISTGRVGIDIGTQTIAIASDKSVKLLELADKVNKNHIKKCELQRKLDRSRRYTNPDNFNPDGTVKRGTKGHKLKWNKSKHYIEIAGKIRELERKNADIRKYQHTCLANDILAMGNQIYIEPMNYKGLQKRAKETQVDEKGRYKKKKRFGKSLANKAPAMFVTILKTKAEQHGGEVYEVDIMSYRASQCDHTTGEYTKHGLNDRWRILGNGDKVQRDLYSAFLIKNSNKTHDEIDLDKCSKTYDNFKKLHDKEIENIRNEVILRKRRNISSYGIA

SEQ ID NO: 1810 - protein, 530 aa, Unknown
  Description of Unknown: uncultivated organism sequence
  Category: MG81 effectors
  Description: MG81-88 effector
MILLANNNNNNNTDTCVLTLPLRVEKWQEDCLLKRFEAARRIYNSLLNFELKKLRQLERTVEYRQIQSVISSAYRSNTKDSPECKAALKRREKLIDENGLTKNGFKNDVKFFYKHFDGLIGSSVAVHCIAVQLWAAFNKYLRGNGKEIHFKRLGDISSLKGYSVKGKSGGCEIIFRGQYVEWTRKKKKLLLPLKIDPDNEYEREMLSRRVKYVRIIKKPGKNRLRWYAQLTLEGKPALKYSAETGKPIHSVGKGDVGIDIGPQTVAYASDKEVALLELADRVTNIEHQKKKLQRKLDRSRRATNPDNYKPDGTIKRGVKLTRNKSKRYLKLQSKLAYIQHRQAEIRKLQHTCLANHMLTLGDRFFVEKMNWPGLAHRAKETSISEKTGRYKRKKRFGKSLANKAPAMFISILKQKCETLGLPGVVEVDTFRLKASQYNHLSDTCEKKSLSERWNYMPISDGSDSSKTKRIQRDLYSAFLLQHTIPQSCSFDKEALRIDYPNFVTMHDAEIHRLESLPKTITSMGVRRSHS

SEQ ID NO: 1811 - protein, 528 aa, Unknown
  Description of Unknown: uncultivated organism sequence
  Category: MG81 effectors
  Description: MG81-89 effector
MILLANNNNNTDTCVLTLPLRVEKWQEDCLLKRFEAARRIYNSLLNFELKKLRQLERTVEYRQIQSVISSAYRSNTKDSLECKDAFKRRKKLTDENGISEYGFKSDVKFFYKHFDGLIGSNVAVHCIAVQLWAAFDKYLRGSGKEIHFKRLGDISSLKGYSVKGKSGGCEIIFRGQYVEWTRKKKKLLLPLKIDPDNEYEREMLSKRVKYVRIIKKPGKNRLRWYAQLTLEGKPALKYSAETGKPIHSVGKGNVGIDIGPQTVAYASDKEVALLELADRVTNIEHQKKKLQRKLDRSRRATNPDNYKPDGTIKRGVKLTRNKSKRYLKLQSKLAYIQHRQAEIRKLQHTCLANHMLTLGDRFFVEKMNWPGLAHRAKETSISEKTGRYKRKKRFGKSLANKAPAMFISILKRKCETLGLPGVVEVDTYSLKASQYNHLSDTYEKKSLSERWNYMPISDGSDSSKTKRIQRDLYSAFLLQHTIPHPCSFDKEALRIDYPNFVIMHDAEIHRLEFLPKTVTSMGVRRSHS

SEQ ID NO: 1812 - protein, 505 aa, Unknown
  Description of Unknown: uncultivated organism sequence
  Category: MG81 effectors
  Description: MG81-90 effector
MGKEEDKEPRCVLTLPLYPEPWQVDIIEKRFHIMERIENSLTAIELRKLKNVERAKKYKDVVAGIKEEKDDKKRSKLWKERNKLLKDAGINQFDFIKDVSLLQKHFASHIAQKVAAAAARTHVWSSFDRVVFGNGRKIHFHKKGDLKSITSGYFGVSMTVKNGYFIWSGGTKDEKDRKVNPITISIRIKQPETYYEKEMLQKQIKYVTIVRKRIKNRYKYYLQFMLVGNPVAKPRTIANGKRVGIDIGTSSAAIVSGKEIKLVELADHIQNNYDKEIQLQRSMDRSRRAMNPQNFNEDGTIKRGIKLIWIESKHYKEMKGQVRELERKNADIRKYQHTCLANYVLSLGTEVYIEQMSFKGLQRKVKETKYDKNGKPKRKKRFGKSIANRAPATFVMILKNKLSGIAGEELHKVNTFTFKASQYDHTNNTYQKKLLGHRWAKLSNGDKIQRDLYSAFLLMNSDTDMQYTDQNKCKRNYKKFKIQHDELIKAMQESSKRYPKSFGIN

SEQ ID NO: 1813 - protein, 512 aa, Unknown
  Description of Unknown: uncultivated organism sequence
  Category: MG81 effectors
  Description: MG81-91 effector
MPTKQKEGGNRCVLTLPLLTEPWQEHIIEKRFKIIEHLKNQLISIELRKLKKLQRTKAYKNLIKQIESVPKSERTVLYKERNKMLKDAGFSQYTFMDDMAGKKSLMQKHFESHINVQIAHKAAIDVWSSFEKFLFGTGQIVHYQKRGTLSSVASKSPKTGMFYYSDENIFKWSGGGTKPKGGIILCLRVASLKTNYEKEMVANNEIKYYRVVRKWMKTKYKYYLQITFAGKPADKHREISTGRVGIDIGTQTIAIASDKSVKLLELADKVNKNHIKKCELQRKLDRSRRYTNPDNFNPDGTVKRGTKGHKLKWNKSKHYLEVAGKIRELERKNADIRKYQHTCLANDILAMGNQIYIEPMNYKGLQKRAKETQVDEKGRYKKKKRFGKSLANKAPAMFVTILKTKAEQHGGEVYEVDIMSYRASQCDHTTGEYTKHGLNDRWRILGNGDKVQRDLYSAFLIKNSNKTHDEIDLDKCSKTYDSFKKLHDKEIENIRNEVILRKRRNISSYGIA

SEQ ID NO: 1814 - protein, 512 aa, Unknown
  Description of Unknown: uncultivated organism sequence
  Category: MG81 effectors
  Description: MG81-92 effector
MPTKQKEDSNRCVLTLPLLTEPWQEHIIEKRFKIIEHLKNQLISIELRKLKKLQRTKAYKNLIKQIESVPKSERTVLYKERNKMLKDAGFSQYTFMDDMAGKKSLMQKHFESHINVQIAHKAAIDVWSSFEKFLFGSGQMIHYQKRGTLSSVASKSPKTGMFYYPDENIFKWSGGGTKPKGGIILCLRVASVKTNYEKEMVANNEIKYYRVVRKWMKTKYKYYLQITFAGKPADKHREISTGRVGIDIGTQTIAIASDKSVKLLELADKVNKNHIKKCELQRKLDRSRRYTNPDNFNPDGTVKRGTKGHKLKWNKSKHYIEIAGKIRELERKNADIRKYQHTCLANDILAMGNQIYIEPMNYKGLQKRAKETQVDEKGRYKKKKRFGKSLANKAPAMFVTILKTKAEQHGGEVYEVDIMSYRASQCDHTTGEYTKHGLNDRWRILGNGDKVQRDLYSAFLIKNSNKTHDEIDLDKCSKTYDNFKKLHDKEIENIRNEVILRKRRNISSYGIA

SEQ ID NO: 1815 - protein, 511 aa, Unknown
  Description of Unknown: uncultivated organism sequence
  Category: MG81 effectors
  Description: MG81-93 effector
MAKCSTDTCCLTLPLRLEKWQEDRLAKRFEIARQIYNTMVRAELKKLRAMEQSEPYKANQEKIQALDRKTQTDKQALKALYKERDKLLRDGGFSEYGFKSDIKNYYKHFNNNIGSNVAFHGIAPQVWAAFEKMLFKKEGKKVHFKKKGDIHSLRGYSATGKSGGVEIIFRETYIEWKGLKLPLKLSPDNIYETQMLSYRVKYVRLLRKPGKRKDRWYAQLSLEGKPVIKYNPKTGEVRHPIGKGAVGLDIGPQTLAYSAATGADLVELANQVQNVEQEKRRLQRKLDRSRRATNPGNYADDGTIRRGIALTHNKSKRYLRTQQELKYLQHQQAEIRKRQHTELANHLLSLGDCFYVEKMVWTSLTHRAKETEISEKTGKIKRKKRFGKSVANKAPATLIGILQRKSAALGIPGVIEVPTSVKASQYNHQSGTYTPKPLSQRWNNMPDGERIQRDLYSAFLLQHYDPQTNTFDANSLHQDYPQFVQYHHDAVLRLYAMPKTPSSMGIKRSLR

SEQ ID NO: 1816 - protein, 512 aa, Unknown
  Description of Unknown: uncultivated organism sequence
  Category: MG81 effectors
  Description: MG81-94 effector
MKKSSTDTCCLTLPLKLEKWQEDRLAKRFEIARQLYNTLVHAELKRLAQVKQTAEYRENERKIRALDWNDPGDQAKLKGLYKERRKSLKTAGFTDYSFTTDMGKYYKHFRDNIGSSVAVHGIAPQVWAAFDKLLFKKGGKKVHYKKPGEVNSVQGYSRTGKSGGTEIMFRGPYIEWKGLKLPLKLSPDNAYETDMLQRRVKLVRLVRRPGKRRDRWYAQLVLEAKPAIKADPVTGKAVHPIGSGPVGLDIGPQTLAYSAAGAAGLVELADRVQNIEQEKRCLQRKMDRSRRATNPDNYAEDGTIRCGVKLTHNKSKRYRRSQQELKYLQHRQAEIRKLQHIQLANHLLSLGDHFYVEKMEWSSLTHRAKKTVISEKTGKPRSKKRFGKSIANKAPAMLIEILRQKCKSLGLPNVVEINPADIKASQYNHLTGEYVKKSLSRRWNEMQDGEHLQRDLYSAFLLQHYDSMSKALDLDSLARDYPAFVQYHHREIERLHALPKTPSSMGIRRSIA

SEQ ID NO: 1817 - protein, 542 aa, Unknown
  Description of Unknown: uncultivated organism sequence
  Category: MG81 effectors
  Description: MG81-95 effector
MATTDKKDKDKEKLRAYKFRLDPNQAQTIALYQAAGAARYTYNMLTAYNLEVNRLRDDYWKKRHDEGISDADIKKELNALTKEDKRYKQLKYGVFGTQYLTPEKKRHEQAEHRIENGEDPSVVWNQETERSANPWLHTANQRVLVSGLQNASDAWDNFWASRTGKRAGRLVGTPRFKKKGISRDSFTVPAAETMGAYGTAYLRGEAAYQQGKRTITDYRHVRLSYLGVIRTYDSTKPLVKAVAAGAEIRSYTVSRNADRWYVSFLVKFSEPIRRSATKRARAAGAVGVDLGVKYLASLSDSEAPQRFPNLKFAEGLPSLENPRWSEASSRRLHKLQRALARSQKGSNRRSRLVKQIARLHHMTALRRESNLHQLTKKLSTGYTMVGLEDLNVSGMTASAKGTVENPGKNVAQKSGLNRVVLDAAFGVFRYQLEYKTAWYGSTLEKIDRYFASSQTCSECGRKAKTKLTLRDRVFDCAYCGNMMDRDFNAAVNICREAQRLFNKKLASENGESLNGRGSRGALRGAETVEASRPPASHRRGSP

SEQ ID NO: 1818 - protein, 512 aa, Unknown
  Description of Unknown: uncultivated organism sequence
  Category: MG81 effectors
  Description: MG81-96 effector
MKKSNTDTCCLTLPLKLEKWQEDRLAKRFEIARQLYNTLVHAELKRLAQVKQTAEYRENERKIRALDWNDPGDQAKLKGLYKERRKSLKTAGFTDYSFTTDMGKYYKHFRDNIGSSVAVHGIAPQVWAAFDKLLFKKGGKKVHYKKPGEVNSVQGYSRTGKSGGTEIMFRGPYIEWKGLKLPLKLSPDNAYETDMLQRRVKLVRLVRRPGKRRDRWYAQLVLEAKPAIKADPVTGKAVHPIGSGPVGLDIGPQTLAYSAAGAAGLVELADRVQNIEQEKRFLQRKMDRSRRAANPDNYAEDGTIRRGVKLTHNKSKRYRRSQQELKYLQRRQAEIRKLQHIQLANHLLSLGDHFYVEKMEWSSLTHRTKKTVISEKTGKPRSKKRFGKSIANKAPAMLIEILRQKCKSLGLPNVVEINPADIKASQYNHLTGEYVKKSLSRRWNDMQDGEHLQRDLYSAFLLQHYDSCSKTLDHDSIVRDYPAFVQYHHQEIERLHALPKTPASMGIRRSIA

SEQ ID NO: 1819 - protein, 534 aa, Unknown
  Description of Unknown: uncultivated organism sequence
  Category: MG81 effectors
  Description: MG81-97 effector
MGWKSKGRGGKRVKRSSTDTCCLTLPLKLEKWQSDRLEKRFEIGRQIYNTIVHAELKKLRKLERTQQYQEIEQKLENAKQEETKELWKKKRQLLDQNGLSENHFKADMKHYYPHFKDNIASSVAVHGIASQAWTAFEKVLLSKDGKMVHFKKKGELSSLRGYSQAGKSGGIEIIFRGSYVEWKGLKLPLKLSPDNDYETEMLSKRVKYVRILRKDGKTKTHWYAQLALEGKPAVKRDSISGAPKHPVGHGVVGIDIGTRTLAYSTDKEVNLLELADRVQNIEQEKRRLQRKMDRSRRAMNPGNYKPDGSIKQGVKLTWNNSKRYKRIQHQYAMIQHHQADIRKQQHNELANYLLTLGDCFFVENMSYCDLAHRANKTEISEKTGRYKRKKRFGKSIANKAPAMLITMLKQKCQSRGLEGVKEVDTHVCASQYNHQTDTCIKKALENRWNIMPDGERIQRDLYSAFLLQHCRRDLPEYNRKELQKEFGEELYRVFDREALQRDYPQFVAYHHMTIQRLSELPHTIPSMGIRRIIS

SEQ ID NO: 1820 - protein, 538 aa, Unknown
  Description of Unknown: uncultivated organism sequence
  Category: MG81 effectors
  Description: MG81-98 effector
MNNEEKEKEGATCCLTLPLKLEKWQSDHLEKRFEIARQLYNTLVHAELKKKCQVERMPEYQEIMKMIDAASNQKEKWALEKKRKAFLEENGFSRNAFKADMEKYYKHFNDNIGANVALHGITAQVWIAFDKVFVDNYKQKGKVHFKKPGELCSVQGYSQKKSGGKEIMFREDRIIWNQQGNRDRKKVKREFLLKLSPDNPYEAEMLKRHVKFVRILRKDGKTKPHWYAQLVLEGKPAVKRDPASGAPKHPVGHGVVGIDIGTRTLAYSTDKEVNLLELADRVQNIEQEKRRLQRKMDRSRRATNPENYNPDGTFKRGVKLTRNKSKRYRRIQHQLAMIQHHQADIRKQQHNELANYLLTLGDCFFVENMSYCDLVHRANKTEISEKTGRYKRKKRFGKSIANKAPAMLITMLKQKCQSRGLEGVKEVDTHVRASQYNHQTDTCIEKALENRWNVMPDGERIQRDLYSAFLLQHCKQGLPEYNRKELKKEFGEELYRVFDREALQRDYPQFVAYHHMTIQRLSELPHTIPSMGIRRIIS

SEQ ID NO: 1821 - protein, 550 aa, Unknown
  Description of Unknown: uncultivated organism sequence
  Category: MG81 effectors
  Description: MG81-99 effector
MGWKSKGRGGTLVDNEEKKEDGATCCLTLPLKLEKWQSDHLEKRFEIARQLYNTLVHAELKKKCQVERMPEYQEIMKMIDTASNQKEKWALEKKRKAFLEENGFSRNAFKADMEKYYKHFNDNIGANVALHGITAQVWIAFDKVFVDNYKQKGKVHFKKPGELCSVQGYSQKKSGGKEIMFREDRIIWNQQGNRDRKKVKREFLLKLSPDNPYEAEMLKRHVKFVRILRKDGKTKPHWYAQLVLEGKPAVKRDPASGAPKHPIGHGVVGIDIGTRTLAYSTDKEVNLLELADRVQNIEQEKRRLQRKMDRSRRATNPENYNPDGTFKRGVKLTRNKSKRYRRIQHQLAMIQHHQADIRKQQHNELANYLLTLGDCFFVENMSYCDLVHRANKTEISEKTGRYKRKKRFGKSIANKAPAMLITMLKQKCQSRGLKGVKEVDTHVRASQYNHQTDTCIEKALENRWNVMPDGERIQRDLYSAFLLQHCKQGLPEYNRKELKKEFGEELYRVFDREALQRDYPQFVAYHHMTIQRLSELPHTIPSMGIRRIIS

SEQ ID NO: 1822 - protein, 357 aa, Unknown
  Description of Unknown: uncultivated organism sequence
  Category: MG81 effectors
  Description: MG81-100 effector
MNNEEKEKEGATCCLTLPLKLEKWQSDHLEKRFEIARQLYNTLVHAELKKKCQVERMPEYQEIMKMIDTASNQKEKWALEKKRKAFLEENGFSRNAFKADMEKYYKHFNDNIGANVALHGITAQVWIAFDKVFVDNYKQKGKVHFKKPGELCSVQGYSQKKSGGKEIMFREDRIIWNQQGNRDRKKVKREFLLKLSPNNPYEAEMLKRHVKFVRILRKDGKTKPHWYAQLVLEGKPAVKRDPISSAPKHPVGHGVVGIDIGTRTLAYSTDKEVNLLELADRVQNIEQEKRRLQRKMDRSRRAMNPENYNSDGTFKRGVKLTRNKSKRYRRIQHQLAMIQHHQADIRKQQHNELANFC

SEQ ID NO: 1823 - protein, 522 aa, Unknown
  Description of Unknown: uncultivated organism sequence
  Category: MG81 effectors
  Description: MG81-101 effector
MKKSSTDTCCLTLPLKLEKWQSDRLEKRFEIGRQIYNTVVRAELKKLHQLERTPQYREIEQKLKEAKQEEAKELWKKRTQLLSQSGFSEYGFKSDMKYYYQHFKENIGSSVAVHGIASQVWTAFEKVLFSKDGKMVHFKKKGELSSLRGYSQAGKSGGKEIIFRGNYIEWKELKLPLKLTPNNDYETEMLSKRVKYVRLLRQDGKTKPHWYAQLVLEGKPAIKRDPVSGAPKHHVGHGVVGLDIGTRTLAYSADDKVDLLELADRVQNIEQEKMLLQRKLDRSRRATNPENYKPDGTIKKGVKLTRNKSKRYRKIQHQLAMLQHRQADIRKRQHNELANYLLTLGDCFFVEDMDYRALTRKAKKTEISEKTGRYKRKKRFGKSIANKAPSMLIALLDQKCKSLNLEGVKKVDTAVKASQYNHQTDECKAKELKERWNIMPDGERIQRDLYSAFLLQHCKRGLPEYNRKELKKEFGEELYRVFDREALQRDYPQFVVYHHMTIQRLSALPKTIASMGIRRSIS

SEQ ID NO: 1824 - protein, 548 aa, Unknown
  Description of Unknown: uncultivated organism sequence
  Category: MG81 effectors
  Description: MG81-102 effector
MEWKSTGRGGTLVDNEEKKEDGATCCLTLPLKLEKWQSDHLEKRFEIARQLYNTLVHAELKRIHRIERMPEYREIERQIEATTDKKEKWALKNQKKQFLRKNGINRNTFTTDMKRLYKHFNDNIGSNVAQHGIVSQVLTAFEKVYIENQSGEVHFKKPGDLRSVQGYSQKKSGGVEIMFREGKIIWNQQGNNDRKGVAREFPLKLSPDNSYEAEMLKKHVKFVRILRNEGKTKPHWYAQLVLEGKPAIKRDPASGAPKHPVGHGVVGIDIGTRTLAYSTDSKVDLIELADRVQNTEQEKMLLQRKLDRSRRATNPENYKPDGTIKKGVKLTRNKSKRYRKIQHQLAMLQHRQADIRKRQHNELANYLLTLGDCFFVEDMDYRALTRKAKKTEISEKTGRYKRKKRFGKSIANKAPSMLIALLDQKCKSLNLEGVKKVDTAVKASQYNHQTDECKAKKLKERWNIMPDGERIQRDLYSAFLLQHCRRDLPEYNRKKLQEAFGNELYRVFDREALQRDYPKFVEYHRETIQRLSALPKTIASMGIRRIIS

SEQ ID NO: 1825 - protein, 511 aa, Unknown
  Description of Unknown: uncultivated organism sequence
  Category: MG81 effectors
  Description: MG81-103 effector
MAKCSTDTCCLTLPLRLEKWHEDRLAKRFEIARQIYNTMVRAELKKLRAMEQSEPYKANQEKIQALDWKTQADKQALKALYKERDKLLRDGGFSEYGFKSDIKNYYKHFNNNIGSSVAVHGIAPQVWAAFEKMLFKKEGKKVHFKKKGDIRSLRGYSVTRKSGGVEIIFRETYIEWKGLKLPLKLSPDNIYETQMLSYRVKYVHLLRKPGKRKDRWYAQLSLEGKPVIKYNPKTGEVRHPIGKGAVGLDIGPQTLAYSAATGADLVELANQVQNVEQEKRRLQRKLDRSRRATNPGNYADDGTIRRGIALTHNKSKRYLRTQQELKYLQHQQAEIRKRQHTELANHLLSLGDCFYVEKMVWTSLTHRAKETEISEKTGKIKRKKRFGKSVANKAPATLIGILQRKSAALGIPGVIEVPTSVKASQYNHQSGTYTPKPLSQRWNNMPDGERIQRDLYSAFLLQHYDPQTNTFDANSLHQDYPQFVQYHHDAVLRLYAMPKTPSSMGIKRSLR

SEQ ID NO: 1826 - protein, 512 aa, Unknown
  Description of Unknown: uncultivated organism sequence
  Category: MG81 effectors
  Description: MG81-104 effector
MKKSSTDTCCLTLPLKLEKWQEDRLAKRFEIARQLYNTLVHAELKRLVQIKRTAEYLENEQKIRALDRNNPADRAKLQELYKEQRKSLKTAGFTDYSFTTDMGKYYKHFRDNIGSSVAVHGIAPQVWAAFDKVLFKKGGKKVHYKRPGEVNSVQGYSRTGKSGGREIMFRGAYIEWKGLKLPLKLSPDNAYETDMLQRRVKLVRLVRRPGKRRDRWYAQLVLEGKPAIKADPVTGKAVHPIGSGPIGLDIGPQTLAYSAAGAAGLVELADRVQNIEQEKRRLQRKMDRSRRAANPDNYAEDGTIRRGVKLTHNKSKRYRRSQQELKYLQHRQAEIRKLQHIQFANHLLSLGDHFYVEKMEWSSLTHRAKETVISEKTGKPRSKRRFGKSIANKAPAMLIEILRQKCKSLGLSDVVEINPADIKASQYNHLTGEYVKKSLSRRWNDMQDGEHLQRDLYSAFLLQHYDSCSKTLDHDSIVRDYPAFVQYHHREIERLHALPKTPSSMGIRRSIA

SEQ ID NO: 1827 - protein, 311 aa, Unknown
  Description of Unknown: uncultivated organism sequence
  Category: MG81 effectors
  Description: MG81-105 effector
MILLAKNNNNTDTCVLTLPLRVEKWQEDCLLKRFEAARRIYNSLLNFELKKLRQLERTVEYRQIQSVISSAYRSNTKDSPECKDAFKRREKLISANGISEYGFKSDVKFFYKHFDGLIGSNVAVHCIAVQLWAAFDKYLRGSGKEIHFKRLGDISSLKGYSVKGKSGGCEIIFRGQYIEWTRKKKKLLLPLKIDPDNEYEREMLSRRVKYVRIIKKPGKNRLRWYAQLTLEGKPALKYSAETGKPIHSVGKGNVGIDIGPRPLHTLPIKKLLCLNLLTESPISSIKKRSFSASWIAAAAQRIRTTTNRTAQ

SEQ ID NO: 1828 - protein, 511 aa, Unknown
  Description of Unknown: uncultivated organism sequence
  Category: MG81 effectors
  Description: MG81-106 effector
MAKCSTDTCCLTLPLRLEKWQEDRLAKRFEIARQIYNTMVRAELKKLRAMEQSEPYKANQEKIQALDRKTQTDKQALKALYKERDKLLRDGGFSEYGFKSDIKNYYKHFNNNIGSNVAFHGIAPQVWAAFEKMLFKKEGKKVHFKKKGDIHSLRGYSATGKSGGVEIIFRETYIEWKGLKLPLKLSPDNIYETQMLSYRVKYVRLLRKPGKRKDRWYAQLSLEGKPVIKYNPKTGEVRHPIGKGAVGLDIGPQTLAYSAATGADLVELANQVQNVEQEKRRLQRKLDRSRRATNPGNYADDGTIRRGIALTHNKSKRYLRTQQELKYLQHQQAEIRKRQHTELANHLLSLGDCFYVEKMVWTSLTHRAKETEISEKTGKIKRKKRFGKSVANKAPATLIGILQRKSAALGIPGVIEVPTSVKASQYNHQSGTYTHKPLSQRWNNMPDGERIQRDLYSAFLLQHYDPQTNTFDANSLHQDYPQFVQYHHDAVLRLYAMPKAPSSMGIKRSLR

SEQ ID NO: 1829 - protein, 527 aa, Unknown
  Description of Unknown: uncultivated organism sequence
  Category: MG81 effectors
  Description: MG81-107 effector
MAKNNNNNDTDTCVLTLPLRVEKWQEDCLLKRFEAARRIYNSLLNFELKKLRQLERTVEYRQIQSVISSAYRSNTKDSPECKDAFKRREKLISANGISENGFKSDVKFFYKHFDGLIGSSVAVHCIAVQLWAAFDKYLSGSGKEIHFKRLGDISSLKGYSVKGKSGGCEIIFRGQYVEWTRKKKKLLLPLKIDPDNEYEREMLSRRVKYVRIIKKPGKNRLRWYAQLTLEGKPALKYSAETGKPIHSVGKGNVGIDIGPQTVAYASDKEVALLELADRVTNIEHQKKKLQRKLDRSRRATNPDNYKPDGTIKRGVKLTRNKSKRYLKLQSKLAYIQHRQAEIRKLQHTCLANHMLTLGDCFFVEKMNWPGLAHRAKETSISEKTGRYKRKKRFGKSLANKAPAMFISILKRKCETLGLPGVVEVDTFRLRASQYNHLSDTYEKKSLSERWNYMPISDGSDSSKTKRIQRDLYSAFLLQHTIPQPCSFDKEALRIDYPNFVIMHDAEIHRLESLPKTITSMGVRRSHS

SEQ ID NO: 1830 - protein, 536 aa, Unknown
  Description of Unknown: uncultivated organism sequence
  Category: MG81 effectors
  Description: MG81-108 effector
MDADEYKKLLKKFHKLSDRHILVAEADMSYPDVQKVVNLSDRIRKAGNELVSLMKKNYEQLMRTKKYRKLLQLYGSTEDKKKRKTYAGQLNEMQEQYNVTWDFCRASMIPIGKKYGIDAIFALTKAEDVWRGVEKCLYGNGRMLHFSKYGDFPCIRAKQINRGIPMSVKNDELKFKLGKLVFGIQVKDRFQTDEVNAVLDYLAQPEVIDNKAVKTLQDEACCISTYRPCYATLVPKFIRGKYRVYLHLVIEGKAKPKYDSSGNPRHKYGRGVVGADIGTQTVAYTSDTETGLKNLSERGNSIQKSERLERLYYRAMDRSRRATNPKNYNADGTIKKGKKKWTYSRHYKKLKAKHAELCCINATNRQLAINEDVNHLRCLGDTFVTEPKNAARLMKRAKETTVNNKGKINRKKRFGKSVKNRCPGGFQAAVENKFKTSGGTYIEVPNNYRASQYDHTADDYIKKKLSDRMYKLADGTLVQRDWYSSFLLYCYNYRTNDIDKKKCAAEFKKCYSMEKDLIEWIKENKIKVLNSGIKIA

SEQ ID NO: 1831 - protein, 334 aa, Unknown
  Description of Unknown: uncultivated organism sequence
  Category: MG81 effectors
  Description: MG81-109 effector
MLKRHVKFVRILRKDGKTKPHWYAQLVLEGKPAVKRDPASGAPKHPIGHGVVGIDIGTRTLAYSTDKEVNLLELADRVQNIEQEKRRLQRKMDRSRRATNPENYNPDGTFKRGVKLTRNKSKRYRRIQHQLAMIQHHQADIRKQQHNELANYLLTLGDCFFVENMSYCDLVHRANKTEISEKTGRYKRKKRFGKSIANKAPAMLITMLKQKCQSRGLKGVKEVDTHVRASQYNHQTDTCIEKALENRWNVMPDGERIQRDLYSAFLLQHCKQGLPEYNRKELKKEFGEELYRVFDREALQRDYPQFVAYHHMTIQRLSELPHTIPSMGIRRIIS

SEQ ID NO: 1832 - protein, 511 aa, Unknown
  Description of Unknown: uncultivated organism sequence
  Category: MG81 effectors
  Description: MG81-110 effector
MAKCSTDTCCLTLPLRLEKWQEDRLAKRFEIARQIYNTMVRAELKKLRAMEQSEPYKANQEKIQALDWKTQTDKQALKALYKERDKLLRDGGFSEYGFKSDIKNYYKHFNNNIGSNVAFHGIAPQVWAAFEKMLFKKEGKKVHFKKKGDIHSLRGYSAAGKSGGVEIIFRETYIEWKGLKLPLKLSPDNIYETQMLSYRVKYVRLLRKPGKRKDRWYAQLSLEGKPVIKYNPKTGEVRHPIGKGAVGLDIGPQTLAYSAATGADLVELANQVQNVEQEKRRLQRKLDRSRRATNPGNYADDGTIRRGIALTHNKSKRYLRTQQELKYLQHQQAEIRKRQHTELANHLLSLGDCFYVEKMVWTSLTHRAKETEISEKTGKIKRKKRFGKSVANKAPATLIGILQRKSAALGIPGVIEVPTSVKASQYNHQSGTYTPKPLSQRWNNMPDGERIQRDLYSAFLLQHYDPQTNTFDANSLHQDYPQFVQYHHDAVLRLYAMPKAPSSMGIKRSLR

SEQ ID NO: 1833 - protein, 566 aa, Unknown
  Description of Unknown: uncultivated organism sequence
  Category: MG81 effectors
  Description: MG81-111 effector
MGWKSKGRGGTLVDNEEKKEDGATCCLTLPLKLEKWQSDHLEKRFEIARQLYNTLVHAELKRIHRIERMPEYREIERLIEATTDKKEKWALKNQKKQFLRKNGINRNTFTTDMKRLYKHFNDNIGSNVAQHGIVSQVLTAFEKVYIENQSGEVHFKKPGDLRSVQGYSQKESGGKEIMFRNGKIIWTQQENDDRKKSPKYQQRKKRQNYKGVKGIAREFPVVFSKNNPYEAEMLTKHVKFVRILRKDGKTKPHWYAQLVLEGKPAIKRDPASGAPKHPVGHGVVGIDIGTRTLAYSADSKVDLIELADRVQNIEQEKLLLQRKLDRSRRATNPENYKPDGTIKKGVKLTRNKSKRYRKIQHQLAMLQHRQADIRKRQHNELANYLLTLGDCFFVEDMDYRALTRKAKKTEISEKTGRYKRKKRFGKSIANKAPSMLIALLDQKCKSLNLEGVKKVDTAVKASQYNHQTDECKAKELKERWNIMPDGERIQRDLYSAFLLQHCKRGLPEYNRKKLQETFGNELYRVFDREALQRDYPKFVEYHRKTIQRLSALPKTIASMGIRRIIS

SEQ ID NO: 1834 - protein, 538 aa, Unknown
  Description of Unknown: uncultivated organism sequence
  Category: MG81 effectors
  Description: MG81-112 effector
MNNEEKEKEGATCCLTLPLKLEKWQSDHLEKRFEIARQLYNTLVHAELKKKCQVERMPEYQEIMKMIDTASNQKEKWALEKKRKAFLEENGFSRNAFKADMEKYYKHFNDNIGANVALHGITAQVWIAFDKVFVDNYKQKGKVHFKKPGELCSVQGYSQKKSGGKEIMFREDRIIWNQQGNRDRKKVKREFLLKLSPNNPYEAEMLKRHVKFVRILRKDGKTKPHWYAQLVLEGKPAVKRDPISSAPKHPVGHGVVGIDIGTRTLAYSTDKEVNLLELADHVQNIEQEKRRLQRKMDRSRRATNPENYNPDGTFKRGVKLTRNKSKRYRRIQHQLAMIQHHQADIRKQQHNELANYLLTLGDCFFVENMSYCDLVHRANKTEISEKTGRYKRKKRFGKSIANKAPAMLITMLKQKCQSRGLKGVKEVDTHVRASQYNHQTDTCIEKALENRWNVMPDGERIQRDLYSAFLLQHCKQGLPEYNRKELKKEFGEELYRVFDREALQRDYPQFVAYHHMTIQRLSELPHTIPSMGIRRIIS

SEQ ID NO: 1835 - protein, 534 aa, Unknown
  Description of Unknown: uncultivated organism sequence
  Category: MG81 effectors
  Description: MG81-113 effector
MGWKSKGRGGKRVKRSSTDTCCLTLPLKLEKWQSDRLEKRFEIGRQIYNTIVHAELKKLRKLERTQQYQEIEQKLENAKQEETKELWKKKRQLLDQNGLSENHFKADMKHYYPHFKDNIASSVAVHGIASQAWTAFEKVLLSKDGKMVHFKKKGELSSLRGYSQTGKSGGIEIIFRGSYVEWKGLKLPLKLSPDNDYETEMLSKRVKYVRILRQDGKTKPHWYAQLVLEGKPAVKRDPISGAPKHPIGRGVVGIDIGTRTLAYSADSKVDLIELADRVQNIEQEKLLLQRKLDRSRRATNPENYKPDGTIKKGVKLTRNKSKRYRRIQHQLAMIQHHQADIRKQQHNELANYLLTLGDCFFVENMSYCDLAHRANKTEISEKTGRYKRKKRFGKSIANKAPAMLITMLKQKCQSRGLKGVKEVDTHVRASQYNHQTDTCIEKALENRWNVMPDGERIQRDLYSAFLLQHCKQGLPEYNRKELKKEFGEELYRVFDREALQRDYPQFVAYHHMTIQRLSELPHTIPSMGIRRIIS

SEQ ID NO: 1836 - protein, 534 aa, Unknown
  Description of Unknown: uncultivated organism sequence
  Category: MG81 effectors
  Description: MG81-114 effector
MGWKSKGRGGTLVKKSSTDTCCLTLPLKLEKWQSDRLEKRFEIGRQIYNTVVRAELKKLQQVERTPQYREIEQKLKEAKQEEAKELWKTRTQLLSKSGFSEYGFKSDMKYYYQHFKENIGSSVAVHGIASQVWTAFEKVLFSKDGKMVHFKKKGELSSLRGYSQAGKSGGIEIIFRGSYVEWKGLKLPLKLSPDNDYETEMLSKRVKYVRILRKEGKTKPHWYAQLVLEGKPAIKRDPASGAPKHPVGHGVVGIDIGTRTLAYSADSKVDLIELADRVQNIEQEKMLLQRKLDRSRRATNPENYKPDGTIKKGVKLTRNKSKRYRKIQHQLAMLQHRQADIRKRQHNELANYLLTLGDCFFVEDMDYRALTRKAKKTEISEKTGRYKRKKRFGKSIANKAPSMLIALLDQKCKSLNLEGVKKVDTAVKASQYNHQTDECKAKELKERWNIMPDGERIQRDLYSAFLLQHCRRDLPEYNRKKLQETFGNELYRVFDREALQRDYPQFVAYHHMTIQRLSALPKTIASMGIRRSIS

SEQ ID NO: 1837 - protein, 213 aa, Unknown
  Description of Unknown: uncultivated organism sequence
  Category: MG81 effectors
  Description: MG81-115 effector
MKLTRNKSKRYLKLQSKLAYIQHRQAEIRKLQHTCLANHMLTLGDRFFVEKMNWPGLAHRAKETSISEKTGRYKRKKRFGKSLANKAPAMFISILKRKCETLGLPGVVEVDTYSLKASQYNHLSDTYEKKSLSERWNYMPISDGSDSSKTKRIQRDLYSAFLLQHTIPQPCSFDKKALRIDYPNFVTMHDAEIHRLESLPKTITSMGVRRSHS

SEQ ID NO: 1838 - protein, 522 aa, Unknown
  Description of Unknown: uncultivated organism sequence
  Category: MG81 effectors
  Description: MG81-116 effector
MKRSSTDTCCLTLPLKLEKWQSDRLEKRFEIGRQIYNTIVHAELKKLRKLERTQQYQEIEQKLENAKQEETKELWKKKRQLLDQNGLSEDHFKADMKYYYPHFKDNIASNVAVHGIASQAWTAFEKVLFSKDGKMVHFKKKGELSSLRGYSRAGKSGGVEIIFRGSYVEWKGLKLPLKLSPDNDYETEMLSKRVKYVRILRKDGKTKTHWYAQLVLEGKPAVKRDPASGAPKHPIGHGVVGIDIGTRTLAYSTDKEVNLLELADHVQNIEQEKRRLQRKMDRSRRATNPENYNPDGTFKRGVKLTRNKSKRYRRIQHQLAMIQHHQADIRKQQHNELANYLLTLGDCFFVENMSYCDLVHRANKTEISEKTGRYKRKKRFGKSIANKAPAMLITMLKQKCQSRGLEGVKEVDTHVRASQYNHQTDTCIEKALENRWNVMPDGERIQRDLYSAFLLQHCKQGLPEYNRKELKKEFGEELYRVFDREALQRDYPQFVAYHHMTIQRLSELPHTIPSMGIRRIIS

SEQ ID NO: 1839 - protein, 538 aa, Unknown
  Description of Unknown: uncultivated organism sequence
  Category: MG81 effectors
  Description: MG81-117 effector
MNNEEKEKEGATCCLTLPLKLEKWQSDHLEKRFEIARQLYNTLVHAELKKKCQVERMPEYQEIMKMIDTASNQKEKWALEKKRKAFLEENGFSRNAFKADMEKYYKHFNDNIGANVALHGITAQVWIAFDKVFVDNYKQKGKVHFKKPGELCSVQGYSQKKSGGKEIMFREDRIIWNQQGNRDRKKVKGEFLLKLSPNNPYEAEMLKRHVKFVRILRKDGKTKPHWYAQLVLEGKPAVKRDPISSAPKHPVGHGVVGIDIGTRTLAYSTDKEVNLLELADHVQNIEQEKRRLQRKMDRSRRATNPENYNPDGTFKRGVKLTRNKSKRYRRIQHQLAMIQHHQADIRKQQHNELANYLLTLGDCFFVENMSYCDLVHRANKTEISEKTGRYKRKKRFGKSIANKAPAMLITMLKQKCQSRGLKGVKEVDTHVRASQYNHQTDTCIEKALENRWNVMPDGERIQRDLYSAFLLQHCKQGLPEYNRKELKKEFGEELYRVFDREALQRDYPQFVAYHHMTIQRLSELPHTIPSMGIRRIIS

SEQ ID NO: 1840 - protein, 388 aa, Unknown
  Description of Unknown: uncultivated organism sequence
  Category: MG81 effectors
  Description: MG81-118 effector
MVHFKKKGELSSLRGYSQTGKSGGIEIIFRGSYVEWKGLKLPLKLSPDNDYETEMLSKRVKYVRILRQDGKTKPHWYAQLVLEGKPAVKRDPISGAPKHPIGHGVVGIDIGTRTLAYSADSKVDLIELADRVQNIEQEKLLLQRKLDRSRRATNPGNYNPDGTIKKGVKLTRNKSKRYRKIQHQLAMLQHRQADIRKRQHNELANYLLTLGDCFFVEDMDYRALTRKAKKTEISEKTGRYKRKKRFGKSIANKAPSMLIALLDQKCESLNLEGVKKVDTAVKASQYNHQTDECKAKELKERWNIMPDGERIQRDLYSAFLLQHCRRDLPEYNRKELQKEFGEELYRVFDREALQRDYPQFVAYHHMTIQRLSELPHTIPSMGIRRIIS

SEQ ID NO: 1841 - protein, 538 aa, Unknown
  Description of Unknown: uncultivated organism sequence
  Category: MG81 effectors
  Description: MG81-119 effector
MDNEEKEKDGATCCLTLPLKLEKWQSDHLEKRFEIARQLYNTLVHAELKKKCQVERMPEYQEIMKMIDAASNQKEKWALEKKRKAFLEENGFNRNAFKADMEKYYKHFNDNIGANVALHGITAQVWIAFDKVFVDNYKQKGKVHFKKPGELCSVQGYSQKKSGGKEIMFREDRIIWNQQGNRDRKKVKREFLLKLSPDNPYEAEMLKRHVKFVRILRKDGKTKPHWYAQLVLEGKPAVKRDPASGAPKHPIGHGVVGIDIGTRTLAYSTDKEVNLLELADHVQNIEQEKRRLQRKMDRSRRATNPENYNPDGTFKRGVKLTRNKSKRYRRIQHQLAMIQHHQADIRKQQHNELANYLLTLGDCFFVENMSYCDLVHRANKTEISEKTGRYKRKKRFGKSIANKAPAMLITMLKQKCQSRGLKGVKEVDTHVRASQYNHQTDTCIEKALENRWNVMPDGERIQRDLYSAFLLQHCKQGLPEYNRKELKKEFGEELYRVFDREALQRDYPQFVAYHHMTIQRLSELPHTIPSMGIRRIIS

SEQ ID NO: 1842 - protein, 567 aa, Unknown
  Description of Unknown: uncultivated organism sequence
  Category: MG81 effectors
  Description: MG81-120 effector
MSNLLFLLENEEKMRYNGVEKQRKGEGTRVNNEEKEKDGATCCLTLPLKLEKWQSDHLEKRFEIARQLYNTLVHAELKKKCQVERMPEYQEIMKMIDAASNQKEKWALEKKRKAFLEENGFSRNAFKADMEKYYKHFNDNIGANVALHGITAQVWIAFDKVFVDNYKQKGKVHFKKPGELCSVQGYSQKKSGGKEIMFREDRIIWNQQGNRDRKKVKREFLLKLSPDNPYEAEMLKRHVKFVRILRKDGKTKPHWYAQLVLEGKPAVKRDPASGAPKHPIGHGVVGIDIGTRTLAYSTDKEVNLLELADHVQNIEQEKRRLQRKMDRSRRATNPENYNPDGTFKRGVKLTRNKSKRYRRIQHQLAMIQHHQADIRKQQHNELANYLLTLGDCFFVENMSYCDLVHRANKTEISEKTGRYKRKKRFGKSIANKAPAMLITMLKQKCQSRGLEGVKEVDTHVRASQYNHQTDTCIEKALENRWNVMPDGERIQRDLYSAFLLQHCKQGLPEYNRKELKKEFGEELYRVFDREALQRDYPQFVAYHHMTIQRLSELPHTIPSMGIRRIIS

SEQ ID NO: 1843 - protein, 538 aa, Unknown
  Description of Unknown: uncultivated organism sequence
  Category: MG81 effectors
  Description: MG81-121 effector
MNNEEKEKEGATCCLTLPLKLEKWQSDHLEKRFEIARQLYNTLVHAELKKKCQVERMPEYQEIMKMIDTASNQKEKWALEKKRKAFLEENGFSRNAFKADMEKYYKHFNDNIGANVALHGITAQVWIAFDKVFVDNYKQKGKVHFKKPGELCSVQGYSQKKSGGKEIMFREDRIIWNQQGNRDRKKVKREFLLKLSPDNPYEAEMLKRHVKFVRILRKDGKTKPHWYAQLVLEGKPAVKRDPASGAPKHPIGHGVVGIDIGTRTLAYSTDKEVNLLELADRVQNIEQEKRRLQRKMDRSRRATNPENYNPDGTFKRGVKLTRNKSKRYRRIQHQLAMIQHHQADIRKQQHNELANYLLTLGDCFFVENMSYCDLVHRANKTEISEKTGRYKRKKRFGKSIANKAPAMLITMLKQKCQSRGLKGVKEVDTHVRASQYNHQTDTCIEKALENRWNVMPDGERIQRDLYSAFLLQHCKQGLPEYNRKELKKEFGEELYRVFDREALQRDYPQFVAYHHMTIQRLSELPHTIPSMGIRRIIS

SEQ ID NO: 1844 - protein, 550 aa, Unknown
  Description of Unknown: uncultivated organism sequence
  Category: MG81 effectors
  Description: MG81-122 effector
MGRKSTGRGGKRVNNEEKEKDGATCCLTLPLKLEKWQSDHLEKRFEIARQLYNTLVHAELKKKCQVVRMPEYQEIMKMIDAASNQKEKWALEKKRKAFLEENGFSRNAFKADMEKYYKHFNDNIGANVALHGITAQVWIAFDKVFVDNYKQKGKVHFKKPGELCSVQGYSQKKSGGKEIMFREDRIIWNQQGNRDRKKVKREFLLKLSPDNPYEAEMLKRHVKFVRILRKDGKTKPHWYAQLVLEGKPAVKRDPISSAPKHPVGHGVVGIDIGTRTLAYSTDKEVNLLELADRVQNIEQEKRRLQRKMDRSRRAMNPENYNSDGTFKRGVKLTRNKSKRYRRIQHQLAMIQHHQADIRKQQHNELANYLLTLGDCFFVENMSYCDLVHRANKTEISEKTGRYKRKKRFGKSIANKAPAMLITMLKQKCQSRGLEGVKEVDTHVRASQYNHQTDTCIEKALENRWNVMPDGERIQRDLYSAFLLQHCKQGLPEYNRKELKKEFGEELYRVFDREALQRDYPQFVAYHHMTIQRLSELPHTIPSMGIRRIIS

SEQ ID NO: 1845 - protein, 538 aa, Unknown
  Description of Unknown: uncultivated organism sequence
  Category: MG81 effectors
  Description: MG81-123 effector
MDNEEKEKDGATCCLTLPLKLEKWQSDHLEKRFEIARQLYNTLVHAELKKKCQVERMPEYQEIMKMIDAASNQKEKWALEKKRKAFLEENGFSRNAFKADMEKYYKHFNDNIGANVALHGITAQVWIAFDKVFVDNYKQKGKVHFKKPGELCSVQGYSQKKSGGKEIMFREDRIIWNQQGNRDRKKVKREFLLKLSPDNPYEAEMLKRHVKFVRILRKDGKTKPHWYAQLVLEGKPAVKRDPASGAPKHPIGHGVVGIDIGTRTLAYSTDSEVNLLELADRVQNIEQEKRRLQRKMDRSRRAMNPGNYKPDGSIKQGVKLTWNNSKRYKRIQHQYAMIQHHQADIRKQQHNELANYLLTLGDCFFVENMSYCDLAHRANKTEISEKTGRYKRKKRFGKSIANKAPAMLITMLKQKCQSRGLEGVKEVDTHVCASQYNHQTDTCIKKALENRWNIMPDGERIQRDLYSAFLLQHCRRDLPEYNRKELQKEFGEELYRVFDREALQRDYPQFVAYHHMTIQRLSELPHTIPSMGIRRIIS

SEQ ID NO: 1846 - protein, 427 aa, Unknown
  Description of Unknown: uncultivated organism sequence
  Category: MG81 effectors
  Description: MG81-124 effector
MKYYYQHFKENIGSSVAVHGIASQVWTAFEKVLFSKDGKMVHFKKKGELSSLRGYSQAGKSGGVEIIFRGSYVEWKGLKLPLKLSPDNDYETEMLSKRVKYVRILRQDGKTKPHWYAQLVLEGKPAIKRDPASGTPKHPIGHGVVGIDIGTRTLAYSADSKVDLIELADRVQNIEQEKMLLQRKLDRSRRATNPENYKPDGTIKKGVKLTRNKSKRYRKIQHQLAMLQHRQADIRKRQHNELANYLLTLGDCFFVEDMDYRALTRKAKKTEISEKTGRYKRKKRFGKSIANKAPSMLIALLDQKCKSLNLEGVKKVDTAVKASQYNHQTDECKAKELKERWNIMPDGERIQRDLYSAFLLQHCRRDLPEYNRKKLQETFGNELYRVFDREALQRDYPKFVEYHRETIQRLSALPKTIASMGIRRSIS

SEQ ID NO: 1847 - protein, 550 aa, Unknown
  Description of Unknown: uncultivated organism sequence
  Category: MG81 effectors
  Description: MG81-125 effector
MGWKSKGRGGTLVDNEEKKEDGATCCLTLPLKLEKWQSDHLEKRFEIARQLYNTLVHAELKKKCQVERMPEYQEIMKMIDTASNQKEKWALEKKRKAFLEENGFSRNAFKADMEKYYKHFNDNIGANVALHGITAQVWIAFDKVFVDNYKQKGKVHFKKPGELCSVQGYSQKKSGGKEIMFREDRIIWNQQGNRDRKKVKREFLLKLSPNNPYEAEMLKRHVKFVRILRKDGKTKPHWYAQLVLEGKPAVKRDPISSAPKHPVGHGVVGIDIGTRTLAYSTDKEVNLLELADRVQNIEQEKRRLQRKMDRSRRAMNPENYNPDGTFKRGVKLTRNKSKRYRRIQHQLAMIQHHQADIRKQQHNELANYLLTLGDCFFVENMSYCDLVHRANKTEISEKTGRYKRKKRFGKSIANKAPAMLITMLKQKCQSRGLEGVKEVDTHVRASQYNHQTDTCIEKALENRWNVMPDGERIQRDLYSAFLLQHCKQGLPEYNRKELKKEFGEELYRVFDREALQRDYPQFVAYHHMTIQRLSELPHTIPSMGIRRIIS

SEQ ID NO: 1848 - protein, 550 aa, Unknown
  Description of Unknown: uncultivated organism sequence
  Category: MG81 effectors
  Description: MG81-126 effector
MGWKSKGGGGTRVDNEEKEKDGATCCLTLPLKLEKWQSDHLEKRFEIARQLYNTLVHAELKKKCQVERMPEYQEIMKMIDTASNQKEKWALEKKRKAFLEENGFSRNAFKADMEKYYKHFNDNIGANVALHGITAQVWIAFDKVFVDNYKQKGKVHFKKPGELCSVQGYSQKKSGGKEIMFREDRIIWNQQGNRDRKKVKREFLLKLSPNNPYEAEMLKRHVKFVRILRKDGKTKPHWYAQLVLEGKPAVKRDPISSAPKHPVGHGVVGIDIGTRTLAYSTDKEVNLLELADRVQNIEQEKRRLQRKMDRSRRAMNPENYNSDGTFKRGVKLTRNKSKRYRRIQHQLAMIQHHQADIRKQQHNELANYLLTLGDCFFVENMSYCDLVHRANKTEISEKTGWYKRKKRFGKSIANKAPAMLITMLKQKCQSRGLEGVKEVDTHVRASQYNHQTDTCIEKALENRWNVMPDGERIQRDLYSAFLLQHCKQGLPEYNRKELKKEFGEELYRVFDREALQRDYPQFVAYHHMTIQRLSELPHTIPSMGIRRIIS

SEQ ID NO: 1849 - protein, 534 aa, Unknown
  Description of Unknown: uncultivated organism sequence
  Category: MG81 effectors
  Description: MG81-127 effector
MGWKSKGRGGKRVKRSSTDTCCLTLPLKLEKWQSDRLEKRFEIGRQIYNTIVHAELKKLRKLERTQQYQEIEQKLENAKQEETKELWKKKRQLLDQNGLSENHFKADMKHYYPHFKDNIASSVAVHGIASQAWTAFEKVLLSKDGKMVHFKKKGELSSLRGYSQTGKSGGIEIIFRGSYVEWKGLKLPLKLSPDNDYETEMLSKRVKYVRILRQDGKTKPHWYAQLVLEGKPAVKRDPISGAPKHPIGRGVVGIDIGTRTLAYSADSKVDLIELADRVQNIEQEKLLLQRKLDRSRRATNPENYKPDGTIKKGVKLTRNKSKRYRRIQHQLAMIQHHQADIRKQQHNELANYLLTLGDCFFVEDMDYRALTRKAKKTEISEKTGRYKRKKRFGKSIANKAPAMLITMLKQKCQSRGLKGVKEVDTHVRASQYNHQTDTCIEKALENRWNVMPDGERIQRDLYSAFLLQHCKQGLPEYNRKELKKEFGEELYRVFDREALQRDYPQFVAYHHMTIQRLSELPHTIPSMGIRRIIS

SEQ ID NO: 1850 - protein, 566 aa, Unknown
  Description of Unknown: uncultivated organism sequence
  Category: MG81 effectors
  Description: MG81-128 effector
MGWKSKGRGGTRVNNEEKEKDGATCCLTLPLKLEKWQSDHLEKRFEIARQLYNTLVHAELKRIHRIERMPEYREIERQIEATTDKKEKWALKNQKKQFLRKNGINRNTFTTDMKRLYKHFNDNIGSNVAQHGIVSQVLTAFEKVYIENQSGEVHFKKPGDLRSVQGYSQKESGGKEIMFRNGKIIWTQQENDDRKKSPKYQQRKKRQNYKGVKGIAREFPVVFSKNNPYEAEMLTKHVKFVRILRKDGKTKPHWYAQLVLEGTPVAKYDPISGAPKHPVGHGVVGIDIGTRTLAYSTDKEVNLLELADRVQNIEQEKRRLQRKMDRSRRAMNPENYNSDGTFKRGVKLTRNKSKRYRRIQHQLAMIQHHQADIRKQQHNELANYLLTLGDCFFVENMSYCDLVHRANKTEISEKTGRYKRKKRFGKSIANKAPAMLITMLKQKCQSRGLKGVKEVDTHVRASQYNHQTDTCIEKALENRWNVMPDGERIQRDLYSAFLLQHCKQGLPEYNRKELKKEFGEELYRVFDREALQRDYPQFVAYHHMTIQRLSELPHTIPSMGIRRIIS

SEQ ID NO: 1851 - protein, 534 aa, Unknown
  Description of Unknown: uncultivated organism sequence
  Category: MG81 effectors
  Description: MG81-129 effector
MGWKSTGRGGKRVKRSSTDTCCLTLPLKLEKWQSDRLEKRFEIGRQIYNTIVHAELKKLRKLERTQQYQEIEQKLENAKQEETKELWKKKRQLLDQNGLSENHFKADMKHYYPHFKDNIASSVAVHGIASQAWTAFEKVLLSKDGKMVHFKKKGELSSLRGYSQAGKSGGIEIIFRGSYVEWKGLKLPLQLSPNNEYETEMLSKRVKYVRILRKDGKTKTHWYAQLALEGKPAVKRDSISGAPKHPVGHGVVGIDIGTRTLAYSTDSEVNLLELADRVQNIEQEKRRLQRKMDRSRRAMNPGNYKPDGSIKQGVKLTWNNSKRYKRIQHQYAMIQHHQADIRKQQHNELANYLLTLGDCFFVEDMDYRALTRKAKKTEISEKTGRYKRKKRFGKSIANKAPSMLIALLDQKCKSLNLEGVKMVDTAVKASQYNHQTDECKAKELKERWNIMPDGERIQRDLYSAFLLQHCRRDLPEYNRKKLQEAFGNELYRVFDREALQRDYPKFVEYHRKTIQRLSALPKTIASMGIRRIIS

SEQ ID NO: 1852 - protein, 550 aa, Unknown
  Description of Unknown: uncultivated organism sequence
  Category: MG81 effectors
  Description: MG81-130 effector
MGWKSKGRGGTRVDNEEKEKDGATCCLTLPLKLEKWQSDHLEKRFEIARQLYNTLVHAELKKKCQVVRMPEYQEIMKMIDAASNQKEKWALEKKRKAFLEENGFSRNAFKADMEKYYKHFNDNIGANVALHGITAQVWIAFDKVFVDNYKQKGKVHFKKPGELCSVQGYSQKKSGGKEIMFREDRIIWNQQGNRDRKKVKREFLLKLSPDNPYEAEMLKRHVKFVRILRKDGKTKPHWYAQLVLEGKPAVKRDPASGAPKHPIGHGVVGIDIGTRTLAYSTDSEVNLLELADRVQNIEQEKRRLQRKMDRSRRAMNPGNYKPDGSIKQGVKLTWNNSKRYKRIQHQYAMIQHHQADIRKQQHNELANYLLTLGDCFFVENMSYCDLAHRANKTEISEKTGRYKRKKRFGKSIANKAPAMLITMLKQKCQSRGLEGVKEVDTHVCASQYNHQTDTCIKKALENRWNIMPDGERIQRDLYSAFLLQHCRRDLPEYNRKELQKEFGEELYRVFDREALQRDYPQFVAYHHMTIQRLSELPHTIPSMGIRRIIS

SEQ ID NO: 1853 - protein, 536 aa, Unknown
  Description of Unknown: uncultivated organism sequence
  Category: MG81 effectors
  Description: MG81-131 effector
MNNEEKEKDGATCCLTLPLKLEKWQSDHLEKRFEIARQLYNTLVHAELKRIHRIERMPEYREIERLIEATTDKKEKWALKNQKKQFLRKNGINRNTFTTDMKRLYKHFNDNIGSNVAQHGIVSQVLTAFEKVYIENQSGEVHFKKPGDLRSVQGYSQKKSGGVEIMFREGKIIWNQQGNNDRKGVAREFPLKLSPDNSYEAEMLKKHVKYVRILRNEGKTKPHWYAQLVLEGTPVAKYDPISGAPKHPVGHGVVGIDIGTRTLAYSTDKEVNLLELADHVQNIEQEKRRLQRKMDRSRRATNPENYNPDGTFKRGVKLTRNKSKRYRRIQHQLAMIQHHQADIRKQQHNELANYLLTLGDCFFVENMSYCDLVHRANKTEISEKTGRYKRKKRFGKSIANKAPAMLITMLKQKCQSRGLKGVKEVDTHVRASQYNHQTDTCIEKALENRWNVMPDGERIQRDLYSAFLLQHCKQGLPEYNRKELKKEFGEELYRVFDREALQRDYPQFVAYHHMTIQRLSELPHTIPSMGIRRIIS

SEQ ID NO: 1854 - protein, 534 aa, Unknown
  Description of Unknown: uncultivated organism sequence
  Category: MG81 effectors
  Description: MG81-132 effector
MGWKSKGRGGKRVKKSSTDTCCLTLPLKLEKWQSDRLEKRFEIGRQIYNTVVRAELKKLHQVERTPQYREIEQKLKEAKQEEAKELWKKRTQLLSKSGFSEYGFKSDMKYYYQHFKENIGSSVAVHGIASQVWTAFEKVLFSKDGKMVHFKKKGELSSLRGYSQAGKSGGIEIIFRGSYVEWKGLKLPLKLSSNNDYETEMLSKRVKYVRILRKEGKTKPHWYAQLVLEGKPAIKRDPASGAPKHPVGHGVVGIDIGTRTLAYSADSKVDLIELADRVQNIELEKMLLQRKLDRSRRATNPENYKPDGTIKKGVKLTRNKSKRYRKIQHQLAMLQHRQADIRKRQHNELANYLLTLGDCFFVEDMDYRALTRKAKKTEISEKTGRYKRKKRFGKSIANKAPSMLIALLDQKCKSLNLEGVKKVDTAVKASQYNHQTDECKAKELKERWNIMPDGERIQRDLYSAFLLQHCKRGLPEYNRKKLQEAFGNELYRVFDREALQRDYPKFVEYHRETIQRLSALPKTIASMGIRRIIS

SEQ ID NO: 1855 - protein, 334 aa, Unknown
  Description of Unknown: uncultivated organism sequence
  Category: MG81 effectors
  Description: MG81-133 effector
MLKKHVKFVRILRNEGKTKPHWYAQLVLEGKPAIKRDPASGTPKHPVGHGVVGIDIGTRTLAYSTDSEVNLLELADRVQNIEQEKRRLQRKMDRSRRAMNPGNYKPDGSIKQGVKLTWNNSKRYKQIQHQYAMIQHHQADIRKQQHNELANYLLTLGDCFFVEDMDYRALTRKAKKTEISEKTGRYKRKKRFGKSIANKAPSMLIALLDQKCKSLNLEGVKKVDTAVKASQYNHQTDECKAKELKERWNIMPDGERIQRDLYSAFLLQHCKRGLPEYNRKKLQETFGNELYRVFDREALQRDYPKFVEYHRETIQRLSALPKTIASMGIRRSIS

SEQ ID NO: 1856 - protein, 538 aa, Unknown
  Description of Unknown: uncultivated organism sequence
  Category: MG81 effectors
  Description: MG81-134 effector
MNNEEKEKDGATCCLTLPLKLEKWQSDHLEKRFEIARQLYNTLVHAELKKKCQVERMPEYQEIMKMIDAASNQKEKWALEKKRKAFLEENGFSRNAFKADMEKYYKHFNDNIGANVALHGITAQVWIAFDKVFVDNYKQKGKVHFKKPGELCSVQGYSQKKSGGKEIMFREDRIIWNQQGNRDRKKVKREFLLKLSPDNPYEAEMLKRHVKFVRILRKDGKTKPHWYAQLVLEGKPAVKRDSASGAPKHPIGHGVVGIDIGTRTLAYSTDKEVNLLELADHVQNIEQEKRRLQRKMDRSRRATNPENYNPDGTFKRGVKLTRNKSKRYRRIQHQLAMIQHHQADIRKQQHNELANYLLTLGDCFFVENMSYCDLVHRANKTEISEKTGRYKRKKRFGKSIANKAPAMLITMLKQKCQSRGLEGVKEVDTHVRASQYNHQTDTCIEKALENRWNVMPDGERIQRDLYSAFLLQHCKQGLPEYNRKELKKEFGEELYRVFDREALQRDYPQFVAYHHMTIQRLSELPHTIASMGIRRSIS

SEQ ID NO: 1857 - protein, 554 aa, Unknown
  Description of Unknown: uncultivated organism sequence
  Category: MG81 effectors
  Description: MG81-135 effector
MNNEEKEKDGATCCLTLPLKLEKWQSDHLEKRFEIARQLYNTLVHAELKRIHRIERMPEYREIERQIEATTDKKEKWALKNQKKQFLRKNGINRNTFTTDMKRLYKHFNDNIGSNVAQHGIVSQVLTAFEKVYIENQSGEVHFKKPGDLRSVQGYSQKESGGVEIMFRNGKIIWTQQENDDRKKSPKYQQRKKRQNYKGVKGIAREFPVVFSKNNPYEAEMLKKHVKFVRILRKDGKTKPHWYAQLVLEGTPVAKYDPISGAPKHPVGHGVVGIDIGTRTLAYSADSKVDLIELADRVQNIEQEKLLLQRKLDRSRRATNPENYKPDGTIKKGVKLTRNKSKRYRKIQHQLAMLQHRQADIRKRQHNELANYLLTLGDCFFVEDMDYRALTRKAKKTEISEKTGRYKRKKRFGKSIANKAPSMLIALLDQKCKSLNLEGVKKVDTAVKASRYNHQTDECKAKELKERWNIMPDGERIQRDLYSAFLLQHCRRDLPEYNRKKLQETFGNELYRVFDREALQRDYPKFVEYHRKTIQRLSALPKTIASMGIRRIIS

SEQ ID NO: 1858 - protein, 538 aa, Unknown
  Description of Unknown: uncultivated organism sequence
  Category: MG81 effectors
  Description: MG81-136 effector
MNNEEKEKDGATCCLTLPLKLEKWQSDHLEKRFEIARQLYNTLVHAELKKKCQVERMPEYQEIMKMIDAASNQKEKWALEKKRKAFLEENGFSRNAFKADMEKYYKHFNDNIGANVALHGITAQVWIAFDKVFVDNYKQKGKVHFKKPGELCSVQGYSQKKSGGKEIMFREDRIIWNQQGNRDRKKVKREFLLKLSPDNPYEAEMLKRHVKFVRILRKDGKTKPHWYAQLVLEGKPAVKRDPASGAPKHPIGHGVVGIDIGTRTLAYSTDKEVNLLELADHVQNIEQEKRRLQRKMDRSRRATNPENYNPDGTFKRGVKLTRNKSKRYRRIQHQLAMIQHHQADIRKQQHNELANYLLTLGDCFFVENMSYCDLVHRANKTEISEKTGRYKRKKRFGKSIANKAPAMLITMLKQKCQSRGLEGVKEVDTHVRASQYNHQTDTCIEKALENRWNVMPDGERIQRDLYSAFLLQHCKQGLPEYNRKELKKEFGEELYRVFDREALQRDYPQFVAYHHMTIQRLSELPHTIPSMGIRRIIS

SEQ ID NO: 1859 - protein, 522 aa, Unknown
  Description of Unknown: uncultivated organism sequence
  Category: MG81 effectors
  Description: MG81-137 effector
MKRSSTDTCCLTLPLKLEKWQSDRLEKRFEIGRQIYNTIVHAELKKLRKLERTQQYQEIEQKLENAKQEETKELWKKKRQLLDQNGLSENHFKADMKYYYPHFKDNIASSVAVHGIASQAWTAFEKVLLSKDGKMVHFKKKGELSSLRGYSQAGKSGGIEIIFRGSYVEWKGLKLPLQLSPNNEYETEMLSKRVKYVRILRKDGKTKTHWYAQLVLEGKPAIKRDPASGTPKHPVGHGVVGIDIGTRTLAYSTDKEVNLLELADHVQNIEQEKRRLQRKMDRSRRATNPENYNPDGTFKRGVKLTRNKSKRYRRIQHQLAMIQHHQADIRKQQHNELANYLLTLGDCFFVENMSYCDLVHRANKTEISEKTGRYKRKKRFGKSIANKAPAMLITMLKQKCQSRGLEGVKEVDTHVRASQYNHQTDTCIEKALENRWNVMPDGERIQRDLYSAFLLQHCKQGLPEYNRKELKKEFGEELYRVFDREALQRDYPQFVAYHHMTIQRLSELPHTIPSMGIRRIIS

SEQ ID NO: 1860 - protein, 538 aa, Unknown
  Description of Unknown: uncultivated organism sequence
  Category: MG81 effectors
  Description: MG81-138 effector
MDNEEKEKDGATCCLTLPLKLEKWQSDHLEKRFEIARQLYNTLVHAELKKKCQVERMPEYQEIMKMIDAASNQKEKWALEKKRKAFLEENGFNRNAFKADMEKYYKHFNDNIGANVALHGITAQVWIAFDKVFVDNYKQKGKVHFKKPGELCSVQGYSQKKSGGKEIMFREDRIIWNQQGNRDRKKVKREFLLKLSPDNPYEAEMLKRHVKFVRILRKDGKTKPHWYAQLVLEGKPAVKRDPASGAPKHPIGHGVVGIDIGTRTLAYSTDKEVNLLELADHVQNIEQEKRRLQRKMDRSRRATNPENYNPDGTFKRGVKLTRNKSKRYRRIQHQLAMIQHHQADIRKQQHNELANYLLTLGDCFFVENMSYCDLVHRANKTEISEKTGRYKRKKRFGKSIANKAPAMLITMLKQKCQSRGLEGVKEVDTHVRASQYNHQTDTCIEKALENRWNVMPDGERIQRDLYSAFLLQHCKQGLPEYNRKELKKEFGEELYRVFDREALQRDYPQFVAYHHMTIQRLSELPHTIPSMGIRRIIS

SEQ ID NO: 1861 - protein, 534 aa, Unknown
  Description of Unknown: uncultivated organism sequence
  Category: MG81 effectors
  Description: MG81-139 effector
MGWKSTGRGGKRVKRSSTDTCCLTLPLKLEKWQSDRLEKRFEIGRQIYNTIVHAELKKLRKLERTQQYQEIEQKLENAKQEETKELWKKKRQLLDQNGLSENHFKADMKHYYPHFKDNIASSVAVHGIASQAWTAFEKVLLSKDGKMVHFKKKGELSSLRGYSQAGKSGGIEIIFRGSYVEWKGLKLPLQLSPNNEYETEMLSKRVKYVRILRKDGKTKTHWYAQLALEGKPAVKRDSISGAPKHPVGHGVVGIDIGTRTLAYSTDSEVNLLELADRVQNIEQEKRRLQRKMDRSRRAMNPGNYKPDGSIKQGVKLTWNNSKRYKRIQHQYAMIQHHQADIRKQQHNELANYLLTLGDCFFVEDMDYRALTRKAKKTEISEKTGRYKRKKRFGKSIANKAPSMLIALLDQKCKSLNLEGVKKVDTAVKASQYNHQTDECKAKELKERWNIMPDGERIQRDLYSAFLLQHCRRDLPEYNRKKLQEAFGNELYRVFDREALQRDYPKFVEYHRKTIQRLSALPKTIASMGIRRIIS

SEQ ID NO: 1862 - protein, 512 aa, Unknown
  Description of Unknown: uncultivated organism sequence
  Category: MG81 effectors
  Description: MG81-140 effector
MPTKQKEDSNRCVLTLPLLTEPWQEHIIEKRFKIIEHLKNQLISIELRKLKNLQRTKAYKNLIKQIESVPKSERTVLYKERNKMLKDAGFSQYTFMDDMAGKKSLMQKHFESHINVQIAHKAAIDVWSSFEKFLFGTGQMIHYQKRGTLSSVASKSPKTGMFYYSDENIFKWSGGGTKPKGGIILCLRVASVKTNYEKEMVANNEIKYYRVVRKWMKTKYKYYLQITFAGKPADKHREISTGRVGIDIGTQTIAIASDKSVKLLELADKVNKNHIKKCELQRKLDRSRRYTNPDNFNPDGTVKRGTKGHKLKWNKSKHYLEIVGKIRELERKNADIRKYQHTCLANDILAMGNQIYIEPMNYKGLQKRAKETQVDEKGRYKKKKRFGKSLANKAPAMFVTILKTKVEQHGGEVYEVDIMSYRASQCDHTTGEYTKHGLNDRWRILGNGDKVQRDLYSAFLIKNSNKTHDEIDLDKCSKTYDSFKKLHDKEIENIRNEVKLRERRNISSYGIA

SEQ ID NO: 1863 - protein, 534 aa, Unknown
  Description of Unknown: uncultivated organism sequence
  Category: MG81 effectors
  Description: MG81-141 effector
MGWKSKGRGGKRVKRSSTDTCCLTLPLKLEKWQSDRLEKRFEIGRQIYNTIVHAELKKLRKLERTQQYQEIEQKLENAKQEETKELWKKKRQLLDQNGLSENHFKADMKHYYPHFKDNIASSVAVHGIASQAWTAFEKVLLSKDGKMVHFKKKGELSSLRGYSQAGKSGGIEIIFRGSYVEWKGLKLPLKLSPDNDYETEMLSKRVKYVRILRKDGKTKTHWYAQLALEGKPAVKRDSISGAPKHPVGHGVVGIDIGTRTLAYSADSKVDLIELADRVQNIEQEKMLLQRKLDRSRRATNPENYKPDGSIKQGVKLTWNNSKRYKRIQHQYAMIQHHQADIRKQQHNELANYLLTLGDCFFVEDMDYRALTRKAKKTEISEKTGRYKRKKRFGKSIANKAPSMLIALLDQKCKSLNLEGVKKVDTAVKASQYNHQTDECKAKELKERWNIMPDGERIQRDLYSAFLLQHCRRDLPEYNRKKLQEAFGNELYRVFDREALQRDYPKFVEYHRKTIQRLSALPKTIASMGIRRIIS

SEQ ID NO: 1864 - protein, 566 aa, Unknown
  Description of Unknown: uncultivated organism sequence
  Category: MG81 effectors
  Description: MG81-142 effector
MGWKSKGRGGTLVDNEEKKEDGATCCLTLPLKLEKWQSDHLEKRFEIARQLYNTLVHAELKRIHRIERMPEYREIERQIEATTDKKEKWALKNQKKQFLRKNGINRNTFTTDMKRLYKHFNDNIGSNVAQHGIVSQVLTAFEKVYIENQSGEVHFKKPGDLRSVQGYSQKESGGKEIMFRNGKIIWNQQENDDRKKSPKYQQRKKRQNYKGVKGIAREFPVVFSKNNPYEAEMLTKHVKFVRILRKDGKTKPHWYAQLVLEGTPVAKYDPISGAPKHPVGHGVVGIDIGTRTLAYSTDKEVNLLELADRVQNIEQEKRRLQRKMDRSRRAMNPENYNSDGTFKRGVKLTRNKSKRYRRIQHQLAMIQHHQADIRKQQHNELANYLLTLGDCFFVENMSYCDLVHRANKTEISEKTGRYKRKKRFGKSIANKAPAMLITMLKQKCQSRGLKGVKEVDTHVRASQYNHQTDTCIEKALENRWNVMPDGERIQRDLYSAFLLQHCKQGLPEYNRKELKKEFGEELYRVFDREALQRDYPQFVAYHHMTIQRLSELPHTIPSMGIRRIIS

SEQ ID NO: 1865 - protein, 550 aa, Unknown
  Description of Unknown: uncultivated organism sequence
  Category: MG81 effectors
  Description: MG81-143 effector
MGWKSKGRGVTLVDNEEKKEDGATCCLTLPLKLEKWQSDHLEKRFEIARQLYNTLVHAELKKKCQVERMPEYQEIMKMIDAASNQKEKWALEKKRKAFLEENGFSRNAFKADMEKYYKHFNDNIGANVALHGITAQVWIAFDKVFVDNYKQKGKVHFKKPGELCSVQGYSQKKSGGKEIMFREDRIIWNQQGNRDRKKVKREFLLKLSPDNPYEAEMLKRHVKFVRILRKDGKTKPHWYAQLVLEGKPAVKRDPASGAPKHPIGHGVVGIDIGTRTLAYSTDKEVNLLELADHVQNIEQEKRRLQRKMDRSRRATNPENYNPDGTFKRGVKLTRNKSKRYRRIQHQLAMIQHHQADIRKQQHNELANYLLTLGDCFFVENMSYCDLVHRANKTEISEKTGRYKRKKRFGKSIANKAPAMLITMLKQKCQSRGLEGVKEVDTHVRASQYNHQTDTCIEKALENRWNVMPDGERIQRDLYSAFLLQHCKQGLPEYNRKELKKEFGEELYRVFDREALQRDYPQFVAYHHMTIQRLSELPHTIPSMGIRRIIS

SEQ ID NO: 1866 - protein, 534 aa, Unknown
  Description of Unknown: uncultivated organism sequence
  Category: MG81 effectors
  Description: MG81-144 effector
MGWKSKGRGGTLVKRSSTDTCCLTLPLKLEKWQSDRLEKRFEIGRQIYNTIVHAELKKLRKLERTQQYQEIEQKLENAKQEETKELWKKKRQLLDQNGLSENHFKADMKYYYPHFKDNIASSVAVHGIASQAWTAFEKVLLSKDGKMVHFKKKGELSSLRGYSQAGKSGGIEIIFRGSYVEWKGLKLPLQLSPNNEYETEMLSKRVKYVRILRKDGKTKTHWYAQLALEGKPAVKRDSISGAPKHPVGHGVVGIDIGTRTLAYSTDSEVNLLELADRVQNIEQEKRRLQRKMDRSRRAMNPGNYKPDGSIKQGVKLTWNNSKRYKRIQHQYAMIQHHQADIRKQQHNELANYLLTLGDCFFVEDMDYRALTRKAKKTEISEKTGRYKRKKRFGKSIANKAPSMLIALLDQKCKSLNLEGVKKVDTAVKASQYNHQTDECKAKELKERWNIMPDGERIQRDLYSAFLLQHCRRDLPEYNRKKLQEAFGNELYRVFDREALQRDYPKFVEYHRKTIQRLSALPKTIASMGIRRIIS

SEQ ID NO: 1867 - protein, 427 aa, Unknown
  Description of Unknown: uncultivated organism sequence
  Category: MG81 effectors
  Description: MG81-145 effector
MKYYYQHFKENIGSSVAVHGIASQVWTAFEKVLFSKDGKMVHFKKKGELSSLRGYSQAGKSGGIEIIFRGSYVEWKGLKLPLKLSPDNDYETEMLSKRVKYVRILRKEGKTKPHWYAQLVLEGKPAIKRDPASGAPKHPVGHGVVGIDIGTRTLAYSADSKVDLIELADRVQNIEQEKMLLQRKLDRSRRATNPENYKPDGTIKKGVKLTRNKSKRYRKIQHQLAMLQHRQADIRKRQHNELANYLLTLGDCFFVEDMDYRALTRKAKKTEISEKTGRYKRKKRFGKSIANKAPSMLIALLDQKCKSLNLEGVKKVDTAVKASQYNHQTDECKAKELKERWNIMPDGERIQRDLYSAFLLQHCKRGLPEYNRKKLQEAFGNELYRVFDREALQRDYPKFVEYHRETIQRLSALPKTIASMGIRRIIS

SEQ ID NO: 1868 - protein, 534 aa, Unknown
  Description of Unknown: uncultivated organism sequence
  Category: MG81 effectors
  Description: MG81-146 effector
MGWKSKGRGGTRVKRSSTDTCCLTLPLKLEKWQSDRLEKRFEIGRQIYNTIVHAELKKLRKLERTQQYQEIEQKLENAKQEETKELWKKKRQLLDQNGLSEDHFKADMKYYYPHFKDNIASSVAVHGIASQAWTAFEKVLLSKDGKMVHFKKKGELSSLRGYSQAGKSGGIEIIFRGSYVEWKGLKLPLQLSPNNEYETEMLSKRVKYVRILRKDGKTKTHWYAQLALEGKPAVKRDSISGAPKHPVGHGVVGIDIGTRTLAYSTDSAVNLLELADRVQNIEQEKRRLQRKMDRSRRAMNPGNYKPDGSIKQGVKLTWNNSKRYKRIQHQYAMIQHHQADIRKQQHNELANYLLTLGDCFFVENMSYCDLAHRANKTEISEKTGRYKRKKRFGKSIANKAPAMLITMLKQKCQSRGLKGVKEVDTHVRASQYNHQTDTCIEKALENRWNVMPDGERIQRDLYSAFLLQHCKQGLPEYNRKELKKEFGEELYRVFDREALQRDYPQFVAYHHMTIQRLSELPHTIPSMGIRRIIS

SEQ ID NO: 1869 - protein, 538 aa, Unknown
  Description of Unknown: uncultivated organism sequence
  Category: MG81 effectors
  Description: MG81-147 effector
MDNEEKKEDGATCCLTLPLKLEKWQSDHLEKRFEIARQLYNTLVHAELKKKCQVERMPEYQEIMKMIDAASNQKEKWALEKKRKAFLEENGFSRNAFKADMEKYYKHFNDNIGANVALHGITAQVWIAFDKVFVDNYKQKGKVHFKKPGELCSVQGYSQKKSGGKEIMFREDRIIWNQQGNRDRKKVKREFLLKLSPDNPYEAEMLKRHVKFVRILRKDGKTKPHWYAQLVLEGKPAVKRDPASGAPKHPVGHGVVGIDIGTRTLAYSTDKEVNLLELADRVQNIEQEKRRLQRKMDRSRRATNPENYNPDGTFKRGVKLTRNKSKRYRRIQHQLAMIQHHQADIRKQQHNELANYLLTLGDCFFVENMSYCDLVHRANKTEISEKTGRYKRKKRFGKSIANKAPAMLITMLKQKCQSRGLEGVKEVDTHVRASQYNHQTDICIEKALENRWNVMPDGERIQRDLYSAFLLQHCKQGLPEYNRKELKKEFGEELYRVFDREALQRDYPQFVAYHHMTIQRLSELPHTIPSMGIRRIIS

SEQ ID NO: 1870 - protein, 480 aa, Unknown
  Description of Unknown: uncultivated organism sequence
  Category: MG81 effectors
  Description: MG81-148 effector
MPEYREIERLIEATTDKKEKWALKNQKKQFLRKNGINRNTFTTDMKRLYKHFNDNIGSNVAQHGIVSQVLTAFEKVYIENQSGEVHFKKPGDLRSVQGYSQKKSGGVEIMFREGKIIWNQQGNNDRKGVAREFPLKLSPDNSYEAEMLKKHVKFVRILRKEGKTKSHWYAQLVLEGKPTVKRDPISGAPKHPVGHGVVGIDIGTRTLAYSTDSEVNLLELADRVQNIEQEKRRLQRKMDRSRRAMNPENYNSDGTFKRGVKLTRNKSKRYRRIQHQLAMIQHHQADIRKQQHNELANYLLTLGDCFFVENMSYCDLVHRANKTEISEKTGRYKRKKRFGKSIANKAPAMLITMLKQKCQSRGLEGVKEVDTHVRASQYNHQTDTCIEKALENRWNVMPDGERIQRDLYSAFLLQHCKQGLPEYDRKELKKEFGEELYRVFDREALQRDYPQFVAYHHMTIQRLSELPHTIPSMGIRRIIS

SEQ ID NO: 1871 - protein, 534 aa, Unknown
  Description of Unknown: uncultivated organism sequence
  Category: MG81 effectors
  Description: MG81-149 effector
MGWKSKGRGGKRVKRSSTDTCCLTLPLKLEKWQSDRLEKRFEIGRQIYNTIVHAELKKLRKLERTQQYQEIEQKLENAKQEETKELWKKKRQLLDQNGLSENHFKADMKYYYPHFKDNIASSVAVHGIASQAWTAFEKVLLSKDGKMVHFKKKGELSSLRGYSQAGKSGGIEIIFRGSYVEWKGLKLPLQLSPNNEYETEMLSKRVKYVRILRKDGKTKTHWYAQLALEGKPAVKRDSISGAPKHPVGHGVVGIDIGTRTLAYSADSKVDLIELADRVQNIEQEKMLLQRKLDRSRRATNPENYKPDGSIKQGVKLTWNNSKRYKRIQHQYAMIQHHQADIRKQQHNELANYLLTLGDCFFVEDMDYRALTRKAKKTEISEKTGRYKRKKRFGKSIANKAPSMLIALLDQKCKSLNLEGVKKVDTAVKASQYNHQTDECKAKELKERWNIMPDGERIQRDLYSAFLLQHCRRDLPEYNRKKLQEAFGNELYRVFDREALQRDYPKFVEYHRKTIQRLSALPKTIASMGIRRIIS

SEQ ID NO: 1872 - protein, 548 aa, Unknown
  Description of Unknown: uncultivated organism sequence
  Category: MG81 effectors
  Description: MG81-150 effector
MEWKSTGRGGTLVDNEEKKEDGATCCLTLPLKLEKWQSDHLEKRFEIARQLYNTLVHAELKRIHRIERMPEYREIERQIEATTDKKEKWALKNQKKQFLRKNGINRNTFTTDMKRLYKHFNDNIGSNVAQHGIVSQVLTAFEKVYIENQSGEVHFKKPGDLRSVQGYSQKKSGGVEIMFREGKIIWNQQGNNDRKGVAREFPLKLSPDNSYEAEMLKKHVKFVRILRNEGKTKPHWYAQLVLEGKPAIKRDPASGAPKHPVGHGVVGIDIGTRTLAYSTDSKVDLIELADRVQNTEQEKMLLQRKLDRSRRATNPENYKPDGTIKKGVKLTRNKSKRYRKIQHQLAMLQHRQADIRKRQHNELANYLLTLGDCFFVEDMDYRALTRKAKKTEISEKTGRYKRKKRFGKSIANKAPSMLIALLDQKCKSLNLEGVKKVDTAVKASQYNHQTDECKAKELKERWNIMPDGERIQRDLYSAFLLQHCRRDLPEYNRKKLQEAFGNEVYRVFDREALQRDYPKFVEYHRETIQRLSALPKTIASMGIRRIIS

SEQ ID NO: 1873 - protein, 538 aa, Unknown
  Description of Unknown: uncultivated organism sequence
  Category: MG81 effectors
  Description: MG81-151 effector
MNNEEKEKEGATCCLTLPLKLEKWQSDHLEKRFEIARQLYNTLVHAELKKKCQVERMPEYQEIMKMIDTASNQKEKWALEKKRKAFLEENGFSRNAFKADMEKYYKHFNDNIGANVALHGITAQVWIAFDKVFVDNYKQKGKVHFKKPGELCSVQGYSQKKSGGKEIMFREDRIIWNQQGNRDRKKVKREFLLKLSPNNPYEAEMLKRHVKFVRILRKDGKTKPHWYAQLVLEGKPAVKRDPISSAPKHPVGHGVVGIDIGTRTLAYSTDKEVNLLELADRVQNIEQEKRRLQRKMDRSRRAMNPENYNSDGTFKRGVKLTRNKSKRYRRIQHQLAMIQHHQADIRKQQHNELANYLLTLGDCFFVENMSYCDLAHRANKTEISEKTGRYKRKKRFGKSIANKAPAMLITMLKQKCQSRGLEGVKEVDTHVCASQYNHQTDTCIKKALENRWNIMPDGERIQRDLYSAFLLQHCRRDLPEYNRKELQKEFGEELYRVFDREALQRDYPQFVAYHHMTIQRLSELPHTIPSMGIRRIIS

SEQ ID NO: 1874 - protein, 534 aa, Unknown
  Description of Unknown: uncultivated organism sequence
  Category: MG81 effectors
  Description: MG81-152 effector
MGWKSKGRGGKRVKRSSTDTCCLTLPLKLEKWQSDRLEKRFEIGRQIYNTIVHAELKKLRKLERTQQYQEIEQKLENAKQEETKELWKKKRQLLDQNGLSENHFKADMKHYYPHFKDNIASSVAVHGIASQAWTAFEKVLLSKDGKMVHFKKKGELSSLRGYSQAGKSGGIEIIFRGSYVEWKGLKLPLQLSPNNEYETEMLSKRVKYVRILRKDGKTKTHWYAQLALEGKPAVKRDSISGAPKHPVGHGVVGIDIGTRTLAYSTDSEVNLLELADRVQNIEQEKRRLQRKMDRSRRAMNPGNYKPDGSIKQGVKLTWNNSKRYKRIQHQYAMIQHHQADIRKQQHNELANYLLTLGDCFFVEDMDYRALTRKAKKTEISEKTGRYKRKKRFGKSIANKAPSMLIALLDQKCKSLNLEGVKKVDTAVKASQYNHQTDECKAKELKERWNIMPDGERIQRDLYSAFLLQHCRRDLPEYNRKKLQEAFGNELYRVFDREALQRDYPKFVEYHRKTIQRLSALPKTIASMGIRRIIS

SEQ ID NO: 1875 - protein, 534 aa, Unknown
  Description of Unknown: uncultivated organism sequence
  Category: MG81 effectors
  Description: MG81-153 effector
MGWKSKGRGGKRVKRSSTDTCCLTLPLKLEKWQSDRLEKRFEIGRQIYNTIVHAELKKLRKLERTQQYQEIEQKLENAKQEETKELWKKKRQLLDQNGLSENHFKADIKHYYPHFKDNIASSVAVHGIASQAWTAFEKVLLSKDGKMVHFKKKGELSSLRGYSQTGKSGGIEIIFRGSYVEWKGLKLPLKLSPDNDYETEMLSKRVKYVRILRQDGKTKPHWYAQLVLEGKPAVKRDPISGAPKHPIGRGVVGIDIGTRTLAYSADSKVDLIELADRVQNIEQEKLLLQRKLDRSRRATNPENYKPDGTIKKGVKLTRNKSKRYRRIQHQLAMIQHHQADIRKQQHNELANYLLTLGDCFFVEDMDYRALTRKAKKTEISEKTGRYKRKKRFGKSIANKAPAMLITMLKQKCQSRGLKGVKEVDTHVRASQYNHQTDTCIEKALENRWNVMPDGERIQRDLYSAFLLQHCKQGLPEYNRKELKKEFGEELYRVFDREALQRDYPQFVAYHHMTIQRLSELPHTIPSMGIRRIIS

SEQ ID NO: 1876 - protein, 550 aa, Unknown
  Description of Unknown: uncultivated organism sequence
  Category: MG81 effectors
  Description: MG81-154 effector
MGWKSKGRGGTLVDNEEKKEDGATCCLTLPLKLEKWQSDHLEKRFEIARQLYNTLVHAELKKKCQVERMPEYQEIMKMIDAASNQKEKWALEKKRKAFLEENGFSRNAFKADMEKYYKHFNDNIGANVALHGITAQVWIAFDKVFVDNYKQKGKVHFKKPGELCSVQGYSQKKSGGKEIMFREDRIIWNQQGNRDRKKVKREFLLKLSPDNPYEAEMLKRHVKFVRILRKDGKTKPHWYAQLVLEGKPAVKRDPASGAPKHPIGHGVVGIDIGTRTLAYSTDKEVNLLELADHVQNIEQEKRRLQRKMDRSRRATNPENYNPDGTFKRGVKLTRNKSKRYRRIQHQLAMIQHHQADIRKQQHNELANYLLTLGDCFFVENMSYCDLVHRANKTEISEKTGRYKRKKRFGKSIANKAPAMLITMLKQKCQSRGLEGVKEVDTHVRASQYNHQTDTCIEKALENRWNVMPDGERIQRDLYSAFLLQHCKQGLPEYNRKELKKEFGEELYRVFDREALQRDYPQFVAYHHMTIQRLSELPHTIPSMGIRRIIS

SEQ ID NO: 1877 - protein, 538 aa, Unknown
  Description of Unknown: uncultivated organism sequence
  Category: MG81 effectors
  Description: MG81-155 effector
MDNEEKEKDGATCCLTLPLKLEKWQSDHLEKRFEIARQLYNTLVHAELKKKCQVERMPEYQEIMKMIDAASNQKEKWALEKKRKAFLEENGFSRNTFKADMEKYYKHFNDNIGANVALHGITAQVWIAFDKVFVDNYKQKGKVHFKKPGELCSVQGYSQKKSGGKEIMFREDRIIWNQQGNRDRKKVKREFLLKLSPNNPYEAEMLKRHVKFVRILRKDGKTKPHWYAQLVLEGKPAVKRDPISSAPKHPVGHGVVGIDIGTRTLAYSTDKEVNLLELADRVQNIEQEKRRLQRKMDRSRRAMNPENYNSDGTFKRGVKLTRNKSKRYRRIQHQLAMIQHHQADIRKQQHNELANYLLTLGDCFFVENMSYCDLAHRANKTEISEKTGRYKRKKRFGKSIANKAPAMLITMLKQKCQSRGLEGVKEVDTHVCASQYNHQTDTCIKKALENRWNIMPDGERIQRDLYSAFLLQHCRRDLPEYNRKELQKEFGEELYRVFDREALQRDYPQFVAYHHMTIQRLSELPHTIPSMGIRRIIS

SEQ ID NO: 1878 - protein, 534 aa, Unknown
  Description of Unknown: uncultivated organism sequence
  Category: MG81 effectors
  Description: MG81-156 effector
MGWKSKGRGGKRVKKSSTDTCCLTLPLKLEKWQSDRLEKRFEIGRQIYNTVVRAELKKLHQVERTPQYREIEQKLKEAKQEEAKELWKKRTQLLSKSGFSEYGFKSDMKYYYQHFKENIGSSVAVHGIASQVWTAFEKVLFSKDGKMVHFKKKGELSSLRGYSQAGKSGGIEIIFRGSYVEWKGLKLPLKLSSNNDYETEMLSRRVKYVRILRQDGKTKPHWYAQLVLEGKPAVKRDPISGASKHPIGHGAVGIDIGTRTLAYSADSKVDLIELADRVQNIEQEKLLLQRKLDRSRRATNPENYKPDGTIKKGVKLTRNKSKRYRKIQHQLAMLQHRQADIRKRQHNELANYLLTLGDCFFVEDMDYRALTRKAKKTEISEKTGRYKRKKRFGKSIANKAPSMLIALLDQKCKSLNLEGVKKVDTAVKASQYNHQTDECKAKELKERWNIMPDGEQIQRDLYSAFLLQHCRRDLPEYNRKKLQEAFGNELYRVFDREALQRDYPKFVEYHRKTIQRLSALPKTIASMGIRRIIS

SEQ ID NO: 1879 - protein, 511 aa, Unknown
  Description of Unknown: uncultivated organism sequence
  Category: MG81 effectors
  Description: MG81-157 effector
MAKCSTDTCCLTLPLRLEKWQEDRLAKRFEIARQIYNTMVRAELKKLRAMEQSEPYKANQEKIQALDWKTQADKQALKALYKERDKLLRDGGFSEYGFKSDIKNYYKHFNNNIGSSVAVHGIAPQVWTAFEKMLFKKEGKKVHFKKKGDIRSLRGYSVTGKSGGVEIIFRETYIEWKGLKLPLKLSPDNIYETQMLSYRVKYVRLLRKPGKRKDRWYAQLSLEGKPVIKYNPKTGEVRHPIGKGAVGLDIGPQTLAYSAATGADLVELANQVQNVEQEKRRLQRKLNRSRRATNPGNYADDGTIRRGIALTHNKSKRYLRTQQELKYLQHQQAEIRKRQHTELANHLLSLGDCFYVEKMVWTSLTHRAKETEISEKTGKIKRKKRFGKSVANKAPATLIGILQRKSAALGIPGVIEVPTSVKASQYNHQSGTYTPKPLSQRWNNMPDGERIQRDLYSAFLLQHYDPQTNTFDANSLHQDYPQFVQYHHDAVLRLYAMPKTPSSMGIKRSLR

SEQ ID NO: 1880 - protein, 522 aa, Unknown
  Description of Unknown: uncultivated organism sequence
  Category: MG81 effectors
  Description: MG81-158 effector
MKKSSTDTCCLTLPLKLEKWQSDRLEKRFEIGRQIYNTVVRAELKKLQQVERTPQYREIEQKLKEAKQEEAKELWKTRTQLLSKSGFSEYGFKSDMKYYYQHFKENIGSSVAVHGIASQVWTAFEKVLFSKDGKMVHFKKKGELSSLRGYSQAGKSGGIEIIFRGSYVEWKGLKLPLKLSPDNDYETEMLSKRVKYVRILRKEGKTKPHWYAQLVLEGKPAIKRDPASGAPKHPVGHGVVGIDIGTRTLAYSADSKVDLIELADRVQNIEQEKMLLQRKLDRSRRATNPENYKPDGTIKKGVKLTRNKSKRYRKIQHQLAMLQHRQADIRKRQHNELANYLLTLGDCFFVEDMDYRALTRKAKKTEISEKTGRYKRKKRFGKSIANKAPSMLIALLDQKCKSLNLEGVKKVDTAVKASQYNHQTDECKAKELKERWNIMPDGERIQRDLYSAFLLQHCRRDLPEYNRKKLQETFGNELYRVFDREALQRDYPQFVAYHHMTIQRLSALPKTIASMGIRRSIS

SEQ ID NO: 1881 - protein, 511 aa, Unknown
  Description of Unknown: uncultivated organism sequence
  Category: MG81 effectors
  Description: MG81-159 effector
MAKCSTDTCCLTLPLRLEKWQEDRLAKRFEIARQIYNTMVRAELKKLRAMEQSEPYKANQEKIQALDWKTQADKQALKALYKERDKLLQDGGFSERGFKSDIKNYYKHFNNNIGSNVAFHGIAPQVWAAFEKMLFKKEGKKVHFKKKGDIHSLRGYSVTGKSGGVEIIFRETYIEWKGLKLPLKLSPDNIYETQMLSYRVKYVRLLRKPGKRKDRWYAQLSLEGKPVIKYNPKTGEVRHPIGKGAVGLDIGPQTLAYSAATGADLVELANQVQNVEQEKRRLQRKLDRSRRATNPGNYADDGTIRRGIALTHNKSKRYLRTQQELKYLQHQQAEIRKRQHTELANHLLSLGDCFYVEKMVWTSLTHRAKETEISEKTGKIKRKKRFGKSVANKAPATLIEILQRKSAALGIPGVIEVPTSVKASQYNHQSGTYTPKPLSQRWNNMPDGERIQRDLYSAFLLQHYDPQTNTFDANSLHQDYPQFVQYHHDAVLRLYAMPKTPSSMGIKRSLR

SEQ ID NO: 1882 - protein, 538 aa, Unknown
  Description of Unknown: uncultivated organism sequence
  Category: MG81 effectors
  Description: MG81-160 effector
MNNEEKEKEGATCCLTLPLKLEKWQSDHLEKRFEIARQLYNTLVHAELKKKCQVERMPEYQEIMKMIDAASNQKEKWALEKKRKAFLEENGFSRNAFKADMEKYYKHFNDNIGANVALHGITAQVWIAFDKVFVDNYKQKGKVHFKKPGELCSVQGYSQKKSGGKEIMFREDRIIWNQQGNRDRKKVKREFLLKLSPDNPYEAEMLKRHVKFVRILRKDGKTKPHWYAQLVLEGKPAVKRDPASGAPKHPIGHGVVGIDIGTRTLAYSTDKEVNLLELADRVQNIEQEKRRLQRKMDRSRRATNPENYNPDGTFKRGVKLTRNKSKRYKRIQHQYAMIQHHQADIRKQQHNELANYLLTRGDCFFVENMSYCDLVHRANKTEISEKTGRYKRKKRFGKSIANKAPAMLITMLKQKCQSRGLEGVKEVDTHVRASQYNHQTDTCIEKALENRWNVMPDGERIQRDLYSAFLLQHCKQGLPEYNRKELKKEFGEELYRVFDREALQRDYPQFVAYHHMTIQRLSELPHTIPSMGIRRIIS

SEQ ID NO: 1883 - protein, 538 aa, Unknown
  Description of Unknown: uncultivated organism sequence
  Category: MG81 effectors
  Description: MG81-161 effector
MNNEEKEKDGATCCLTLPLKLEKWQSDHLEKRFEIARQLYNTLVHAELKKKCQVERMPEYQEIMKMIDTASNQKEKWALEKKRKAFLEENGFSRNAFKADMEKYYKHFNDNIGANVALHGITAQVWIAFDKVFVDNYKQKGKVHFKKPGELCSVQGYSQKKSGGKEIMFREDRIIWNQQGNRDRKKVKREFLLKLSPDNPYEAEMLKRHVKFVRILRKDGKTKPHWYAQLVLEGKPAVKRDPASGAPKHPIGHGVVGIDIGTRTLAYSTDKEVNLLELADRVQNIEQEKRRLQRKMDRSRRAMNPENYNSDGTFKRGVKLTRNKSKRYRRIQHQLAMIQHHQADIRKQQHNELANYLLTLGDCFFVENMSYCDLVHRANKTEISEKTGRYKRKKRFGKSIANKAPAMLITMLKQKCQSRGLEGVKEVDTHVRASQYNHQTDTCIEKALENRWNVMPDGERIQRDLYSAFLLQHCKQGLPEYNRKELKKEFGEELYRVFDREALQRDYPQFVAYHHMTIQRLSELPHTIASMGIRRSIS

SEQ ID NO: 1884 - protein, 538 aa, Unknown
  Description of Unknown: uncultivated organism sequence
  Category: MG81 effectors
  Description: MG81-162 effector
MDNEEKEKDGATCCLTLPLKLEKWQSDHLEKRFEIARQLYNTLVHAELKKKCQVERMPEYQEIMKMIDTASNQKEKWALEKKRKAFLEENGFSRNAFKADMEKYYKHFNDNIGANVALHGITAQVWIAFDKVFVDNYKQKGKVHFKKPGELCSVQGYSQKKSGGKEIMFREDRIIWNQQGNRDRKKVKREFLLKLSPNNPYEAEMLKRHVKFVRILRKDGKTKPHWYAQLVLEGKPAVKRDPISSAPKHPVGHGVVGIDIGTRTLAYSTDKEVNLLELADRVQNIEQEKRRLQRKMDRSRRAMNPENYNSDGTFKRGVKLTRNKSKRYRRIQHQLAMIQHHQADIRKQQHNELANYLLTLGDCFFVENMSYCDLVHRANKTEISEKTGWYKRKKRFGKSIANKAPAMLITMLKQKCQSRGLEGVKEVDTHVRASQYNHQTDTCIEKALENRWNVMPDGERIQRDLYSAFLLQHCKQGLPEYNRKELKKEFGEELYRVFDREALQRDYPQFVAYHHMTIQRLSELPHTIPSMGIRRIIS

SEQ ID NO: 1885 - protein, 536 aa, Unknown
  Description of Unknown: uncultivated organism sequence
  Category: MG81 effectors
  Description: MG81-163 effector
MDNEEKEKDGATCCLTLPLKLEKWQSDHLEKRFEIARQLYNTLVHAELKRIHRIERMPEYREIERLIEATTDKKEKWALKNQKKQFLRKNGINRNTFTTDMKRLYKHFNDNIGSNVAQHGIVSQVLTAFEKVYIENQSGEVHFKKPGDLRSVQGYSQKKSGGVEIMFREGKIIWNQQGNNDRKGVAREFPLKLSPDNSYEAEMLKKHVKFVRILRKDGKTKPHWYAQLVLEGTPVAKYDPISGAPKHPVGHGVVGIDIGTRTLAYSTDKEVNLLELADRVQNIEQEKRRLQRKMDRSRRAMNPENYNSDGTFKRGVKLTRNKSKRYRRIQHQLAMIQHHQADIRKQQHNELANYLLTLGDCFFVENMSYCDLVHRANKTEISEKTGRYKRKKRFGKSIANKAPAMLITMLKQKCQSRGLKGVKEVDTHVRASQYNHQTDTCIEKALENRWNVMPDGERIQRDLYSAFLLQHCKQGLPEYNRKELKKEFGEELYRVFDREALQRDYPQFVAYHHMTIQRLSELPHTIPSMGIRRIIS

SEQ ID NO: 1886 - protein, 550 aa, Unknown
  Description of Unknown: uncultivated organism sequence
  Category: MG81 effectors
  Description: MG81-164 effector
MGWKSKGRGGTLVDNEEKKEDGATCCLTLPLKLEKWQSDHLEKRFEIARQLYNTLVHAELKKKCQVERMPEYQEIMKMIDTASNQKEKWALEKKRKAFLEENGFSRNAFKADMEKYYKHFNDNIGANVALHGITAQVWIAFDKVFVDNYKQKGKVHFKKPGELCSVQGYSQKKSGGKEIMFREDRIIWNQQGNRDRKKVKREFLLKLSPNNPYEAEMLKRHVKFVRILRKDGKTKPHWYAQLVLEGKPAVKRDPISSAPKHPVGHGVVGIDIGTRTLAYSTDKEVNLLELADRVQNIEQEKRRLQRKMDRSRRAMNPENYNSDGTFKRGVKLTRNKSKRYRRIQHQLAMIQHHQADIRKQQHNELANYLLTLGDCFFVENMSYCDLAHRANKTEISEKTGRYKRKKRFGKSIANKAPAMLITMLKQKCQSRGLEGVKEVDTHVCASQYNHQTDTCIKKALENRWNIMPDGERIQRDLYSAFLLQHCRRDLPEYNRKELQKEFGEELYRVFDREALQRDYPQFVAYHHMTIQRLSELPHTIPSMGIRRIIS

SEQ ID NO: 1887 - protein, 534 aa, Unknown
  Description of Unknown: uncultivated organism sequence
  Category: MG81 effectors
  Description: MG81-165 effector
MVRKSKGRGGTLVKKSSTDTCCLTLPLKLEKWQSDRLEKRFEIGRQIYNTVVRAELKKLQQVERTPQYREIEQKLKEAKQEEAKELWKTRTQLLSKSGFSEYGFKSDMKYYYQHFKENIGSSVAVHGIASQVWTAFEKVLFSKDGKMVHFKKKGELSSLRGYSQAGKSGGIEIIFRGSYVEWKGLKLPLKLSPDNDYETEMLSKRVKYVRILRKEGKTKPHWYAQLVLEGKPAIKRDPASGAPKHPVGHGVVGIDIGTRTLAYSTDKEVNLLELADRVQNIEQEKRRLQRKMDRSRRAMNPENYNSDGTFKRGVKLTRNKSKRYRRIQHQLAMIQHHQADIRKQQHNELANYLLTLGDCFFVENMSYCDLVHRANKTEISEKTGRYKRKKRFGKSIANKAPAMLITMLKQKCQSRGLKGVKEVDTHVRASQYNHQTDTCIEKALENRWNVMLDGERIQRDLYSAFLLQHCKQGLPEYNRKELKKEFGEELYRVFDREALQRDYPQFVAYHHMTIQRLSELPHTIPSMGIRRIIS

SEQ ID NO: 1888 - protein, 512 aa, Unknown
  Description of Unknown: uncultivated organism sequence
  Category: MG81 effectors
  Description: MG81-166 effector
MPTKQKEDSNRCVLTLPLLTEPWQEHIIEKRFKIIEHLKNQLISIELRKLKKLQRTKAYKNLIKQIESVPKSERTALYKERNKMLKDAGFSQYTFMDDMAGKKSLMQKHFESHINVQIAHKAAIDVWSSFEKFLFGTGQIVHYQKRGTLSSVASKSPKTGMFYYSDENIFKWSGGGTKPKGGIILCLRVASVKTNYEKEMVANNEIKYYRVVRKWMKTKYKYYLQITFAGKPADKHREISTGRVGIDIGTQTIAIASDKSVKLLELADKVNKNHIKKCELQRKLDRSRRYTNPDNFNPDGTVKRGTKGHKLKWNKSKHYIDIAGKIRELERKNADIRKYQHTCLANDILAMGNQIYIEPMNYKGLQKRAKETQVDEKGRYKKKKRFGKSLANKAPAMFVTILKTKAEQHGGEVYEVDIMSYRASQCDHTTGEYTKHGLNDRWRILGNGDKVQRDLYSAFLIKNSNKTHDEIDLDKCSKTYDNFKKLHDKEIENIRNEVILRKRRNISSYGIA

SEQ ID NO: 1889 - protein, 427 aa, Unknown
  Description of Unknown: uncultivated organism sequence
  Category: MG81 effectors
  Description: MG81-167 effector
MKYYYQHFKENIGSSVAVHGIASQVWTAFEKVLFSKDGKMVHFKKKGELSSLRGYSQAGKSGGIEIIFRGSYVEWKGLKLPLKLSPDNDYETEMLSKRVKYVRILRKEGKTKPHWYAQLVLEGKPAIKRDPASGAPKHPVGHGVVGIDIGTRTLAYSADSKVDLIELADRVQNIEQEKMLLQRKLDRSRRATNPENYKPDGTIKKGVKLTRNKSKRYRKIQHQLAMLQHHQADIRKQQHNELANYLLTLGDCFFVENMSYCDLAHRANKTEISEKTGRYKRKKRFGKSIANKAPAMLITMLKQKCQSRGLEGVKEVDTHVCASQYNHQTDTCIKKALENRWNIMPDGERIQRDLYSAFLLQHCRRDLPEYNRKELQKEFGEELYRVFDREALQRDYPQFVAYHHMTIQRLSELPHTIPSMGIRRIIS

SEQ ID NO: 1890 - protein, 538 aa, Unknown
  Description of Unknown: uncultivated organism sequence
  Category: MG81 effectors
  Description: MG81-168 effector
MNNEEKEKEGATCCLTLPLKLEKWQSDHLEKRFEIARQLYNTLVHAELKKKCQVERMPEYQEIMKMIDTASNQKEKWALEKKRKAFLEENGFSRNAFKADMEKYYKHFNDNIGANVALHGITAQVWIAFDKVFVDNYKQKGKVHFKKPGELCSVQGYSQKKSGGKEIMFREDRIIWNQQGNRDRKKVKREFLLKLSPDNPYEAEMLKRHVKFVRILRKDGKTKPHWYAQLVLEGKPAVKRDPISSAPKHPVGHGVVGIDIGTRTLAYSTDKEVNLLELADHVQNIEQEKRRLQRKMDRSRRATNPENYNPDGTFKRGVKLTRNKSKRYRRIQHQLAMIQHHQADIRKQQHNELANYLLTLGDCFFVENMSYCDLVHRANKTEISEKTGRYKRKKRFGKSIANKAPAMLITMLKQKCQSRGLEGVKEVDTHVCASQYNHQTDTCIKKALENRWNIMPDGERIQRDLYSAFLLQHCRRDLPEYNRKELQKEFGEELYRVFDREALQRDYPQFVAYHHMTIQRLSELPHTIPSMGIRRIIS

SEQ ID NO: 1891 - protein, 529 aa, Unknown
  Description of Unknown: uncultivated organism sequence
  Category: MG81 effectors
  Description: MG81-169 effector
MILLANNNNNNTDTCVLTLPLRVEKWQEDCLLKRFEAARRIYNSLLNFELKKLRQLERTVEYRQIQSVISSAYRSNTKDSPECKDAFKRREKLISANGISEYGFKSDVKFFYKHFDGLIGSSVAVHCIAVQLWAAFDKYLSGSGKEIHFKRLGDISSLKGYSVKGKSGGREIIFRGQYVEWTRKKKKLLLPLKIDPDNEYEREMLSRRVKYVRIIKKPGKNRLRWYAQLTLEGKPALKYSAETGKPIHSVGKGDVGIDIGPQTVAYASDKEVALLELADRVTNIEHQKKKLQRKLDRSRRATNPDNYKPDGTIKRGVKLTRNKSKRYLKLQSKLAYIQHRQAEIRKLQHTCLANHMLTLGDRFFVEKMNWPGLAHRAKETSISEKTGRYKRKKRFGKSLANKAPAMFISILKRKCETLGLPGVVEVDTYNLKASQYNHLSDTYEKKSLSERWNYMPISDGSDSSKTKRIQRDLYSAFLLQHTIPQPCSFDKEALRIDYPNFVTMHDAEIHRLESLPKTVTSMGVRRSHS

SEQ ID NO: 1892 - protein, 534 aa, Unknown
  Description of Unknown: uncultivated organism sequence
  Category: MG81 effectors
  Description: MG81-170 effector
MGWKSKGRGRTRVKRSSTDTCCLTLPLKLEKWQSDRLEKRFEIGRQIYNTVVRAELKKLQQVERTPQYREIEQKLKGAKQEEAKELWKKRTQLLSQSGFSEYGFKSDMKYYYQHFKENIGSSVAVHGIASQVWTAFEKVLFSKDGKMVHFKKKGELSSLRGYSQAGKSGGVEIIFRGSYVEWKGLKLPLKLSPDNDYETEMLSKRVKYVRILRQDGKTKPHWYAQLVLEGKPAIKRDPASGAPKHPIGHGVVGIDIGTRTLAYSADSKVDLIELADRVQNIEQEKMLLQRKLDRSRRATNPGNYNPDGTIKCGVKLTRNKSKRYRKIQHQLAMIQHHQADIRKQQHNELANYLLTLGDCFFVENMSYCDLVHRANKTEISEKTGRYKRKKRFGKSIANKAPAMLITMLKQKCQSRGLKGVKEVDTHVRASQYNHQTDTCIEKALENRWNVMPDGERIQRDLYSAFLLQHCKQGLPEYNRKELKKEFGEELYRVFDREALQRDYPQFVAYHHMTIQRLSELPHTIPSMGIRRIIS

SEQ ID NO: 1893 - protein, 512 aa, Unknown
  Description of Unknown: uncultivated organism sequence
  Category: MG81 effectors
  Description: MG81-171 effector
MAKCSTDTCCLTLPLRLEKWQEDRLAKRFEIARQIYNTMVRAELKKLRAIEQSEPYKANQEKIQALDWKTQADKQALKALYKERDKLLRNGGFSEYGFKYDIKNYYMHFNNNIGSNVAVHGIAPQVWAAFEKMLFKKEGKKVHFKKKGDIRSLRGYSVTRKSGGVEIIFRETYIEWKGLKLPLKLSPDNIYETQMLSYRVKYVRLLRKPGKRKDRWYAQLSLEGKPVIKYNPKTGEVRHPIGKGAVGLDIGPQTLAYSAATGADLVELANQVQNVEQEKRRLQRKLDRSRRATNPGNYADDGTIRHGIALTHNKSKRYLRTQQELKYLQHQQAEIRKRQHTELANHLLSLGDCFYVEKMVWTSLTHRAKETEISEKTGKIKRKKRFGKSVANKPPATLIGILQLKSAALGIPGVIEVPTSVKASQYNHQSGTYTPKPLSQRWNNMPDGERIQRDLYSAFLLQHYDPQTNTFDANSLHQDYPQFVQYHHDAVLRLYAMPKTPSSMGIKRRSLR

SEQ ID NO: 1894 - protein, 534 aa, Unknown
  Description of Unknown: uncultivated organism sequence
  Category: MG81 effectors
  Description: MG81-172 effector
MGWKSKGRGGTLVKKSSTDTCCLTLPLKLEKWQSDRLEKRFEIGRQIYNTVVRAELKKLQQVERTPQYREIEQKLKEAKQEEAKELWKTRTQLLSKSGFSEYGFKSDMKYYYQHFKENIGSSVAVHGIASQVWTAFEKVLFSKDGKMVHFKKKGELSSLRGYSQAGKSGGIEIIFRGSYVEWKGLKLPLKLSPDNDYETEMLSKRVKYVRILRKEGKTKPHWYAQLVLEGKPAIKRDPASGAPKHPVGHGVVGIDIGTRTLAYSADSKVDLIELADRVQNIEQEKMLLQRKLDRSRRATNPENYKPDGTIKKGVKLTRNKSKRYRKIQHQLAMLQHRQADIRKRQHNELANYLLTLGDCFFVEDMDYRALTRKAKKTEISEKTGRYKRKKRFGKSIANKAPSMLIALLDQKCKSLNLEGVKKVDTAVKASQYNHQTDECKAKELKERWNIMPDGERIQRDLYSAFLLQHCRRDLPEYNRKKLQETFGNELYRVFDREALQRDYPKFVEYHRETIQRLSALPKTIASMGIRRIIS

SEQ ID NO: 1895 - protein, 522 aa, Unknown
  Description of Unknown: uncultivated organism sequence
  Category: MG81 effectors
  Description: MG81-173 effector
MKRSSTDTCCLTLPLKLEKWQSDRLEKRFEIGRQIYNTIVHAELKKLRKLERTQQYQEIEQKLENAKQEETKELWKKKRQLLDQNGLSENHFKADMKYYYPHFKDNIASSVAVHGIASQAWTAFEKVLLSKDGKMVHFKKKGELSSLRGYSQAGKSGGIEIIFRGSYVEWKGLKLPLQLSPNNEYETEMLSKRVKYVRILRKDGKTKTHWYAQLVLEGKPAIKRDPASGTPKHPVGHGVVGIDIGTRTLAYSTDKEVNLLELADHVQNIEQEKRRLQRKMDRSRRATNPENYNPDGTFKRGVKLTRNKSKRYRRIQHQLAMIQHHQADIRKQQHNELANYLLTLGDCFFVENMSYCDLVHRANKTEISEKTGRYKRKKRFGKSIANKAPAMLITMLKQKCQSRGLEGVKEVDTHVRASQYNHQTDTCIEKALENRWNVMPDGERIQRDLYSAFLLQHCKQGLPEYDRKELKKEFGEELYRVFDREALQRDYPQFVAYHHMTIQRLSELPHTIPSMGIRRIIS

SEQ ID NO: 1896 - protein, 522 aa, Unknown
  Description of Unknown: uncultivated organism sequence
  Category: MG81 effectors
  Description: MG81-174 effector
MKRSSTDTCCLTLPLKLEKWQSDRLEKRFEIGRQIYNTIVHAELKKLRKLERTQQYQEIEQKLENAKQEETKELWKKKRQLLDQNGLSENHFKADMKYYYPHFKDNIASSVAVHGIASQAWTAFEKVLLSKDGKMVHFKKKGELSSLRGYSQAGKSGGIEIIFRGSYVEWKGLKLPLQLSPNNEYETEMLSKRVKYVRILRKDGKTKAHWYAQLALEGKPAVKRDSISGAPKHPVGHGVVGIDIGTRTLAYSTDSEVNLLELADRVQNIEQEKRRLQRKMDRSRRAMNPGNYKPDGSIKQGVKLTWNNSKRYKRIQHQYAMIQHHQADIRKQQHNELANYLLTLGDCFFVENMSYCDLAHRANKTEISEKTGRYKRKKRFGKSIANKAPAMLITMLKQKCQSRGLEGVKEVDTHVCASQYNHQTDTCIKKALENRWNIMPDGERIQRDLYSAFLLQHCRRDLPEYNRKELQKEFGEELYRVFDREALQRDYPQFVAYHHMTIQRLSELPHTIPSMGIRRIIS

SEQ ID NO: 1897 - protein, 534 aa, Unknown
  Description of Unknown: uncultivated organism sequence
  Category: MG81 effectors
  Description: MG81-175 effector
MGWKSKGRGGTRVKKSSTDTCCLTLPLKLEKWQSDRLEKRFEIGRQIYNTVVRAELKKLQQVERTPQYREIEQKLKGAKQEEAKELWKKRTQLLSKSGFSEYGFKSDMKYYYQHFKENIGSSVAVHGIASQVWTAFEKVLFSKDGKMVHFKKKGELSSLRGYSQAGKSGGVEIIFRGSYVEWKGLKLPLKLSPDNDYETEMLSKRVKYVRILRKEGKTKPHWYAQLVLEGKPAIKRDPASGTPKHPVGHGVVGIDIGTRTLAYSTDSEVNLLELADRVQNIEQEKRRLQRKMDRSRRAMNPENYNPDGTFKRGVKLTRNKSKRYRRIQHQLAMIQHHQADIRKQQHNELANYLLTLGDCFFVENMSYCDLVHRANKTEISEKTGRYKRKKRFGKSIANKAPAMLITMLKQKCQSRGLKGVKEVDTHVRASQYNHQTDTCIEKALENRWNVMPDGERIQRDLYSAFLLQHCKQGLPEYDRKELKKEFGEELYRVFDREALQRDYPQFVAYHHMTIQRLSELPHTIPSMGIRRIIS

SEQ ID NO: 1898 - protein, 511 aa, Unknown
  Description of Unknown: uncultivated organism sequence
  Category: MG81 effectors
  Description: MG81-176 effector
MGKSKTETCCLTLPLKLEKWQEDRLAKRFEIARQIYNTLVHAELKKLNQIERSSEYQTIQDQITNLDRNDPERIKELPSLYKKRTKLLRDAGFTEYGFKSDVKYYYKYFHKNIGSSVAVHGIAPQVWAAFEKKLFKKQGKIVHYKRKGTLRSVKGGSATGKSGGTEIIFRGTYIQWKDLNLPLKQSPDNAYESEMLGYRVKYVRILRKPGKSKDRWYAQLVLEGKPVIKRNPMTGAALHPVGHGAVGLDIGPQTLAYSAADGVGLLELADQVQNIERQKALLQRKLDRSRRASNPDNYNEDGTIKRGVKLTRNQSKRYCKTQRDLAYLQHCQAETRKRQHIALANHLLTLGDRFYVEQMSWAALARRSKKTEVSEKTGKIKRKKRFGKSIANKAPAMLIEILRQKCISLGLPGVVDVPTSIKASQYNHQSKDYIKKNLSERWNDMPDGEKIQRDLYSAFLLQHCTPELNAFDQESLQQDYPQFVQYHHQVMQQLSEMPKTPSSMGIRRRTS

SEQ ID NO: 1899 - protein, 515 aa, Unknown
  Description of Unknown: uncultivated organism sequence
  Category: MG81 effectors
  Description: MG81-177 effector
MAEETGRCVLTLPLLTEPWQEHIMEKRFSIVEHLKNQLIAMELRKLKNLQRTKAYRELAEKIEATPKEKRAPLYRERKKMLQDAGFSEYAFKHDMQSPENPMQQHFSMHITSKVAERAASDVWRAFQKYLYSNGNEVHFHKRGTLKSVACQANGSGMYYQDDTFAWHRGKTAKVKPAKDNPQGRKKRDKNKQLHIKVRPPQNAYEREMLKKEVKEIRVVRQWVKSRYKYYLQLTLVGPPVPKERKLGVGRVGIDIGTQTIAISSETSVQLRELAPGVNDNHEKKLRLQRQMDRSKRATNPENYNPDGTIRRPPKGERMRWNFSKRYKKLAGKVRELERKNAAIRKYEHTCLANEILSLGDEIYVEKMSFSGLQRRAKETKKDAKGCYLKKKRFGKSLANKAPATLMQILKTKAALTGQVAEEVNTTAFRASQFDHTSGQYRKPLLSERWKTLSGGERVQRDMYSAFLLMNSDSDKTQSDAELCSLTFENFRRLHDAEVTRIRNEHKRHLRSFGID

SEQ ID NO: 1900 - protein, 478 aa, Unknown
  Description of Unknown: uncultivated organism sequence
  Category: MG81 effectors
  Description: MG81-178 effector
MGWKSKGRGGTLVKKSSTDTCCLTLPLKLEKWQSDRLEKRFEIGRQIYNTVVRAELKKLQQVERTPQYREIEQKLKEAKQEEAKELWKTRTQLLSKSGFSEYGFKSDMKYYYQHFKENIGSSVAVHGIASQVWTAFEKVLFSKDGKMVHFKKKGELSSLRGYSQAGKSGGIEIIFRGSYVEWKGLKLPLKLSPDNDYETEMLSKRVKYVRILRKEGKTKPHWYAQLVLEGKPAIKRDPASGAPKHPVGHGVVGIDIGTRTLAYSADSKVDLIELADRVQNIEQEKMLLQRKLDRSRRATNPENYKPDGTIKKGVKLTRNKSKRYRKIQHQLAMLQHRQADIRKRQHNELANYLLTLGDCFFVEDMDYRALTRKAKKTEISEKTGRYKRKKRFGKSIANKAPSMLIALLDQKCKSLNLEGVKKVDTAVKASQYNHQTDECKAKELKERWNIMPDGERIQRDLYSAFLLQHCRRDLPEYN

SEQ ID NO: 1901 - protein, 438 aa, Unknown
  Description of Unknown: uncultivated organism sequence
  Category: MG81 effectors
  Description: MG81-179 effector
MEKYYKHFNDNIGANVALHGITAQVWIAFDKVFVDNYKQKGKVHFKKPGELCSVQGYSQKKSGGKEIMFREDRIIWNQQGNRDRKKVKREFLLKLSPDNPYEAEMLKRHVKFVRILRKDGKTKPHWYAQLVLEGKPAVKRDPASGAPKHPVGHGVVGIDIGTRTLAYSTDKEVNLLELADRVQNIEQEKRRLQRKMDRSRRATNPENYNPDGTFKRGVKLTRNKSKRYRRIQHQLAMIQHHQADIRKQQHNELANYLLTLGDCFFVENMSYCDLVHRANKTEISEKTGRYKRKKRFGKSIANKAPAMLITMLKQKCQSRGLEGVKEVDTHVRASQYNHQTDICIEKALENRWNVMPDGERIQRDLYSAFLLQHCKQGLPEYNRKELKKEFGEELYRVFDREALQRDYPQFVAYHHMTIQRLSELPHTIPSMGIRRIIS

SEQ ID NO: 1902 - protein, 511 aa, Unknown
  Description of Unknown: uncultivated organism sequence
  Category: MG81 effectors
  Description: MG81-180 effector
MKKSNTDTCCLTLPLKLEKWQEDRLAKRFEIARQIYNTMVHAELKKLRNIENSQPYRQIQKQIEALNWKNQNDKARLKSLYNDRNKLLNTIGFSEYGFKADIKYYYKHFNDNIGSSVAVHGIAPQVWAAFEKMLFHKEGKKVHYKKKDDIHSLHGYSVTGKSGGVEIIFRKTYIEWKGLKLPLKRSPDNAYETEMLDRRVKYVRLLRKPGKRKDCWYAQLSLEGKPAIKRDPKSGKRRHSIGRGAVGLDIGPQTLAYSACGAADLVELADQVQNIEQMKRRLQRKLDRSRRATNPDNYADNGTIRRGVKLTHNKSNRYRRTQRELRYLQHCQAEIRKRQHIELANHLLALGDCFYVEDMAWPSLTHRAKETAISEKTGRIKRKKRFGKSVANKAPATLIGILEQKCNSLGLPGVVKVPTSLRASQYNHQSGEYTSKPLSQRWNNMPDGERIQRDLYSAFLLQHYDPKAGNFDSVLLQQDYPQFVQYHHRAIQRLSTVPKTLSSMGIQRSLR

SEQ ID NO: 1903 - protein, 511 aa, Unknown
  Description of Unknown: uncultivated organism sequence
  Category: MG81 effectors
  Description: MG81-181 effector
MAKCSTDTCCLTLPLRLEKWQEDRLAKRFEIARQIYNTMVRAELKKLRAMEQSEPYKANQEKIQALDWKTQADKQALKALYKERDKLLRDGGFSEYGFKSDIKNYYKHFNNNIGSSVAVHGIAPQVWAAFEKMLFKKEGKKVHFKKKGDIHSLRGYSVTGKSGGVEIIFRETYIEWKGLKLPLKLSPDNIYETQMLSYRVKYVRLLRKPGKRKDRWYAQLSLEGKPVIKYNPKTGEVRHPIGKGAVGLDIGPQTLAYSAATGADLVELANQVQNVEQEKRRLQRKLDRSRRATNPGNYADDGTIRRGIALTHNKSKRYLRTQQELKYLQHQQAEIRKRQHTELANHLLSLGDCFYVEKMVWTSLTHRAKETEISEKTGKIKRKKRFGKSVANKAPATLIGILQRKSAALGIPGVIEVPTSVKASQYNHQSGTYTPKPLSQRWNNMPDGERIQRDLYSAFLLQHYDPQTNTFDANSLHQDYPQFVQYHHDAVLRLYAMPKTPSSMGIKRSLR

SEQ ID NO: 1904 - protein, 511 aa, Unknown
  Description of Unknown: uncultivated organism sequence
  Category: MG81 effectors
  Description: MG81-182 effector
MAKCSTDTCCLTLPLRLEKWQEDRLAKRFEIARQIYNTMVRAELKKLRAMEQSEPYKANQEKIQALDWKTQTDKQALKALYKERDKLLRDGGFSEYGFKSDIKNYYKHFNNNIGSNVAFHGIAPQVWAAFEKMLFKKEGQKVHFKKKGDIHSLRGYSAAGKSGGVEIIFRETYIEWKGLKLPLKLSPDNIYETQMLSYRVKYVRLLRKPGKRKDRWYAQLSLEGKPVIKYNPKTGEVRHPIGKGAVGLDIGPQTLAYSAATGADLVELANQVQNVEQEKRRLQRKLDRSRRATNPGNYADDGTIRRGIALTHNKSKRYLRTQQELKYLQHQQAEIRKRQHTELANHLLSLGDCFYVEKMVWTSLTHRAKETEISEKTGKIKRKKRFGKSVANKAPATLIGILQRKSAALGIPGVIEVPTSVKASQYNHQSGTYTPKPLSQRWNNMPDGERIQRDLYSAFLLQHYDPQTNTFDANSLHQDYPQFVQYHHDAVLRLYAMPKTPSSMGIKRSLR

SEQ ID NO: 1905 - protein, 512 aa, Unknown
  Description of Unknown: uncultivated organism sequence
  Category: MG81 effectors
  Description: MG81-183 effector
MEKTKGSDDTCCLTLPLKLEKWQEDRLARRLELARQIYNTLMHAELKKLRNVQQSPEYRRMQAEMRALDWKKEADKPPLRKLYKERDKLLKKAGFTKFGFKNDMKYYYKHFNQNIGSSVAVHGIASQVWTAFDKMLFQKDGKKVHFKKYGDLHSVQGYSAAKSGGVEIMFRGTCIEWKGLELPLKRKPDNAYETEMLQKHIKFVRILRKPGKNRDRWYAQLTLAGKPAVKRDAVSGRQIHPLGHGPVGLDIGPQTLAYAAETEADLVELADLVQDIELEKRRIQRKMDRSRRAANPDNYAEDGTIKRGVKLTHNKSRRYLRLQKKLSHLQHCQAETRKRQHNELANHLLTLGDCFYIEKMNWTSLTHRAKKTEISEKTGKIKRKKRFGKSIANKAPGMLIEILKRKCLSRGLPKVAELPTTLKASQYNHLTKEYTKKSLSQRWNTMPDGKRIQRDLYSAFLLQHYNPQLQNFDQEALEKEYPQFVLLHDQAIERLSAIPKMPSSMGIRRSVS

SEQ ID NO: 1906 - protein, 307 aa, Unknown
  Description of Unknown: uncultivated organism sequence
  Category: MG81 effectors
  Description: MG81-184 effector
MAKCSTDTCCLTLPLRLEKWQEDRLAKRFEIARQIYNTMVRAELKKLRAMEQSEPYKANQEKIQALDWKTQADKQALKALYKERDKLLRNGGFSEYGFKSDIKNYYKHFNNNIGSNVAFHGIAPQVWAAFEKMLFKKEGKKVHFKKKGDIHSLRGYSAAGKSGGVEIIFRETYIEWKGLKLPLKLSPDNIYETQMLSYRVKYVRLLRKPGKRKDRWYAQLSLEGKPVIKYNPKTGEVRHPIGKGAVGLDIGPQTLAYSAATGADLVELANQVQNVEQEKRRLQRKLDRSRRAPTQVITRMMEPFDAE

SEQ ID NO: 1907 - protein, 528 aa, Unknown
  Description of Unknown: uncultivated organism sequence
  Category: MG81 effectors
  Description: MG81-185 effector
MAKNNNNNNNTDTCVLTLPLRVEKWQEDCLLKRFEAARRIYNSLLNFELKKLRQLERTVEYRQIQSVISSAYRSNTKDSPECKDAFKRRKKLTDENGISENGFKSDVKFFYKHFDGLIGSSVAVHCIAVQLWAAFDKYLSGSGKEIHFKRLGDISSLKGYSVKGKSGGLEIIFRGQYVEWTRKKKKLLLPLKIDPDNEYEREMLSRRVKYVRIIKKPGKNRLRWYAQLTLEGKPALKYSAETGKPIHSVGKGDVGIDIGPQTVAYASDKEVALLELADRVTNIEHQKKKLQRKLDRSRRATNPDNYKPDGTIKRGVKLTRNKSKRYLKLQSKLAYIQHRQAEIRKLQHTCLANHMLTLGDRFFVEKMNWPGLAHRAKETSFSEKTGRYKRKKRFGKSLANKAPAMFISILKRKCETLGLPGVVEVDTYNLKASQYNHLSDTYEKKSLSERWNYMPISDGSDSSKTKRIQRDLYSAFLLQHTIPQPCSFDKEALRIDYPNFVTMHDAEIHRLESLPKTVTSMGVRRSHS

SEQ ID NO: 1908 - protein, 427 aa, Unknown
  Description of Unknown: uncultivated organism sequence
  Category: MG81 effectors
  Description: MG81-186 effector
MKYYYQHFKENIGSSVAVHGIASQVWTAFEKVLFSKDGKMVHFKKKGELSSLRGYSQAGKSGGVEIIFRGSYVEWKGLKLPLKLSPDNDYETEMLSKRVKYVRILRQDGKTKPHWYAQLVLEGKPAIKRDPASGAPKHPVGHGAVGIDIGTRTLAYSADSKVDLIELADRVQNIEQEKLLLQRKLDRSRRATNPENYKPDGTIKKGVKLTRNKSKRYRKIQHQLAMLQHRQANIRKRQHNELANYLLTLGDCFFVEDMDYRALTRKAKKTEISEKTGRYKRKKRFGKSIANKAPSMLIALLDQKCKSLNLEGVKKVDTAVKASQYNHQTDECKAKELKERWNIMPDGERIQRDLYSAFLLQHCRRDLPEYNRKKLQETFGNEVYRVFDREALQRDYPKFVEYHRETIQRLSALPKTIASMGIRRIIS

SEQ ID NO: 1909 - protein, 480 aa, Unknown
  Description of Unknown: uncultivated organism sequence
  Category: MG81 effectors
  Description: MG81-187 effector
MPEYREIERLIEATTDKKEKWALKNQKKQFLRKNGINRNTFTTDMKRLYKHFNDNIGSNVAQHGIVSQVLTAFEKVYIENQSGEVHFKKPGDLRSVQGYSQKKSGGVEIMFREGKIIWNQQGNNDRKGVAREFPLKLSPDNSYEAEMLKKHVKFVRILRKEGKTKSHWYAQLVLEGKPTVKRDPISGAPKHPVGHGVVGIDIGTRTLAYSTDSEVNLLELADRVQNIEQEKRRLQRKMDRSRRAMNPENYNSDGTFKRGVKLTRNKSKRYRRIQHQLAMIQHHQEDIRKQQHNELANYLLTLGDCFFVENMSYCDLVHRANKTEISEKTGRYKRKKRFGKSIANKAPAMLITMLKQKCQSRGLEGVKEVDTHVRASQYNHQTDTCIEKALENRWNVMPDGERIQRDLYSAFLLQHCKQGLPEYDRKELKKEFGEELYRVFDREALQRDYPQFVAYHHMTIQRLSELPHTIPSMGIRRIIS

SEQ ID NO: 1910 - protein, 511 aa, Unknown
  Description of Unknown: uncultivated organism sequence
  Category: MG81 effectors
  Description: MG81-188 effector
MAKCSTDTCCLTLPLRLEKWQEDRLAKRFEIARQIYNTMVRAELKKLRAMEQSEPYKANQEKIQALDWKTQTDKQALKALYKERDKLLQDGGFSEYGFKSDIKNYYKHFNNNIGSNVAFHGIAPQVWAAFEKMLFKKEGKKVHFKKKGDIHSLRGYSAAGKSGGVEIIFRETYIEWKGLKLPLKLSPDNIYETQMLSYRVKYVRLLRKPGKCKDRWYAQLSLEGKPVIKYNPKTREVRHPIGKGAVGLDIGPQTLAYSAATGADLVELANQVQNVEQEKRRLQRKLDRSRRATNPGNYADDGTIRRGIALTHNKSKRYLRTQQELKYLQHQQAEIRKRQHTELANHLLSLGDCFYVEKMVWTSLTHRAKETEISEKTGKIKRKKRFGKSVANKAPATLIGILQRKSAALGIPGVIEVPTSVKASQYNHQSGTYTPKPLSQRWNNMPDGERIQRDLYSAFLLQHYDPQTNTFDANSLHQDYPQFVQYHHDAVLRLYAMPKTPSSMGIKRSLR

SEQ ID NO: 1911 - protein, 1387 aa, Unknown
  Description of Unknown: uncultivated organism sequence
  Category: MG81 effectors
  Description: MG81-189 effector
MKLTKVEKARIAVSREKKDSGRIILYTNPEDVKKTSVTTMEQQVSKRIDQANKLYQVFFKSVIPVELNKHFAEISKIAAKCRNTEEFYKKACGYSGYEWTDAKQKKRTSQISRFSYTSSGKNMYVVMDNFVKEYMVQIWQEKDFRNAAVKILCCICDGKKFASKLEKVKKESPDTLKKFIEISGKCEGNPFVDYDTSFLEKVFTLVISQMVKNCDRKSYEQDDKEKIKKSIQKEIQWLSHVQSVTERSFGREGKTYLLFKIRNPYATEERLQTVLIRMRKTLKRGRNRDIAIVLLQGLAQMNQVTFTDTVKHLYQEEEKAFCDFIDAVNRDYYRVNIVKSVRNMDVKVQPDLNDNSILKLSGLGNIKKEALSDTLLRYAASADESDQVLLDIKKLLFEYFLPENSKETSKYTTVQNLWNIPYLPKIFFDYGFENEDFDDDNECAEDIETLCDVEPQYKINQHSLKRRIRYVNYGKYLQMTKNESDRERRYWIHYIKEFVEKNYVDSGRTLSEKNCYASSMMLNCWKEIIRYLCGKYIDIGKAVFHFTNLTAMPKPKDKIIYGQLEEQYKKGISSFDYEAIKAEETLQRDIVQSVVAAAFAFSKSVIDETKMEECQETNKEDILFLSENVLGSLLKENTIKLILRFYGGESTVAQKEYFDQQEIVQEMISHLKSIRNENFHYLDGAKKDNPHKYASILWKNDEMAYQKLTKQRYYANNVGLFYRAEEIQELVQELYSQKNITEAQIPAFRTVLKRKDLPGYMEELGILFPDNTQEKSKGDFEGTLYFLMKEIYYRDFIVKDKAAAYFFKAVDQNKEQSKKEDKHTERAAENFHRYVKSLEKKYNKKEISFRTVCQYIMMEYNQQNTTKQETEIYKHFKMLISLCIRKAFGNYIKETYRFLFHPIYSKQQGEPEYLDTLELESGVKEKNYEWFTLAHFLHPVQLNHLVGDLKSYIQYREDILRRIVFAEQRVYADQQKEVQQKVKTAKEILEVLEFVREVSGRVSNEYTDYYENEEEYAEFLYQYIDFRRREGKSAFESLKYFCQNILDSGTVVDLYADTENPKVLRNIELTRMYAGSNVKIPEYEKITEDEIKMYYQEKNSVALILSRGLCRNEKEQKKVIEFNWKKKRLTLNEITDVFSLVNDLLGKMISFSYLRERDQMYLLLGFYYMALCAENKSENHLGWKGETLDKLESSDSKFDIGGGLVLYQIVSAFNFGSKLLYISEDGRWKMAGGAFPGKYGRFENDYNHRTSLSKVIRLFENESYEREIIYWRDYVDHMKYYVNQNQSIMEIYSAFYSKVLGYSAKLRKSVVFNLQAALEKHHINPECIWMTSDGKCADIKLMKNLESQKFTYKLAKREGEKTERKICMNALNENFLKTIRTSLEYKK

SEQ ID NO: 1912 - protein, 511 aa, Unknown
  Description of Unknown: uncultivated organism sequence
  Category: MG81 effectors
  Description: MG81-190 effector
MAKCSTDTCCLTLPLRLEKWQEDRLAKRFEIARQIYNTMVRAELKKLRAMEQSEPYKANQEKIQALDWKTQTDKQALKALYKERDKLLRDGGFSEYGFKSDIKNYYKHFNNNIGSNVAFHGIAPQVWAAFEKMLFKKEGKKVHFKKKGDIHSLRGYSAAGKSGGVEIIFRETYIEWKGLKLPLKLSPDNIYETQMLSYRVKYVRLLRKPGKRKDRWYAQLSLEGKPVIKYNPKTGEVRHPIGKGAVGLDIGPQTLAYSAATGADLVELANQVQNVEQEKRRLQRKLDRSRRATNPGNYADDGTIRRGIALTHNKSKRYLRTQQELKYLQHQQAEIRKRQHTELANHLLSLGDCFYVEKMVWTSLTHRAKETEISEKTGKIKRKKRFGKSVANKAPATLIGILQRKSAALGIPGVIEVPTSVKASQYNHQSGTYTPKPLSQRWNNMPDGERIQRDLYSAFLLQHYDPQTNTFDANSLHQDYPQFVQYHHDAVLRLYAMPKTPSSMGIKRSLH

SEQ ID NO: 1913 - protein, 512 aa, Unknown
  Description of Unknown: uncultivated organism sequence
  Category: MG81 effectors
  Description: MG81-191 effector
MKKSSTDTCCLTLPLKLEKWQEDRLAKRFEIARQLYNTLVHAELKRLVQIKRTAEYLENEQKIRALDRNNPADRAKLQELYKEQRKSLKTAGFTDYSFTTDMGKYYKHFRDNIGSSVAVHGIAPQVWAAFDKVLFKKGGKKVHYKRPGEVNSVQGYSRTGKSGGREIMFRGAYIEWKGLKLPLKLSPDNAYETDMLQRRVKLVRLVRRPGKRRDRWYAQLVLEGKPAIKADPVTGKAVHPIGSGPIGLDIGPQTLAYSAAGVAGLVELADRVQNIEQEKRRLQRKMDRSRRATNPDNYAEDGTIRRGVKLTHNKSKRYRRNQQELKYLQHRQAEIRKLQHIQFANHLLSLGDHFYVEKMEWSSLTHRAKETVISEKTGKPRSKRRFGKSIANKAPAMLIEILRQKCKSLGLSDVVEINPADIKAIQYNHLTGKYVKKSLSRRWNDMQDGEHLQRDLYSAFLLQHYDSCSKTLDHDSIVRDYPAFVQYHHREIERLHALPKTPSSMGIRRSIA

SEQ ID NO: 1914 - protein, 511 aa, Unknown
  Description of Unknown: uncultivated organism sequence
  Category: MG81 effectors
  Description: MG81-192 effector
MAKCSTDTCCLTLPLRLEKWQEDRLAKRFEIARQIYNTMVRAELKKLRAMEQSEPYKANQEKIQALDWKTQTDKQALKALYKERDKLLQDGGFSEYGFKSDIKNYYKHFNNNIGSSVAVHGIAPQVWAAFEKMLFKKEGKKVHFKKKGDIRSLRGYSVTGKSGGVEIIFRETYIEWKGLKLPLKLSPDNIYETQMLSYRVKYVRLLRKPGKRKDRWYAQLSLEGKPVIKYNPKTGEVRHPIGKGAVGLDIGPQTLAYSAATGADLVELANQVQNVEQEKRRLQRKLDRSRRATNPGNYADDGTIRRGIALTHNKSKRYLRTQQELKYLQHQQAEIRKRQHTELANHLLSLGDCFYVEKMVWTSLTHRAKETEISEKTGKIKRKKRFGKSVANKAPATLIGILQRKSAALGIPGVIEVPTSVKASQYNHQSGTYTPKPLSQRWNNMPDGERIQRDLYSAFLLQHYDPQTNTFDANSLHQDYPQFVQYHHDAVLRLYAMPKTPSSMGIKRSLR

SEQ ID NO: 1915 - protein, 526 aa, Unknown
  Description of Unknown: uncultivated organism sequence
  Category: MG81 effectors
  Description: MG81-193 effector
MAKKNNNDTDTCVLTLPLRVEKWQEDCLLKRFEAARRIYNSLLNFELKKLRQLERTVEYRQIQSVISSAYRSNTKDSPECKDAFKRREKLISANGISEYGFKSDVKFFYKHFDSLIGSSVAVHCIAVQLWAAFDKYLSGSGKEIHFKRLGDISSLKGYSVKGKSGGCEIIFRGQYVEWTRKKKKLLLPLKIDPDNEYEREMLSRRVKYVRIIKKPGKNRLRWYAQLTLEGKPALKYSAETGKPIHSVGNGNVGIDIGPQTIAYASDKEVALLELADRVTNIEHQKKKLQRKLDRSRRATNPDNYKPDGTIKRGVKLTRNKSKRYLKLQSKLAYIQHRQAEIRKLQHTCLANHMLTLGDRFFVEKMNWSGLAHRAKETSISEKTGRYKRKKRFGKSLANKAPAMFISILKRKCETLGLPGVVEVDTYSLKASQYNHLSDTYEKKSLSERWNYMPISDGSDSSKTKRIQRDLYSAFLLQHTIPQPCSFDKEALRIDYPNFVIMHDAEIHRLESLPKTVTSMGVRRSHS

SEQ ID NO: 1916 - protein, 511 aa, Unknown
  Description of Unknown: uncultivated organism sequence
  Category: MG81 effectors
  Description: MG81-194 effector
MAKCSTDTCCLTLPLRLEKWQEDRLAKRFEIARQIYNTMVRAELKKLRAMEQSEPYKANQEKIQALDWKTQADKQALKALYKERDKLLQDGGFSERGFKSDIKNYYKHFNNNIGSNVAFHGIAPQVWAAFEKMLFKKEGKKVHFKKKGDIHSLRGYSAAGKSGGVEIIFRETYIEWKGLKLPLKLSPDNIYETQMLSYRVKYVRLLRKPGKRKDRWYAQLSLEGKPVIKYNPKTGEVRHPIGKGAVGLDIGPQTLAYSAATGADLVELANQVQNVEQEKRRLQRKLDRSRRATNPGNYADDGTIRRGIALTHNKSKRYLRTQQELKYLQHQQAEIRKRQHTELANHLLSLGDCFYVEKMVWTSLTHRAKETEISEKTGKIKRKKRFGKSVANKAPATLIGILQRKSAALGIPGVIEVPTSVKASQYNHQSGTYTPKPLSQRWNNMPDGERIQRDLYSAFLLQHYDPQTNTFDANSLHQDYPQFVQYHHDAVLRLYAMPKTPSSMGIKRSLR

SEQ ID NO: 1917 - protein, 535 aa, Unknown
  Description of Unknown: uncultivated organism sequence
  Category: MG81 effectors
  Description: MG81-195 effector
MGEMENIGNFVVTFEINVDKSQTDIIDKKLEVLRRMYNSIVGTFNSRHKEMIKTKRWRVMTSELFQSEKRTELHAQRKEFEKDSDDYNRITEEINLLKGKLSSERKKELTDTQKEILKENEFSEWGIYGTKGSGVGWKQYNHYKKCGIYSNNTMKLCSNIWRAYEKLLFGKGKRVSFKKYGELNTIQGANNKSAIVIRFDDNKKPYVVFDKLNIKIHFNPKKPYEFDAMYNRDIVCSTILRKQIRGKQKYYIQITFKGRPFSKENQQIGIGNVGIDIGTQTIAVTSDNSVMLKELANRTPKYEKEIRVLLRAMDRSRRSTNPQNYNDDGTIKRGIKLQWNVSKNYVKLKLKHKELARKKSEITTLQHNELSNEIISQGDVFKVEKMSFTSLTKRTKKTEVSEITGKFKRKKRFGKSIGNKAPSKLLSILKNKVIAKGGKFIEVNTQKCRASQYNHISDDYTKKSLSQRWNNFTIDENKIKIQRDIYSSFLIKNVNEDNETFNKEKIIEEFSNFIKLHNNEIEILKNTKNISSIGI

SEQ ID NO: 1918 - protein, 512 aa, Unknown
  Description of Unknown: uncultivated organism sequence
  Category: MG81 effectors
  Description: MG81-196 effector
MKKSNTDTCCLTLPLKLGKWQEDRLAKRFEIARQLYNTLVHAELKRLAQVKQTAEYRENERKIRTLDWNDPGDQAKLKGLYKERRKSLKTAGFTDYSFTTDMGKYYKHFRDNIGSNVALHGIAPQVWAAFDKLLFKKGGKKVHYKKPGEVNSVQGYSRTGKSGGTEIMFREPYIEWKGLKLPLKLSPDNAYETDMLQRRVKLVRLVRRPGKRRDRWYAQLVLEGKPAIKADPVTGKAVHPIGSGPVGLDIGPQTLAYSAAGVAGLVELADRVQNIEQEKRRLQRKMDRSRRATNPDNYAEDGTIRRGVKLTHNKSKRYRRNQQELKYLQHRQAEIRKLQHIQLANHLLSLGDHFYVEKMEWSSLTHRAKETVISEKTGKPRSKRRFGKSIANKAPAMLIEILRQKCKSLGLSDVVEINPADIKASQYNHLTGKYVKKSLSRRWNDMQDGEHLQRDLYSAFLLQHYDSCSKTLDLDSLARDYPAFVQYHHREIERLHALPKTPSSMGIRRSIA

SEQ ID NO: 1919 - protein, 348 aa, Unknown
  Description of Unknown: uncultivated organism sequence
  Category: MG81 effectors
  Description: MG81-197 effector
MILVYRYRVKSLNGLLNKQARAVSYVWNFSNETQKHALKWNKRWPTGFDLNKLTTGSSRELGLHSGTVNAVCEQYAKSRKQHKRPYLRWRGKKSLGWVPIKGRDIKETPNGFHFHGREFKAFKSRNIPIGAKIKDGTSFSQDARGNWFLNVCIEVADVAVRAIRAGVGIDLGLKSFATLSTGEVIDNPRIFRSLEERIGKAQRGKKKRLAANLHTKVKNTRGDFLHKLSSRITKEFDYIAVGNVNAAGLAKTSMAKSVNDAGWSSFRRQLAYKAIRHGATFDEVDEKWTTQTCDACGVIAGPKGRAGLNERQWICVCGVKHDRDVNAALNILRSGSGHRAPVEGIPVL

SEQ ID NO: 1920 - protein, 522 aa, Unknown
  Description of Unknown: uncultivated organism sequence
  Category: MG81 effectors
  Description: MG81-198 effector
MKKSSTDTCCLTLPLKLEKWQSDRLEKRFEIGRQIYNTVVRAELKKLQQVERTPQYREIEQKLKEAKQEEAKELWKKRTQLLSKSGFSEYGFKSDMKYYYQHFKENIGSSVAVHGIASQVWTAFEKVLFSKDGKMVHFKKKGELSSLRGYSQAGKSGGIEIIFRGSYVEWKGLKLPLKLSPDNDYETEMLSKRVKYVRILRKDGKTKTHWYAQLALEGKPAVKRDSISGAPKHPIGHGVVGIDIGTRTLAYSADSKVDLIELADRVQNIEQEKMLLQRKLDRSRRATNPENYKPDGTIKKGVKLTRNKSKRYRKIQHQLAMLQHRQADIRKRQHNELANYLLTLGDCFFVEDMDYRALTRKAKKTEISEKTGRYKRKKRFGKSIANKAPSMLIALLDQKCKSLNLEGVKKVDTAVKASQYNHQTDECKAKELKERWNIMPDGERIQRDLYSAFLLQHCRRDLPEYNRKKLQETFGNELYRVFDREALQRDYPKFVEYHRETIQRLSALPKTIASMGIRRSIS

SEQ ID NO: 1921 - protein, 480 aa, Unknown
  Description of Unknown: uncultivated organism sequence
  Category: MG81 effectors
  Description: MG81-199 effector
MPEYREIERLIEATTDKKEKWALKNQKKQFLRKNGINRNTFTTDMKRLYKHFNDNIGSNVAQHGIVSQVLTAFEKVYIENQSGEVHFKKPGDLRSVQGYSQKKSGGVEIMFREGKIIWNQQGNNDRKGVAREFPLKLSPDNSYEAEMLKKHVKFVRILRKEGKTKPHWYAQLVLEGKPTVKRDPISGAPKHPVGHGVVGIDIGTRTLAYSTDSEVNLLELADRVQNIEQEKRRLQRKMDRSRRAMNPENYNSDGTFKRGVKLTRNKSKRYRRIQHQLAMIQHHQADIRKQQHNELANYLLTLGDCFFVENMSYCDLVHRANKTEISEKTGRYKRKKRFGKSIANKAPAMLITMLKQKCQSRGLEGVKEVDTHVRASQYNHQTDTCIEKALENRWNVMPDGERIQRDLYSAFLLQHCKQGLPEYDRKELKKEFGEELYRVFDREALQRDYPQFVAYHHMTIQQLSELPHTIPSMGIRRIIS

SEQ ID NO: 1922 - protein, 512 aa, Unknown
  Description of Unknown: uncultivated organism sequence
  Category: MG81 effectors
  Description: MG81-200 effector
MGKSSTDTCCLSLPLKLEKWQEDRLAKRFEIARQIYNTLVHAELKRLSQVKRSQQYREIENKIRALDRNDQEDKKELSLLYKLRDDLLRKSGFNDYGFKADIKYFYKHFGENIGANVAVHGIAPQVWSAFDSVLFKKRGKKVHYKKPGDICSLRGYSVTGKSGGSEIMFRGTYIEWKGLKMPLKLSPDNIYESEMLDHRVKYVRIVRKPGKRKDRWYAQLSLECKPVIKCDPVSGEMRHPVGKGPVGLDIGPQTLAYCALSEAGLVELADQVQDIEREKQRLQRRLDRSRRAANPNNYAADGTIKRGVKLTHNKSKRYCILQRELRYLQQQQAETRKRQHTELANYLLSLGDRFYVEDMNWSSLARRAKKTEISEKTGRYKRKKRFGKSIANKAPGSLIDILKQKCESLGIPGVEKLPTSLLKASQYNHQTGEYTPKPRSQRWNDMPDGERIQRDLYSAFLLQHYDPVSKGYDQAALQRDYPQFLQHHHHSIQRLTAKPKTPPSMGIHQRLR

SEQ ID NO: 1923 - protein, 579 aa, Unknown
  Description of Unknown: uncultivated organism sequence
  Category: MG81 effectors
  Description: MG81-201 effector
MAFGNKNSTPSFVLTLPIKVTKQDEIFLSKKFRVGCTVYNQMVTKTTKMWHQLRKTREYKNLIKAIKAAPANSDERKALLVQRSNLIKQAGFSEGAFHKLVVPYQKAYNVNCDVAQKVASAVWKAWGDFFYGKGKTVHYKRLDDFVTLSGKKNTNGIVFRPANHTVSSLESAKRKAKSSVEKKYFDAYRKLNAKKDEEVVLPDEVKAQMDKEVAAAVAKIKPCIGDGNLRIIYGKHEFLVKLRNPDTQTGRYQQEALKCGVKYCRIVRSWVGTKWKYYAQLVLEGYPPIKCDSNGVAKHPVEQGRIGVDIGTQTIAFCGKDVCDLRVLAPSAVVEARNGLTKEIARVMRQMDRSRRAMNPQYFNENGTVKRLKCKNGHKQIRHWNYSKNYYRLLHKLRDLNRKLAAVRKTEHYILANELLTYGNEFVVEDMNYKALQKRSKKTKINPKTGRARSKKRFGKSIGRCAPAMFISILNQKANRYGGSVIKVSTFETKASQFDHTDDSYTKKKLSQRFAKLSDGTVVQRDMYSAFLLLHLRKNLQSYNKKTIKKDFPLFKKLHDETKERLQNSHEWLPASVGF

SEQ ID NO: 1924 - protein, 353 aa, Unknown
  Description of Unknown: uncultivated organism sequence
  Category: MG81 effectors
  Description: MG81-202 effector
MSGKSGGTEIIFHKTYIAWKGLTLPLKLSPDNAYEKEMLMRRIKYVRILRKPGKHKDRWYAQLSLEGNPVVKLDPVSGLPRHPIGKGAVGIDIGPQTLAYSAEGGADLVELADQVQCIEQEKSRLQRKMDRSRRASNPDNYAQDGTIKRGVKLTHNKSRRYCKLQKELAYMLYRQAETRKRQHRELINRLLTMGDCFYIEDMHWNSLAHRAKKTEISEKTGRYKRKKRFGKSIANKAPAMLVDMLEQKCKSLELDVVMVNTSLKASQYNHQTGKYEKKTLSQRWNHMPDGEQIQRDLYSAFLLQHVVPEKNAFDNEALCRDYPKFVQYHHEVIERLRSLPKTISSMGIRRSVS

SEQ ID NO: 1925 - protein, 528 aa, Unknown
  Description of Unknown: uncultivated organism sequence
  Category: MG81 effectors
  Description: MG81-203 effector
MAKNNNNNNNTDTCVLTLPLRVEKWQEDCLLKRFEAARRIYNSLLNFELKKLRQLERTVEYRQIQSVISSAYRSNTKDSPECKDAFKRREKLISANGISENGFKSDVKFFYKHFDGLIGSNVAVHCIAVQLWAAFDKYLSGSGKEIHFKRLGDISSLKGYSVKGKSGGCEIIFRGQYVEWTRKKKKLLLPLKIDPDNEYEREMLSRRVKYVRIIKKPGKNRLRWYAQLTLEGKPALKYSAETGKPIHSVGKGNVGIDIGPQTVAYASDKEVALLELADRVTNIEHQKKKLQRKLDRSRRATNPDNYKPDGTIKCGVKLTRNKSKRYLKLQSKLAYIQHRQAEIRKLQHTCLANHMLTLGDRFFVEKMNWPGLAHRAKETSISEKTGRYKRKKRFGKSLANKAPAMFISILKRKCETLGLPGVVEVDTFRLRASQYNHLSDTYEKKSLSERWNYMPISDGSDSSKTKRIQRDLYSAFLLQHTIPQPCSFDKEALRIDYPNFVIMHDAEIHRLESLPKTITSMGVRRSHS

SEQ ID NO: 1926 - protein, 527 aa, Unknown
  Description of Unknown: uncultivated organism sequence
  Category: MG81 effectors
  Description: MG81-204 effector
MAKNNNNNNTDTCVLTLPLRVEKWQEDCLLKRFEAARRIYNSLLNFELKKLRQLERTVEYRQIQSVISSAYRSNTKDSPECKDAFKRREKLISANGISENGFKSDVKFFYKHFDGLIGSNVAVHCIAVQLWAAFDKYLSGSGKEIHFKRLGDISSLKGYSVKGKSGGCEIIFRGQYVEWTRKKKKLLLPLKIDPDNEYEREMLSRRVKYVRIIKKPGKNRLRWYAQLTLEGKPALKYSAETGKPIHSVGKGNVGIDIGPQTVAYASDKEVALLELADRVTNIEHQKKKLQRKLDRSRRATNPDNYKPDGTIKCGVKLTRNKSKRYLKLQSKLAYIQHRQAEIRKLQHTCLANHMLTLGDRFFVEKMNWPGLAHRAKETSISEKTGRYKRKKRFGKSLANKAPAMFISILKRKCETLGLPGVVEVDTFRLRASQYNHLSDTYEKKSLSERWNYMPISDGSDSSKTKRIQRDLYSAFLLQHTIPQPCSFDKEALRIDYPNFVIMHDAEIHRLESLPKTITSMGVRRSHS

SEQ ID NO: 1927 - protein, 512 aa, Unknown
  Description of Unknown: uncultivated organism sequence
  Category: MG81 effectors
  Description: MG81-205 effector
MPTKQKEGGNRCVLTLPLLTEPWQEHIIEKRFKIIEHLKNQLISIELRKLKNLQRTKAYKNLIKQIEFVPKSERTALYKERNKMLKDAGFSQYTFMDDMAGKKSLMQKHFESHINVQIAHKAAIDVWSSFEKFLFGSGQMIHYQKRGTLSSVASKSPKTGMFYYSDENIFKWSGGGTKPKGGIILCLRVASVKTNYEKEMVANNEIKYYRVVRKWMKTKYKYYLQITFAGKPADKHREISTGRVGIDIGTQTIAIASDKSVKLLELADKVNKNHIKKCELQRKLDRSRRYTNPDNFNPDGTVKRGTKGHKLKWNKSKHYIEIAGKIRELERKNADIRKYQHTCLANDILAMGNQIYIEPMNYKGLQKRAKETQVDEKGRYKKKKRFGKSLANKAPAMFVTILKTKAEQHGGEVYEVDIMSYRASQCDHTTGEYTKHGLNDRWRILGNGDKVQRDLYSAFLIKNSNKTHDEIDLDKCSKTYDNFKKLHDKEIENIRNEVKLRERRNISSYGIA

SEQ ID NO: 1928 - protein, 512 aa, Unknown
  Description of Unknown: uncultivated organism sequence
  Category: MG81 effectors
  Description: MG81-206 effector
MPTKQKEDSNRCVLTLPLLTEPWQEHIIEKRFKIIEHLKNQLISIELRKLKKLQRTKAYKNLIKQIESVPKSERTALYKERNKMLKDAGFSQYTFMDDMAGKKSLMQKHFESHINVQIAHKAAIDVWSSFEKFLFGSGQMIHYQKRGTLSSVASKSPKTGMFYYPDENIFKWSGGGTKPKGGIILCLRVASVKTNYEKEMVANNEIKYYRVVRKWMKTKYKYYLQITFAGKPADKHREISTGRVGIDIGTQTIAIASDKSVKLLELADKVNKNHIKKCELQRKLDRSRRYTNPDNFNPDGTVKRGTKGHKLKWNKSKHYLEIAGKIRELERKNADIRKYQHTCLANDILAMGNQIYIEPMNYKGLQKRAKETQVDEKGRYKKKKRFGKSLANKAPAMFVTILKTKAEQHGGEVYEVDIMSYRASQCDHTTGEYTKHGLNDRWRILGNGDKVQRDLYSAFLIKNSNKTHDEIDLDKCSKTYDNFKKLHDKEIENIRNEVKLRERKNISSYGIA

SEQ ID NO: 1929 - protein, 531 aa, Unknown
  Description of Unknown: uncultivated organism sequence
  Category: MG81 effectors
  Description: MG81-207 effector
MILLANNNNNNNNTDTCVLTLPLRVEKWQEDCLLKRFEAARRIYNSLLNFELKKLRQLERTVEYRQIQSVISSAYRSNTKDSPECKDAFKRREKLISANGISEYGFKSDVKFFYKHFDGLIGSSVAVHCIAVQLWAAFDKYLRGSGKEIHFKRLGEISSLKGYSVKGKSGGLEIIFRGQYIEWTRKKKKLLLPLKIDPDNEYEREMLSRRVKYVRIIKKPGKNRLRWYAQLTLEGKPALKYSAETGKPIHSVGKGNVGIDIGPQTVAYASDKEVALLELADRVTNIEHQKKKLQRKLDRSRRATNPDNYKPDGTIKRGVKLTRNKSKRYLKLQSKLAYIQHRQAEIRKLQHTCLANHMLTLGDRFFVEKMNWPGLAHRAKETSISEKTGRYKRKKRFGKSLANKAPAMFISILKRKCETLGLPGVVEVDTYNLKASQYNHLSDTYEKKSLSERWNYMPISDGSDSSKTKRIQRDLYSAFLLQHTIPQPCSFDKEALRIDYPNFVTMHDAEIHRLESLPKTVTSMGVRRSHS

SEQ ID NO: 1930 - protein, 538 aa, Unknown
  Description of Unknown: uncultivated organism sequence
  Category: MG81 effectors
  Description: MG81-208 effector
MNNEEKEKEGATCCLTLPLKLEKWQSDHLEKRFEIARQLYNTLVHAELKKKCQVERMPEYQEIMKMIDAASNQKEKWALEKKRKAFLEENGFSRNAFKADMEKYYKHFNDNIGANVALHGITAQVWIAFDKVFVDNYKQKGKVHFKKPGELCSVQGYSQKKSGGKEIMFREDRIIWNQQGNRDRKKVKREFLLKLSPDNPYEAEMLKRHVKFVRILRKDGKTKPHWYAQLVLEGKPAVKRDPISSAPKHPVGHGVVGIDIGTRTLAYSTDKEVNLLELADRVQNIEQEKRRLQRKMDRSRRAMNPENYNSDGTFKRGVKLTRNKSKRYRRIQHQLAMIQHHQADIRKQQHNELANYLLTLGDCFFVENMSYCDLVHRANKTEISEKTGRYKRKKRFGKSIANKAPAMLITMLKQKCQSRGLEGVKEVDTHVRASQYNHQTDTCIEKALENRWNVMPDGERIQRDLYSAFLLQHCKQGLPEYNRKELKKEFGEELYRVFDREALQRDYPQFVAYHHMTIQRLSELPHTIPSMGIRRIIS

SEQ ID NO: 1931 - protein, 511 aa, Unknown
  Description of Unknown: uncultivated organism sequence
  Category: MG81 effectors
  Description: MG81-209 effector
MKKSNTDTCCLTLPLKLEKWQEDRLAKRFEIARQIYNTMVHAELKKLRNIENSQPYRQIQKQIEALNWKNQNDKARLKSLYNDRNKLLNTIGFSEYGFKADIKYYYKHFNDNIGSSVAVHGIAPQVWAAFEKMLFHKEGKKVHYKKKDDIHSLHGYSVTGKSGGVEIIFRKTYIEWKGLKLPLKRSPDNAYETEMLGRRVKYVRLLRKPGKRKDCWYAQLSLEGKPAIKRDPESGERRHSIGRGAVGLDIGPQTLAYSACGAADLVELADQVQNIEQMKRRLQRKLDRSRRATNPDNYADNGTIRRGVKLTHNKSNRYRRTQRELRYLQHCQAEIRKRQHIELANHLLALGDCFYVEDMAWPSLTHRAKETAISEKTGRIKRKKRFGKSVANKAPATLIGILEQKCNSLGLPGVMKVPTSLRASQYNHQSGEYTSKPLSQRWNNMPDGERIQRDLYSAFLLQHYDPKAGNFDSALLQQDYPQFVQYHHRAIQRLSTVPKTLSSMGIQRSLR

SEQ ID NO: 1932 - protein, 538 aa, Unknown
  Description of Unknown: uncultivated organism sequence
  Category: MG81 effectors
  Description: MG81-210 effector
MILLANNNNNNNNNNNNNNNTDTCVLTLPLRVEKWQEDCLLKRFEAARRIYNSLLNFELKKLRQLERTVEYRQIQSVISSAYRSNTKDSPECKDAFKRREKLISANGISEYGFKSDVKFFYKHFDGLIGSSVAVHCIAVQLWAAFDKYLRGSGKEIHFKRLGEISSLKGYSVKGKSGGLEIIFRGQYVEWTRKKKKLLLPLKIDPDNEYEREMLSRRVKYVRIIKKPGKNRLRWYAQLTLEGKPALKYSAETGKPIHSVGKGDVGIDIGPQTVAYASDKEVALLELADRVTNIEHQKKKLQRKLDRSRRATNPDNYKPDGTIKRGVKLTRNKSKRYLKLQSKLAYIQHRQAEIRKLQHTCLANHMLTLGDRFFVEKMNWPGLAHRAKETSISEKTGRYKRKKRFGKSLANKAPAMFISILKQKCETLGLPGVVEVDTFRLKASQYNHLSDTCEKKSLSERWNYMPISDGSDSSKTKRIQRDLYSAFLLQHTIPQSCSFDKEALRIDYPNFVTMHDAEIHRLESLPKTITSMGVRRSHS

SEQ ID NO: 1933 - protein, 528 aa, Unknown
  Description of Unknown: uncultivated organism sequence
  Category: MG81 effectors
  Description: MG81-211 effector
MILLAKNNNNTDTCVLTLPLRVEKWQEDCLLKRFEAARRIYNSLLNFELKKLRQLERTVEYRQIQSVISSAYRSNTKDSPECKDAFKRREKLISANGISEYGFKSDVKFFYKHFDGLIGSNVAVHCIAVQLWAAFDKYLRGSGKEIHFKRLGDISSLKGYSVKGKSGGCEIIFRGQYIEWTRKKKKLLLPLKIDPDNEYEREMLSRRVKYVRIIKKPGKNRLRWYAQLTLEGKPALKYSAETGKPIHSVGKGNVGIDIGPQTVAYASDKEVALLELADRVTNIEHQKKKLQRKLDRSRRATNPDNYKPDGTIKRGVKLTRNKSKRYLKLQSKLAYIQHRQAEIRKLQHTCLANHMLTLGDRFFVEKMNWPGLAHRAKETSISEKTGRYKRKKRFGKSLANKAPAMFISILKRKCETLGLPGVVEVDTYSLKASQYNHLSDTYEKKSLSERWNYMPISDGSDSSKTKRIQRDLYSAFLLQHTIPQPCSFDKKALRIDYPNFVTMHDAEIHRLESLPKTITSMGVRRSHS

SEQ ID NO: 1934 - protein, 511 aa, Unknown
  Description of Unknown: uncultivated organism sequence
  Category: MG81 effectors
  Description: MG81-212 effector
MGKSSTDTCCLTLPLKLEKWQEDRLAKRFEIARQIYNTMVRAELKKLDRVKQLPEYRKNQKEIQALDWKNSADKQRLKELYGNQRKILQKQGFTEYGFKSDSKDYYKHFIENIGSSVATHGIAPQVWNAFDKMLFQKDGKVVHFKRYGDVHSLKGGSVTNKSGGAEIMFRKTYIEWKGLKLPLKLSPNNAYEAEMLSYRVKYVRILRTRGKTKDRWYAQLSLEGKPAVKYDSSTGKPVHPVGRGAVGLDIGPQTLAYAAANEANLVELADQVQNIEQEKRRLQRKLDRSRRATNPDNYNENGTIRRGVKLTHNKSKRYCKLQKELSWIQHYQAETRKRQHIALANHLLSLGDCFYVEPMAWPSLTHRAKKTEVSEKTGRIKRKKRFGKSVANKAPASLIGILKLKCISLGLTGVVEVPMLLKASQYNHQSKDYAPKSLSQRWNDMPDGNRIQRDLYSAFLLQHYDSRSESFDQETLERDYPQFVRLHNQTIQRLSALPKTPSSMGIRRSVS

SEQ ID NO: 1935 - protein, 528 aa, Unknown
  Description of Unknown: uncultivated organism sequence
  Category: MG81 effectors
  Description: MG81-213 effector
MILLTKNNNNTDTCVLTLPLRVEKWQEDCLLKRFEAARRIYNSLLNFELKKLRQLERTVEYRQIQSVISSAYRSNTKDSPECKDAFKRREKLISANGISENGFKSDVKFFYKHFDGLIGSNVAVHCIAVQLWAAFNKYLSGSGKEIHFKRLGEISSLKGYSVKGKSGGREIIFRGQYIEWTRKKKKLLLPLKIDPDNEYEREMLSRRVKYVRIIKKPGKNRLRWYAQLTLEGKPALKYSAETGKPIHSVGKGNVGIDIGPQTIAYASDKEVALLELADRVTNIEHQKKKLQRKLDRSRRATNPDNYKPDGTIKRGVKLTRNKSKRYLKLQSKLAYIQHRQAEIRKLQHTCLANHMLTLGDRFFVEKMNWPGLAHRAKETSISEKTGRYKRKKRFGKSLANKAPAMFISILKRKCETLGLPGVVEVDTFRLRASQYNHLSDTYEKKSLSERWNYMPISDGSDSSKTKRIQRDLYSAFLLQHTIPQPCSFDKEALRIDYPNFVIMHDAEIHRLESLPKTVTSMGVRRSHS

SEQ ID NO: 1936 - protein, 528 aa, Unknown
  Description of Unknown: uncultivated organism sequence
  Category: MG81 effectors
  Description: MG81-214 effector
MILLTKNNNNTDTCVLTLPLRVEKWQEDCLLKRFEAARRIYNSLLNFELKKLRQLERTVEYRQIQSVISSAYRSNTKDSPECKDAFKRREKLISANGLAEYGFKSDVKFFYKHFDGLIGSNVAVHCIAVQLWAAFNKYLSGSGKEIHFKRLGEISSLKGYSVKGKSGGREIIFRGQYIEWTRKKKKLLLPLKIDPDNEYEREMLSRRVKYVRIIKKPGKNRLRWYAQLTLEGKPALKYSAETGKPIHSVGKGNVGIDIGPQTIAYASDKEVALLELADRVTNIEHQKKKLQRKLDRSRRATNPDNYKPDGTIKRGVKLTRNKSKRYLKLQSKLAYIQHRQAEIRKLQHTCLANHMLTLGDRFFVEKMNWSGLAHRAKETSISEKTGRYKRKKRFGKSLANKAPAMFISILKRKCETLGLPGVVEVDTYSLKASQYNHLSDTYEKKSLSERWNYMPISDGSDSSKTKRIQRDLYSAFLLQHTIPQPCSFDKEALRIDYPNFVIMHDAEIHRLESLPKTVTSMGVRRSHS

SEQ ID NO: 1937 - protein, 561 aa, Unknown
  Description of Unknown: uncultivated organism sequence
  Category: MG81 effectors
  Description: MG81-215 effector
MSNLLFLLENEEKEKDGATCCLTLPLKLEKWQSDHLEKRFEIARQLYNTLVHAELKRIHRIERMPEYREIERQIEATTDKKEKWALKNQKKQFLRKNGINRNTFTTDMKRLYKHFNDNIGSNVAQHGIVSQVLTAFEKVYIENQSGEVHFKKPGDLRSVQGYSQKESGGKEIMFRNGKIIWTQQENDDRKKSPKYQQRKKRQNYKGVKGIAREFPVVFSKNNPYEAEMLTKHVKFVRILRKDGKTKPHWYAQLVLEGTPVAKYDPISGAPKHPVGHGVVGIDIGTRTLAYSTDSEVNLLELADRVQNIEQEKRRLQRKMDRSRRAMNPENYNSDGTFKRGVKLTRNKSKRYRRIQHQLAMIQHHQADIRKQQHNELANYLLTLGDCFFVENMSYCDLVHRANKTEISEKTGRYKRKKRFGKSIANKAPAMLITMLKQKCQSRGLEGVKEVDTHVRASQYNHQTDTCIEKALENRWNVMPDGERIQRDLYSAFLLQHCKQGLPEYNRKELKKEFGEELYRVFDREALQRDYPQFVAYHHMTIQRLSELPHTIPSMGIRRIIS

SEQ ID NO: 1938 - protein, 531 aa, Unknown
  Description of Unknown: uncultivated organism sequence
  Category: MG81 effectors
  Description: MG81-216 effector
MILLANNNNNNNNTDTCVLTLPLRVEKWQEDCLLKRFEAARRIYNSLLNFELKKLRQLERTVEYRQIQSVISSAYRSNTKDSLECKDAFKRREKLISANGISENGFKSDVKFFYKHFDGLIGSNVAVHCIAVQLWAAFDKYLSGSGKEIHFKRLGDISSLKGYSVKGKSGGCEIIFRGQYVEWTRKKKKLLLPLKIDPDNEYEREMLSRRVKYVRIIKKPGKNRLRWYAQLTLEGKPALKYSAGTGKPIHSVGKGNVGIDIGPQTVAYASDKEVALLELADRVTNIEHQKKKLQRKLDRSRRATNPDNYKPDGTIKRGVKLTRNKSKRYLKLQSKLAYIQHRQAEIRKLQHTCLANHMLTLGDRFFVEKMNWPGLAHRAKETSISEKTGRYKRKKRFGKSLANKAPAMFISILKRKCETLGLPGVVEVDTYNLKASQYNHLSDTYEKKSLSERWNYMPISDGSDSSKTKRIQRDLYSAFLLQHTIPQPCSFDKEALRIDYPNFVIMHDAEIHRLESLPKTVTSMGVRRSHS

SEQ ID NO: 1939 - protein, 534 aa, Unknown
  Description of Unknown: uncultivated organism sequence
  Category: MG81 effectors
  Description: MG81-217 effector
MILLANNNNNNNNNNNTDTCVLTLPLRVEKWQEDCLLKRFEAARRIYNSLLNFELKKLRQLERTVEYRQIQSVISSAYRSNTKDSPECKDAFKRREKLISANGISENGFKSDVKFFYKHFDGLIGSNVAVHCIAVQLWAAFDKFLSGSGKEIHFKRLGDISSLKGYSVKGKSGGREIIFRGQYVEWTKKKKKLLLPLKIDPDNEYEREMLSRRVKYVRIIKKPGKNRLRWYAQLTLEGKPALKYSAETGKPIHSVGKGNVGIDIGPQTVAYASDKEVALLELADRVTNIEHQKKKLQRKLDRSRRATNPDNYKPDGTIKRGVKLTRNKSKRYLKLQSKLAYIQHRQAEIRKLQHTCLANHMLTLGDRFFVEKMNWPGLAHRAKETSISEKTGRYKRKKRFGKSLANKAPAMFISILKRKCETLGLPGVVEVDTYSLKASQYNHLSDTYEKKSLSERWNYMPISDGSDSSKTKRIQRDLYSAFLLQHTIPHPCSFDKEALRIDYPNFVIMHDAEIHRLESLPKTVTSMGVRRSHS

SEQ ID NO: 1940 - protein, 534 aa, Unknown
  Description of Unknown: uncultivated organism sequence
  Category: MG81 effectors
  Description: MG81-218 effector
MANNNNNNNNNNNNNNTDTCVLTLPLRVEKWQEDCLLKRFEAARRIYNSLLNFELKKLRQLERTVEYRQIQSVISSAYRSNTKDSPECKDAFKRREKLISANGISENGFKSDVKFFYKHFDGLIGSNVAVHCIAVQLWAAFDKYLSGSGKEIHFKRLGDISSLKGYSVKGKSGGREIIFRGQYVEWTRKKKKLLLPLKIDPDNEYEREMLSRRVKYVRIIKKPGKNRLRWYAQLTLEGKPALKYSAETGKPIHSVGKGNVGIDIGPQTVAYASDKEVALLELADRVTNIEHQKKKLQRKLDRSRRATNPDNYKPDGTIKRGVKLTRNKSKRYLKLQSKLAYIQHRQAEIRKLQHTCLANHMLTLGDRFFVEKMNWPSLAHRAKETSISEKTGRYKRKKRFGKSLANKAPAMFISILKRKCETLGLPGVVEVDTYSLKASQYNHLSDTYEKKSLSERWNYMPISDGSDSSKTKRIQRDLYSAFLLQHTIPQPCSFDKEALRIDYPNFVTMHDAEIHRLESLPKTITSMGVRRSHS

SEQ ID NO: 1941 - protein, 527 aa, Unknown
  Description of Unknown: uncultivated organism sequence
  Category: MG81 effectors
  Description: MG81-219 effector
MAKNNNNNNTDTCVLTLPLRVEKWQEDCLLKRFEAARRIYNSLLNFELKKLRQLERTVEYRQIQSVISSAYRSNTKDSPECKDAFKRREKLISANGISENGFKSDVKFFYKHFDGLIGSNVAVHCIAVQLWAAFDKYLSGSGKEIHFKRLGDISSLKGYSVKGKSGGGEIIFRGQYVEWTRKKKKLLLPLKIDPDNEYEREMLSRRVKYVRIIKKPGKNRLRWYAQLTLEGKPALKYSAETGKPIHSVGKGNVGIDIGPQTVAYASDKEVALLELADRVTNIEHQKKKLQRKLDRSRRATNPDNYKPDGTIKCGVKLTRNKSKRYLKLQSKLAYIQHRQAEIRKLQHTCLANHMLTLGDRFFVEKMNWPGLAHRAKETSISEKTGRYKRKKRFGKSLANKAPAMFISILKRKCETLGLPGVVEVDTFRLRASQYNHLSDTYEKKSLSERWNYMPISDGSDSSKTKRIQRDLYSAFLLQHTIPQPCSFDKEALRIDYPNFVIMHDAEIHRLESLPKTITSMGVRRSHS

SEQ ID NO: 1942 - protein, 540 aa, Unknown
  Description of Unknown: uncultivated organism sequence
  Category: MG81 effectors
  Description: MG81-220 effector
MMYNTKYQAKRGDPVGEKNNNDTDTCVLTLPLRVEKWQEDCLLKRFEAARRIYNSLLNFELKKLRQLERTVEYRQIQSVISSAYRSNTKDSPECKDAFKRRKKLTDENGISEYGFKSDVKFFYKHFDGLIGSSVAVHCIAVQLWAAFDKYLRGNGKEIHFKRLGDISSLKGYSVRGKSGGCEIIFRGQYVEWTRKKKKLLLPLKIDPDNEYEREMLSRRVKYVRIIKKPGKNRLRWYAQLTLEGKPALKYSAETGKPIHSVGKGNVGIDIGPQTVAYASDKEVALLELADRVTNIEHQKKKLQRKLDRSRRTTNPDNYKPDGTIKRGVKLTRNKSKRYLKLQSKLAYIQHRQAEIRKLQHTCLANHMLTLGDRFFVEKMNWPGLAHRAKETSISEKTGRYKRKKRFGKSLANKAPAMFISILKRKCETLGLPGVVEVDTYSLRASQYNHLSDTYEKKSLSERWNYMPISDGSDSSKTKRIQRDLYSAFLLQHTIPQPCSFDKEALRIDYPNFVTMHDAEIHRLESLPKTVTSMGVRRSHS

SEQ ID NO: 1943 - protein, 511 aa, Unknown
  Description of Unknown: uncultivated organism sequence
  Category: MG81 effectors
  Description: MG81-221 effector
MGKSSTNTCCLTLPLKLEKWQEDRLAKRFEIARQIYNTMVRAELKRLRQVEQSPQYRSNKKAIQALDWKNTADKPKLKTLYRERDKLLKGGGFTEYGFKSDIKNFYKHFAENIGSSVAVHGIAPQVWAAFERVLFKKEGKKVHFKKTGDIRSLRGYSVTGKSGGVEIIFRGSYIEWKGLNLPLKLSPDNAYETEMLSYRVKYVRILRKPGKTRDRWYAQLSLEGKPAIKRNPASGNPVHPVGQGAVGLDIGPQTLAYAAEKEANLVELADRVQNIEQEKHLLQRKMDRSRRAANPDNYAENGTIRRGVKLTHNKSKRYLRLQRELCYLQHCQAETRKRQHTELANHLLSLGSCFYVEDMAWPSLTHRAKKTEISDKTGRIKRKKRFGKSIANKAPAALINILRTKCVSLGIPGVVEVPTSLKASQYNHQSKEYTPKPLSQRWNDMPDGSRIQRDLYSAFLLQHYDPQSGNFDQASLEADYPQFVQLHNQSIQRLLTVPKTPSSMGIRRSVS

SEQ ID NO: 1944 - protein, 524 aa, Unknown
  Description of Unknown: uncultivated organism sequence
  Category: MG81 effectors
  Description: MG81-222 effector
MAKNNNTDTCVLTLPLRVEKWQEDCLLKRFEAARRIYNSLLNFELKKLRQLERTVEYRQIQSVISSAYRSNTKDSPECKDAFKRREKLISANGISENGFKSDVKFFYKHFDGLIGSSVAVHCIAVQLWAAFDKYLSGSGKEIHFKRLGDISSLKGYSVKGKSGGCEIIFRGQYVEWTRKKKKLLLPLKIDPDNEYEREMLSRRVKYVRIIKKPGKNRLRWYAQLTLEGKPALKYSAETGKPIHSVGKGNVGIDIGPQTVAYASDKEVALLELADRVTNIEHQKKKLQRKLDRSRRATNPDNYKPDGTIKRGVKLTRNKSKRYLKLQSKLAYIQHRQAEIRKLQHTCLANHMLTLGDRFFVEKMNWPGLAHRAKETSISEKTGRYKRKKRFGKSLANKAPAMFISILKRKCETLGLPGVVEVDTFRLRASQYNHLSDTYEKKSLSERWNYMPISDGSDSSKTKRIQRDLYSAFLLQHTIPQPCSFDKEALRIDYPNFVIMHDAEIHRLESLPKTITSMGVRRSHS

SEQ ID NO: 1945 - protein, 526 aa, Unknown
  Description of Unknown: uncultivated organism sequence
  Category: MG81 effectors
  Description: MG81-223 effector
MAKKNNNDTDTCVLTLPLRVEKWQEDCLLKRFEAARRIYNSLLNFELKKLRQLERTVEYRQIQSVISSAYRSNTKDSPECKDAFKRREKLISANGISEYGFKSDVKFFYKHFDGLIGSSVAAHCIAVQLWAAFDKYLRGSGKEIHFKRLGEISSLKGYSVKGKSGGLEIIFRGQYVEWTRKKKKLLLPLKIDPDNEYEREMLSRRVKYVRIIKKPGKNRLRWYAQLTLEGKPALKYSAETGKPIHSVGKGDVGIDIGPQTVAYASDKEVALLELADRVTNIEHQKKKLQRKLDRSRRATNPDNYKPDGTIKRGVKLTRNKSKRYLKLQSKLAYIQHRQAEIRKLQHTCLANHMLTLGDRFFVEKMNWPGLAHRAKETSISEKTGRYKRKKRFGKSLANKAPAMFISILKRKCETLGLPGVVEVDTFRLKASQYNHLSDTYEKKSLSERWNYMPISDGSDSSKTKRIQRDLYSAFLLQHTIPQPCSFDKEALREDYPNFVTMHDAEIHRLEYLPKTITSMGVRRSHS

SEQ ID NO: 1946 - protein, 529 aa, Unknown
  Description of Unknown: uncultivated organism sequence
  Category: MG81 effectors
  Description: MG81-224 effector
MANNNNNNNNNTDTCVLTLPLRVEKWQEDCLLKRFEAARRIYNSLLNFELKKLRQLERTVEYRQIQSVISSAYRSNTKDSPECKDAFKRREKLISANGISENGFKSDVKFFYKHFDGLIGSNVAVHCIAVQLWAAFDKYLSGSGKEIHFKRLGDISSLKGYSVKGKSGGCEIIFRGQYVEWTRKKKKLLLPLKIDPDNEYEREMLSRRVKYVRIIKKPGKNRLRWYAQLTLEGKPALKYSAGTGKPIHSVGKGNVGIDIGPQTVAYASDKEVALLELADRVTNIEHQKKKLQRKLDRSRRATNPDNYKPDGTIKRGVKLTRNKSKRYLKLQSKLAYIQHRQAEIRKLQHTCLANHMLTLGDRFFVEKMNWPGLAHRAKETSISEKTGRYKRKKRFGKSLANKAPAMFISILKRKCETLGLPGVVEVDTFRLRASQYNHLSDTYEKKSLSERWNYMPISDGSDSSKTKRIQRDLYSAFLLQHTIPQPCSFDKEALRIDYPNFVIMHDAEIHRLESLPKTITSMGVRRSHS

SEQ ID NO: 1947 - protein, 528 aa, Unknown
  Description of Unknown: uncultivated organism sequence
  Category: MG81 effectors
  Description: MG81-225 effector
MILLANNNNNTDTCVLTLPLRVEKWQEDCLLKRFEAARRIYNSLLNFELKKLRQLERTVEYRQVQSVISNAYRSNTKDSPECKAALKRREKLIDENGLTKNGFKNDVKFFYKHFDGLIGSSVAVHCIAVQLWAAFNKYLCGNGKEIHFKRLGDISSLKGYSVKGKSGGCEIIFRGQYVEWTRKKKKLLLPLKIDPDNEYEREMLSRRVKYVRIIKKPGKNRLRWYAQLTLEGKPALKYSAETGKPIHSVGKGDVGIDIGPQTVAYASDKEVALLELADRVTNIEHQKKKLQRKLDRSRRATNPDNYKPDGTIKRGVKLTRNKSKRYLKLQSKLAYIQHRQAEIRKLQHTCLANHMLTLGDRFFVEKMNWPGLAHRAKETSISEKTGRYKRKKRFGKSLANKAPAMFISILKQKCETLGLPGVVEVDTFRLKASQYNHLSDTCEKKSLSERWNYMPISDGSDSSKTKRIQRDLYSAFLLQHTIPQSCSFDKEALRIDYPNFVTMHDAEIHRLESLPKTITSMGVRRSHS

SEQ ID NO: 1948 - protein, 528 aa, Unknown
  Description of Unknown: uncultivated organism sequence
  Category: MG81 effectors
  Description: MG81-226 effector
MILLANNNNNTDTCVLTLPLRVEKWQEDCLLKRFEAARRIYNSLLNFELKKLRQLERTVEYRQIQSVISSAYRSNTKDSPECKAALKRREKLIDENGLTKNGFKNDVKFFYKHFDGLIGSNVAVHCIAVQLWAAFDKYLRGSGKEIHFKRLGDISSLKGYSVKGKSGGREIIFRGQYIEWTRKKKKLLLPLKIDPDNEYEREMLSRRVKYVRIIKKPGKNRLRWYAQLTLEGKPALKYSAGTGKPIHSVGKGNVGIDIGPQTVAYASDKEVALLELADRVTNIEHQKKKLQRKLDRSRRATNPDNYKPDGTIKRGVKLTRNKSKRYLKLQSKLAYIQHRQAEIRKLQHTCLANHMLTLGDRFFVEKMNWPGLAHRAKETSISEKTGRYKRKKRFGKSLANKAPAMFISILKRKCETLGLPGVVEVDTYSLKASQYNHLSDTYEKKSLSERWNYMPISDGSDSSKTKRIQRDLYSAFLLQHTIPQPCSFDKEALRIDYPNFVTMHDAEIHRLESLPKTVTSMGVRRSHS

SEQ ID NO: 1949 - protein, 530 aa, Unknown
  Description of Unknown: uncultivated organism sequence
  Category: MG81 effectors
  Description: MG81-227 effector
MILLANNNNNNNTDTCVLTLPLRVEKWQEDCLLKRFEAARRIYNSLLNFELKKLRQLERTVEYRQIQSVISSAYRSNTKDSPECKDAFKRREKLISANGISKNGFKSDVKFFYKHFDGLIGSSVAVHCIAVQLWAAFDKYLSGSGKEIHFKRLGDISSLKGYSVKGKSGGCEIIFRGQYVEWTRKKKKLLLPLKIDPDNEYEREMLSRRVKYVRIIKKPGKNRLRWYAQLTLEGKPALKYSAETGKPIHSVGKGNVGIDIGPQTVAYASDKEVALLELADRVTNIEHQKKKLQRKLDRSRRATNPDNYKPDGTIKRGVKLTRNKSKRYLKLQSKLAYIQHRQAEIRKLQHTCLANHMLTLGDRFFVEKMNWPGLAHRAKETSISEKTGRYKRKKRFGKSLANKAPAMFISILKRKCETLGLPGVVEVDTYNLKASQYNHLSDTCEKKSLSERWNYMPISDGSDSSKTKRIQRDLYSAFLLQHTIPQPCSFDKEALRIDYPNFVIMHDAEIHRLESLPKTITSMGVRRSHS

SEQ ID NO: 1950 - protein, 529 aa, Unknown
  Description of Unknown: uncultivated organism sequence
  Category: MG81 effectors
  Description: MG81-228 effector
MILLANNNNNNTDTCVLTLPLRVEKWQEDCLLKRFEAARRIYNSLLNFELKKLRQLERTVEYRQIQSVISSAYRSNTKDSLECKDAFKRRKKLTDANGISENGFKSDVKFFYKHFDGLIGSNVAVHCIAVQLWAAFDKYLSGSGKEIHFKRLGDISSLKGYSVKGKSGGCEIIFRGQYVEWTRKKKKLLLPLKIDPDNEYEREMLSKRVKYVRIIKKPGKNRLRWYAQLTLEGKPALKYSAETGKPIHSVGKGNVGIDIGPQTVAYASDKEVALLELADRVTNIEHQKKKLQRKLDRSRRATNPDNYKPDGTIKRGVKLTRNKSKRYLKLQSKLAYIQHRQAEIRKLQHTCLANHMLTLGDRFFVEKMNWPGLAHRAKETSISEKTGRYKRKKRFGKSLANKAPAMFISILKRKCETLGLPGVVEVDTYSLKASQYNHLSDTYEKKSLSERWNYMPISDGSDSSKTKRIQRDLYSAFLLQHTIPQPCSFDKEALRIDYPNFVTMHDAEIHRLESLPKTITSMGVRRSHS

SEQ ID NO: 1951 - protein, 529 aa, Unknown
  Description of Unknown: uncultivated organism sequence
  Category: MG81 effectors
  Description: MG81-229 effector
MILLAKNNNNNTDTCVLTLPLRVEKWQEDCLLKRFEAARRIYNSLLNFELKKLRQLERTVEYRQIQSVISSAYRSNTKDSPECKDAFKRREKLISANGISEYGFKSDVKFFYKHFDGLIGSSVAVHCIAVQLWAAFDKYLSGSGKEIHFKRLGDISSLKGYSVKGKSGGREIIFRGQYIEWTRKKKKLLLPLKIDPDNEYEREMLSRRVKYVRIIKKPGKNRLRWYAQLTLEGKPALKYSAGTGKPIHSVGNGDVGIDIGPQTVAYASDKEVALLELADRVTNIEHQKKKLQRKLDRSRRATNPDNYKPDGTIKRGVKLTHNKSKRYLKLQSKLAYIQHRQAEIRKLQHTCLANHMLTLGDRFFVEKMNWPGLAHRAKETSISEKTGRYKRKKRFGKSLANKAPAMFISILKRKCETLGLPGVVEVDTYSLKASQYNHLSDTYEKKSLSERWNYMPISDGSDSSKTKRIQRDLYSAFLLQHTIPQPCSFDKEALRIDYPNFVTMHDAEIHRLGSLPKTITSMGVRRSHS

SEQ ID NO: 1952 - protein, 511 aa, Unknown
  Description of Unknown: uncultivated organism sequence
  Category: MG81 effectors
  Description: MG81-230 effector
MAKCSTDTCCLTLPLRLEKWQEDRLAKRFEIARQIYNTMVRAELKKLRAMEQSEPYKANQEKIQALDWKTQTDKQALKALYKERDKLLRDGGFSEYGFKSDIKNYYKHFNNNIGSNVAFHGIAPQVWAAFEKMLFKKEGKKVHFKKKGDIHSLRGYSAAGKSGGVEIIFRETYIEWKGLKLPLKLPPDNIYETQMLSYRVKYVRLLRKPGKRKDRWYAQLSLEGKPVIKYNPKTGEVRHPIGKGAVGLDIGPQTLAYSAATGADLVELANQVQNVEQEKRRLQRKLDRSRRATNPGNYADDGTIRRGIALTHNKSKRYLRTQQELKYLQHQQAEIRKRQHTELANHLLSLGDCFYVEKMVWTSLTHRAKETEISEKTGKIKRKKRFGKSVANKAPATLIGILQRKSAALGIPGVIEVPTSVKASQYNHQSGTYTPKPLSQRWNNMPDGERIQRDLYSAFLLQHYDPQTNTFDANSLHQDYPQFVQYHHDAVLRLYAMPKTPSSMGIKRSLR

SEQ ID NO: 1953 - protein, 511 aa, Unknown
  Description of Unknown: uncultivated organism sequence
  Category: MG81 effectors
  Description: MG81-231 effector
MAKCSTDTCCLTLPLRLEKWQEDRLAKRFEIARQIYNTMVRAELKKLRAMEQSEPYKANQEKIQALDWKTQADKQTLKALYKERDKLLRDGGFSEYGFKSDIKNYYKHFNNNIGSSVAVHGIAPQVWAAFEKMLFKKEGKKVHFKKKGDIRSLRGYSATGKSGGVEIIFRETYIEWKGLKLPLKLSPDNIYETQMLSYRVKYVRLLRKPGKRKDRWYAQLSLEGKPVIKYNPKTGEVRHPIGKGAVGLDIGPQTLAYSAATGADLVELANQVQNVEQEKRRLQRKLDRSRRATNPGNYADDGTIRRGIALTHNKSKRYLRTQQELKYLQHQQAEIRKRQHTELANHLLSLGDCFYVEKMVWTSLTHRAKETEISEKTGKIKRKKRFGKSVANKAPATLIGILQRKSAALGIPGVIEVPTSVKASQYNHQSGTYTPKPLSQRWNNMPDGERIQRDLYSAFLLQHYDPQTNTFDANSLHQDYPQFVQYHHDAVLRLYAMPKTPSSMGIKRSLR

SEQ ID NO: 1954 - protein, 511 aa, Unknown
  Description of Unknown: uncultivated organism sequence
  Category: MG81 effectors
  Description: MG81-232 effector
MAQRHSTPTCCLTLPLQLEKWQEDRLIKRFEIAGKIYNALLNAELKKLHRLEQLPEYKEIQSQLKAYYQNNLPKTAAFKELNNRRSKLLSEHGFSEYAFKGDMKKFYKHFSSNIGSSVATHCIASQVWSAFEKRLFGGGKFVHFKKSGDIRSLKGFSSSRKSGGVEIMFRGDHIEWKGLLLRLKLDPDNQYESEMLSRRIKYVRIIRKPGKAKWRWYAQLSVEGLPAIKRNDETGEPVHPIGRGAVGIDIGPQTIAYVSQTEVALKELADRVQNIEHEKRLIQRKLDRSRRATNPANYDDNGTIKRGVKLTRNKSKRYLKLQMELSFLQHKQAEIRKQQHINLANHLLSLGDCFYVEDMAWSSLARKAKETAVSEKTGKYKRKKRFGKSIANKAPASLISILDQKCTSLGLLGVIKVPTSVRASQYNHITKSYEKKTLSQRWNIMPDGRRIQRDIYSAFLLQHVTPQRDGFSDEALQQDYENFVSLHDSVIQQLRLMPKTIASMGIRRTYS

SEQ ID NO: 1955 - protein, 528 aa, Unknown
  Description of Unknown: uncultivated organism sequence
  Category: MG81 effectors
  Description: MG81-233 effector
MAKNNNNNNNTDTCVLTLPLRVEKWQEDCLLKRFEAARRIYNSLLNFELKKLRQLERTVEYRQIQSVISSAYRSNTKDSPECKAALKRREKLIDENGLTKNGFKNDVKFFYKHFDGLIGSSVAVHCIAVQLWAAFNKYLCGNGKEIHFKRLGDISSLKGYSVKGKSGGCEIIFRGQYVEWTRKKKKLLLPLKIDPDNEYEREMLSRRVKYVRIIKKPGKNRLRWYAQLTLEGKPALKYSAETGKPIHSVGKGDVGIDIGPQTVAYASDKEVALLELADRVTNIEHQKKKLQRKLDRSRRATNPDNYKPDGTIKRGVKLTRNKSKRYLKLQSKLAYIQHRQAEIRKLQHTCLANHMLTLGDRFFVEKMNWPGLAHRAKETSISEKTGRYKRKKRFGKSLANKAPAMFISILKQKCETLGLPGVVEVDTFRLKASQYNHLSDTCEKKSLSERWNYMPISDGSDSSKTKRIQRDLYSAFLLQHTIPQSCSFDKEALRIDYPNFVTMHDAEIHRLESLPKTITSMGVRRSHS

SEQ ID NO: 1956 - protein, 376 aa, Unknown
  Description of Unknown: uncultivated organism sequence
  Category: MG81 effectors
  Description: MG81-234 effector
MISALSGTISRHKNKIVKITLKFRLRDKHAAELNRQAHAVNFVWNYCNETQQKAVAYQRRWLSGYDLWKLVAGCAKQGLDLQAHSAMRVCMQYDKSRRQHKKRWLRWRGKKSLGWVPFNTDAVKFRGGAFVFRKTRYETMHLREMKDGIKIGAGSFNQDSRGRRYLNCPVDIAEANSAPNARVGIDLGLHSFATTSDGEKIKAPQFYRKNEAFLATAQRAKKTKRVKAIHAKIANRRKDFLHKESAKLTKQYGLIVVGDVSPSKLAKTLMAKSVLDAGWADFKNTLRYKSIRNGGSTIEVSEAYSSQVCSACGSLPASRPKGIANLGIREWTCDCCGTVHDRDCNAAKNILRSGLATLVEGARQNGSSHDERKQMN

SEQ ID NO: 1957 - protein, 509 aa, Unknown
  Description of Unknown: uncultivated organism sequence
  Category: MG81 effectors
  Description: MG81-235 effector
MPYSDVLKVVALSDKIRKAGNELVGLMRKNYNQLMRTKRYRKLLFLYGNTKDKDKRKTYAKQLNEMQKAYNITWEYCRTSMIPIGKKYGVDAVFALTKAEDIWRGIEKCLYGNGNAVHFSRYGELPCIRAKQINRGIPISVTDNKLHFKLGRMVFGIQINDRFQHDEVDAVLSYLAESEILDDRAVNTLIKDGCCIDTYRPCYATLVPRMIRGKYRVYLHLTIEGKAKPKYDKHGSPRHKLGKGMIGADIGTQTVAYTSDTEVGLKNLSERGNSIQTSERKERLLHRAMDRSRRATNPQNYNDDGTVKKGRKTWIYSNHYKKLKEKYSELCRINAINRQLAINEDANHLRSLGDVFITEPKNAGKLMRRAKETTVNSKGKFNRKKRFGRSIKNRCPSGFQTAVEQKFKVSGGIYIEVSNDYRASQYDHTIDDYIKKKLSDRMYKLQDGTEVQRDWYSSFLLYCYDYRTKDINKNKCISEFDKCYNKEKALIEWIKVNEIKVLNSGIKIA

SEQ ID NO: 1958 - protein, 527 aa, Unknown
  Description of Unknown: uncultivated organism sequence
  Category: MG81 effectors
  Description: MG81-236 effector
MAKKNNNNNTDTCVLTLPLRVEKWQEDCLLKRFEAARRIYNSLLNFELKKLRQLERTVEYRQIQSVISSAYRSNTKDSPECKAALKRREKLIDENGLTKNGFKNDVKFFCKHFDGLIGSSVAVHCIAVQLWAAFNKYLCGNGKEIHFKRLGDISSLKGYSVKGKSGGCEIIFRGQYVEWTRKKKKLLLPLKIDPDNEYEREMLSRRVKYVRIIKKPGKNRLRWYAQLTLEGKPALKYSAETGKPIHSVGKGDVGIDIGPQTVAYASDKEVALLELADRVTNIEHQKKKLQRKLDRSRRATNPDNYKPDGTIKRGVKLTRNKSKRYLKLQSKLAYIQHRQAEIRKLQHTCLANHMLTLGDRFFVEKMNWPGLAHRAKETSISEKTGRYKRKKRFGKSLANKAPAMFISILKQKCETLGLPGVVEVDTFRLKASQYNHLSDTCEKKSLSERWNYMPISDGSDSSKTKRIQRDLYSAFLLQHTIPQSCSFDKEALRIDYPNFVTMHDAEIHRLESLPKTITSMGVRRSHS

SEQ ID NO: 1959 - protein, 511 aa, Unknown
  Description of Unknown: uncultivated organism sequence
  Category: MG81 effectors
  Description: MG81-237 effector
MAQRHSTPTCCLTLPLQLEKWQEDRLIKRFEIAGKIYNALLNAELKKLHRLEQLPEYKEIQSQLKAYYQNNLPKTAAFKELNNRRSKLLSEHGFSEYAFKGDIKKFYKHFSSNIGSSVATHCIASQVWSAFEKRLFGGGKFVHFKKSGDIRSLKGFSSSRKSGGVEIMFRGDHIEWKGLLLRLKLDPDNQYESEMLSRRIKYVRIIRKPGKAKWRWYAQLSVEGLPAIKRNDETGEPVHPIGRGAVGIDIGPQTIAYVSQTEVALKELADRVQNIEHEKRLIQRKLDRSRRATNPANYADNGTIKRGVKLTRNKSKRYLKLQMELSFLQHKQAEIRKQQHINLANHLLSLGDCFYVEDMAWSSLARKAKETAVSEKTGKYKRKKRFGKSIANKAPASLISILDQKCTSLGLLGVIKVPTSVRASQYNHITKSYEKKTLSQRWNIMPDGRRIQRDIYSAFLLQHVTPQRDGFSDEALQQDYENFVSLHDSVIQQLRLMPKTIASMGIRRTYS

SEQ ID NO: 1960 - protein, 511 aa, Unknown
  Description of Unknown: uncultivated organism sequence
  Category: MG81 effectors
  Description: MG81-238 effector
MGKSKTETCCLTLPLKLEKWQEDRLAKRFEIARQIYNTLVHAELKKLNQIERSSEYQTIQDQITNLDRNDPERIKELPSLYKKRTKLLRDAGFTEYGFKSDVKYYYKYFHKNIGSSVAVHGIAPQVWAAFEKKLFKKQGKIVHYKRKGTLRSVKGGSATGKSGGTEIIFRGTYIQWKDLNLPLKRSPDNAYESEMLGYRVKYVRILRKPGKSKNRWYAQLVLEGKPVIKRNPMTGAALHPVGHGAVGLDIGPQTLAYSAADGVGLLELADQVQNIERQKALLQRKLDRSRRASNPDNYNEDGTIKRGVKLTRNQSKRYCKTQRDLAYLQHCQAETRKRQHIALANHLLTLGDRFYVEQMSWVALARRSKKTEVSEKTGKIKRKKRFGKSIANKAPAMLIEILRQKCISLGLPGVVDVPTSIKASQYNHQSKDYIKKNLSERWNDMPDGEKIQRDLYSAFLLQHCTPELNAFDQESLQQDYPRFVQYHHQVMQQLSEMPKTPSSMGIRRRTS

SEQ ID NO: 1961 - protein, 534 aa, Unknown
  Description of Unknown: uncultivated organism sequence
  Category: MG81 effectors
  Description: MG81-239 effector
MGWKSTGRGGTRVKRSSTDTCCLTLPLKLEKWQSDRLEKRFEIGRQIYNTIVHAELKKLRKLEKTQQYQEIEQKLENAKQEETKELWKKKRQLLDQNGLSENHFKADMKYYYPHFKDNIASSVAVHGIASQAWTAFEKVLLSKDGKMVHFKKKGELSSLRGYSQAGKSGGIEIIFRGSYVEWKGLKLPLQLSPNNEYETEMLSKRVKYIRILRKDGKTKTHWYAQLALEGKPAVKRDSISGAPKHPIGHGVVGIDIGTRTLAYSTDSEVNLLELADRVQNIEQEKRRLQRKMDRSRRAMNPGNYKPDGSIKQGVKLKWNNSKRYKRIQHQYAMIQHHQADIRKQQHNELANYLLTLGDCFFVENMSYCDLAHRANKTEISEKTGRYKRKKRFGKSIANKAPAMLITMLKQKCQSRGLEGVKEVDTHVCASQYNHQTDTCIKKALENRWNIMPDGERIQRDLYSAFLLQHCKQGLPEYNRKELKKEFGEELYRVFDREALQRDYPQFVAYHHMTIQRLSELPHTIPSMGIRRIIS

SEQ ID NO: 1962 - protein, 511 aa, Unknown
  Description of Unknown: uncultivated organism sequence
  Category: MG81 effectors
  Description: MG81-240 effector
MKKSNTDTCCLTLPLKLEKWQEDRLAKRFEIARQIYNTMVHAELKKLRNIENSQPYRQIQKQIEALNWKNQNDKARLKSLYNDRNKLLNTIGFSEYGFKADIKYYYKHFNDNIGSSVAVHGIAPQVWAAFEKMLFYKEGKKVHYKKKDDIHSLHGYSVTGKSGGVEIIFRKTYIEWKGLKLPLKRSPDNAYETEMLGRRVKYVRLLRKPGKRKDCWYAQLSLEGKPAIKRDPESGERRHSIGRGAVGLDIGPQTLAYSACGAADLVELADQVQNIEQMKRRLQRKLDRSRRATNPDNYADNGTIRRGVKLTHNKSNRYRRTQRELRYLQHCQAEIRKRQHIELANHLLALGDCFYVEDMAWPSLTHRAKETAISEKTGRIKRKKRFGKSVANKAPATLIGILEQKCNSLGLRGVIKVPTSLRASQYNHQSGEYTSKPLSQRWNNMPDGERIQRDLYSAFLLQHYDPKAGNFDSALLQQDYPQFVQYHHRAIQRLSTVPKTLSSMGIQRSLR

SEQ ID NO: 1963 - protein, 511 aa, Unknown
  Description of Unknown: uncultivated organism sequence
  Category: MG81 effectors
  Description: MG81-241 effector
MGKSSTDTCCLTLPLKLEKWQEDRLAKRFEIARQIYNTMVRAELKKLDRVKQLPEYRKNQKEIQALDWKNSADKQRLKELYGNQRKILQKQGFTEYGFKADSKDYYKHFIENIGSSVATHGIAPQVWNAFDKMLFQKDGKVVHFKRYGDVHSLKGGSVAHKSGGAEIMFRKTYIEWKGLKLPLKLSPNNAYEAEMLSYRVKYVRILRTRGKTKDRWYAQLSLEGKPAVKYDSNTGKPVHPVGRGAVGLDIGPQTLAYAGANEANLVELADQVQNIEQEKRRLQRKLDRSRRATNPDNYNENGTIRRGVKLTHNKSKRYCKLQKELSWIQHCQAETRKRQHIALANHLLSLGDCFYVEPMAWPSLTHRAKKTEVSEETGRIKRKKRFGKSVANKAPASLIGILKLKCISLGLTGVVEVPMLLRASQYNHQSKDYAKKSLSQRWNDMPDGNRIQRDLYSAFLLQHYDSRSESFDQETLERDYPQFVRLHNQTIQRLSALPKTPSSMGIRRSVS

SEQ ID NO: 1964 - protein, 530 aa, Unknown
  Description of Unknown: uncultivated organism sequence
  Category: MG81 effectors
  Description: MG81-242 effector
MILLAKNNNNNNTDTCVLTLPLRVEKWQEDCLLKRFEAARRIYNSLLNFELKKLRQLERTVEYRQIQSVISSAYRSNTKDSPECKDAFKRREKLISANGISENGFKSDVKFFYKHFDGLIGSNVAVHCIAVQLWAAFDKYLSGSGKEIHFKRLGDISSLKGYSVKGKSGGCEIIFRGQYVEWTRKKKKLLLPLKIDPDNEYEREMLSRRVKYVRIIKKPGKNRLRWYAQLTLEGKPALKYSAETGKPIHSVGKGNVGIDIGPQTVAYASDKEVALLELADRVTNIEHQKKKLQRKLDRSRRATNPDNYKPDGTIKCGVKLTRNKSKRYLKLQSKLAYIQHRQAEIRKLQHTCLANHMLTLGDRFFVEKMNWPGLAHRAKETSISEKTGRYKRKKRFGKSLANKAPAMFISILKRKCETLGLPGVVEVDTYSLKASQYNHLSDTYEKKSLSERWNYMPISDGSDSSKTKRIQRDLYSAFLLQHTIPHPCSFDKKALRIDYPNFVTMHDAEIHRLESLPKTITSMGVRRSHS

SEQ ID NO: 1965 - protein, 554 aa, Unknown
  Description of Unknown: uncultivated organism sequence
  Category: MG81 effectors
  Description: MG81-243 effector
MDNEEKKEDGATCCLTLPLKLEKWQSDHLEKRFEIARQLYNTLVHAELKRIHRIERMPEYREIERLIEATTDKKEKWALKNQKKQFLRKNGINRNTFTTDMKRLYKHFNDNIGSNVAQHGIVSQVLTAFEKVYIENQSGEVHFKKPGDLRSVQGYSQKKSGGVEIMFREGKIIWTQQENDDRKKSPKYQQRKKRQNYKGVKGIAREFPVVFSKNNPYEAEMLTKHVKFVRILRKDGKTKPHWYAQLVLEGRPVTKYDPISGAPKHPVGHGVVGIDIGTRTLAYSNDKEVNLLELADRVQNIEQEKRRLQRKMDRSRRAMNPENYNSDGTFKRGVKLTRNKSKRYRRIQHQLAMIQHHQADIRKQQHNELANYLLTLGDCFFVENMSYCDLVHRANKTEISEKTGRYKRKKRFGKSIANKAPAMLITMLKQKCQSRGLKGVKEVDTHVRASQYNHQTDTCIEKALENRWNVMPDGERIQRDLYSAFLLQHCKQGLPEYNRKELKKEFGEELYRVFDREALQRDYPQFVAYHHMTIQRLSELPHTIPSMGIRRIIS

SEQ ID NO: 1966 - protein, 522 aa, Unknown
  Description of Unknown: uncultivated organism sequence
  Category: MG81 effectors
  Description: MG81-244 effector
MKRSSTDTCCLTLPLKLEKWQSDRLEKRFEIGRQIYNTIVHAELKKLRKLERTQQYQEIEQKLENAKQEETKELWKKKRQLLDQNGLSENHFKADMKYYYPHFKDNIASSVAVHGIASQAWTAFEKVLLSKDGKMVHFKKKGELSSLRGYSQAGKSGGIEIIFRGSYVEWKGLKLPLQLSPNNEYETEMLSKRVKYVRILRKDGKTKTHWYAQLALEGKPAVKRDSISGAPKHPVGHGVVGIDIGTRTLAYSADSKVDLIELADRVQNIEQEKMLLQRKLDRSRRATNPENYKPDGSIKQGVKLTWNNSKRYKRIQHQYAMIQHHQADIRKQQHNELANYLLTLGDCFFVEDMDYRALTRKAKKTEISEKTGRYKRKKRFGKSIANKAPSMLIALLDQKCKSLNLEGVKKVDTAVKASQYNHQTDECKAKELKERWNIMPDGERIQRDLYSAFLLQHCRRDLPEYNRKKLQEAFGNELYRVFDREALQRDYPKFVEYHRKTIQRLSALPKTIASMGIRRIIS

SEQ ID NO: 1967 - protein, 495 aa, Unknown
  Description of Unknown: uncultivated organism sequence
  Category: MG81 effectors
  Description: MG81-245 effector
MSKTDGDRCILTLPLHTEPWQEQIIETRFGIMEHLKNSLIAMEMRKLKNLRRTKTFRDIEKRITETPKEERKALNMQRTAMLRDAGFSEFDFINDITPMQKHFADHIAAQIAHRSASDIWRAFESYLYSSGRDVHFQKRGTLDSVACKKIGNGMNYRNDTFEWSGGRTPNARKLYIPVEKPNTEYEKQMLRKEIKNLRIVRKWMKTRFKYYLQLTLVGQPYQKERRIGNGRVGIDIGTRTIAIASDAAVRLLELADQVDGNHAKKCEIQRRMDASKRATNPENYNADGTIRRPVRGRKMTWHFSNNYMKMQSRVRELERKNADIRKYQHNCLANETLALGTDIFVEPMAYKGLQRRAKETKTDENGRYLKKKRFGKSLANKAPSMFLTILDNKLKCHGKQLLKVDIAQFRASQFDHTNGTYRKKLLSERFAELSNGDRIQRDMYSAFLLMNSNDDLTGPDPERCAATYERFKELHEKETVRIRNKQGRRIASFGI

SEQ ID NO: 1968 - protein, 536 aa, Unknown
  Description of Unknown: uncultivated organism sequence
  Category: MG81 effectors
  Description: MG81-246 effector
MNNEEKEKDGATCCLTLPLKLEKWQSDHLEKRFEIARQLYNTLVHAELKRIHRIERMPEYREIERLIEATTDKKEKWALKNQKKQFLRKNGINRNTFTMDMKRLYKHFNDNIGSNVAQHGIVSQVLTAFEKVYIENQSGEVHFKKPGDLRSVQGYSQKKSGGVEIMFREGKIIWNQQGNNDRKGVAREFPLKLSPDNSYEAEMLKKHVKFVRILRKEGKTKPHWYAQLVLEGKPAIKRDPASGAPKHPVGHGVVGIDIGTRTLAYSADSKVDLIELADRVQNIEQEKLLLQRKLDRSRRATNPENYKPDGTIKKGVKLTWNNSKRYKRIQHQYAMIQHHQADIRKQQHNELANYLLTLGDCFFVEDMDYRALTRKAKKTEISEKTGRYKRKKRFGKSIANKAPSMLIALLDQKCKSLNLEGVKKVDTAVKASQYNHQTDECKAKELKERWNIMPDGERIQRDLYSAFLLQHCRRDLPEYNRKKLQETFGNELYRIFDREALQRDYPKFVEYHRETIQRLSALPKTIASMGIRRSIS

SEQ ID NO: 1969 - protein, 512 aa, Unknown
  Description of Unknown: uncultivated organism sequence
  Category: MG81 effectors
  Description: MG81-247 effector
MPTKQKEGGNRCVLTLPLLTEPWQEHIIEKRFKIIEHLKNQLISIELRKLKNLQRTKAYKNLIKQIESVPKSERTALYKERNKMLKDAGFSQYTFMDDMAGKKSLMQKHFESHINVQIAHKAAIDVWSSFEKFLFGSGQMIHYQKRGTLSSVASKSPKTGMFYYSDENIFKWSGGGTKPKGGIILCLRVASVKTNYEKEMVANNEIKYYRVVRKWMKTKYKYYLQITFAGKPADKHREISTGRVGIDIGTQTIAIASDKSVKLLELADKVNKNHIKKCELQRKLDRSRRYTNPDNFNPDGTVKRGTKGHKLKWNKSKHYLEIAGKIRELERKNADIRKYQHTCLANDILAMGNQIYIEPMNYKGLQKRAKETQVDEKGRYKKKKRFGKSLANKAPAMFVRILKTKAEQHGGEVYEVDIMSYRASQCDHTTGEYTKHGLNDRWRILGNGDKVQRDLYSAFLIKNSNKTHDEIDLDKCSKTYDNFKKLHDKEIENIRNEVKLRERKNISSYGIA

SEQ ID NO: 1970 - protein, 512 aa, Unknown
  Description of Unknown: uncultivated organism sequence
  Category: MG81 effectors
  Description: MG81-248 effector
MPAKQKEGGNRCVLTLPLLTEPWQEHIIEKRFKIIEHLKNQLISIELRKLKNLQRTKAYKNLIKQIESVPKSERTALYKERNKMLKDAGFSQYTFMDDMAGKKSLMQKHFESHINVQIAHKAAIDVWSSFEKFLFGTGQIVHYQKRGTLSSVASKSPKTGMFYYSDENIFKWSGGGTKPKGGIILCLRVASVKTNYEKEMVANNEIKYYRVVRKWMKTKYKYYLQITFAGKPADKHREISTGRVGIDIGTQTIAIASDKSVKLLELADKVNKNHIKKCELQRKLDRSRRYTNPDNFNPDGTVKRGTKGHKLKWNKSKHYIEIAGKIRELERKNADIRKYQHTCLANDILAMGNQIYIEPMNYKGLQKRAKETQVDEKGRYKKKKRFGKSLANKAPSMFVTILKTKAEQHGGEVYEVDIMSYRASQCDHTTGEYTKHGLNDRWRILGNGDKVQRDLYSAFLIKNSNKTHDEIDLDKCSKTYDNFKKLHDKEIENIRNEVILRKRRNISSYGIA

SEQ ID NO: 1971 - protein, 501 aa, Unknown
  Description of Unknown: uncultivated organism sequence
  Category: MG81 effectors
  Description: MG81-249 effector
MNEGDGMPKEDKESCCVLQLRLYPEPWQVQIIETRFKVLEHLKNSLIALELRKLRNLERTRAYREIQEQIKLADDKSKIKLYAKRRKLLKDAGFSEFVFKDDITPMQKHFAAHIATHVAHRAASEVWRAFDKFLFGNGKMVHYVRRGTLRSASNQKAGTTMTLENGYFKWNGGRDQNSIAINIRVAKPTTYYEKEMLQKKAKYFRIVRKWGKIGYKYYLQITLAGLPAVKPRLIANEKNVGIDIGPSSIAIVSDKKVELRALADKVQNNHIEKCSLQRSMDRSRRNLNPQNYNEDGTIRRGIRLNWTFSKHYIEMRGKVRMLERKNVDIRKYQHTCLANEVISLGTDVYIEQMSFKGLQRRAKETTYREDGRPKRKKRFGKSIANRAPAMFVEILGRKLTTIVGTELNKVDTFKFRASQYDHTNGSYKKKLLKERWAQLSNGDRIQRDLYSAFLLKNSNADLNSTNVEQCNATYDVFKIMHDDCITKLKSEKKSCLPSFGV

SEQ ID NO: 1972 - protein, 511 aa, Unknown
  Description of Unknown: uncultivated organism sequence
  Category: MG81 effectors
  Description: MG81-250 effector
MAKCSTDTCCLTLPLRLEKWQEDRLAKRFEIARQIYNTMVRAELKKLRAIEQSEPYKANQEKIQALDWKTQADKQALKALYKERDKLLRNGGFSEYGFKSDIKNYYKHFNNNIGSSVAVHGVAPQVWTAFEKMLFKKEGKKVHFKKKGDIRSLRGYSVTGKSGGVEIIFRETYIEWKGLKLPLKLSPDNIYETQMLSYRVKYVRLLRKPGKRKDRWYAQLSLEGKPVIKYNPKTGEVRHPIGKGAVGLDIGPQTLAYSAATGADLVELANQVQNVEQEKRRLQRKLDRSRRATNPGNYADDGTIRRGIALTHNKSKRYLRTQQELKYLQHQQAEIRKRQHTELANHLLSLGDCFYVEKMVWTSLTHRAKETEISEKTGKIKRKKRFGKSVANKAPATLIGILQRKSAALGIPGVIEVPTSVKASQYNHQSGTYTPKPLSQRWNNMPDGERIQRDLYSAFLLQHYDPQTNTFDANSLHQDYPQFVQYHHDAVLRLYAMPKTPSSMGIKRSLR

SEQ ID NO: 1973 - protein, 423 aa, Unknown
  Description of Unknown: uncultivated organism sequence
  Category: MG81 effectors
  Description: MG81-251 effector
MKYYYPHFKDNIASSVAVHGIASQAWTAFEKVLLSKDGKMVHFKKKGELSSLRGYSQAGKSGGIEIIFRGSYVEWKGLKLSSNNDYETEMLSRRVKYVRILRQDGKTKPHWYAQLVLEGKPAVKRDPISGAPKHPIGHGAVGIDIGTRTLAYSADSKVDLIELADRVQNIEQEKLLLQRKLDRSRRATNPENYKPDGTIKKGVKLTRNKSKRYRKIQHQLAMLQHRQANIRKRQHNELANYLLTLGDCFFVEDMDYRALTRKAKKTEISEKTGRYKRKKRFGKSIANKAPSMLIALLDQKCKSLNLEGVKKVDTAVKASQYNHQTDECKAKELKERWNIMPDGERIQRDLYSAFLLQHCRRDLPEYNRKKLQEAFGNELYRVFDREALQRDYPKFVEYHRKTIQRLSALPKTIASMGIRRSIS

SEQ ID NO: 1974 - protein, 522 aa, Unknown
  Description of Unknown: uncultivated organism sequence
  Category: MG81 effectors
  Description: MG81-252 effector
MKKSSTDTCCLTLPLKLEKWQSDRLEKRFEIGRQIYNTIVHAELKKLRKLERTQQYQEIEQKLENAKQEETKELWKKKRQLLDQNGLSENHFKADMKYYYPHFKDNIASSVAVHGIASQAWTAFEKVLLSKDGKMVHFKKKGELSSLRGYSQAGKSGGIEIIFRGSYVEWKGLKLPLQLSPNNEYETEMLSKRVKYVRILRKDGKTKTHWYAQLVLEGKPAIKRDPASGAPKHPVGHGAVGIDIGTRTLAYSNDKEVNLLELADRVQNIEQEKRRLQRKMDRSRRAMNPENYNSDGTFKRGVKLTRNKSKRYRRIQHQLAMIQHHQADIRKQQHNELANYLLTLGDCFFVENMSYCDLVHRANKTEISEKTGRYKRKKRFGKSIANKAPAMLITMLKQKCQSRGLKGVKEVDTHVRASQYNHQTDTCIEKALENRWNVMPDGERIQRDLYSAFLLQHCKQGLPEYNRKELKKEFGEELYRVFDREALQRDYPQFVAYHHMTIQRLSELPHTIPSMGIRRIIS

SEQ ID NO: 1975 - protein, 427 aa, Unknown
  Description of Unknown: uncultivated organism sequence
  Category: MG81 effectors
  Description: MG81-253 effector
MKYYYQHFKENIGSSVAVHGIASQAWTAFEKVLFSKDGKMVHFKKKGELSSLRGYSQAGKSGGVEIIFRGSYVEWKGLKLPLKLSPDNDYETEMLSKRVKYVRILRQDGKTKPHWYAQLVLEGKPAIKRDPASGAPKHPVGHGVVGIDIGTRTLAYSADSKVDLIELADRVQNIEQEKLLLQRKLDRSRRATNPENYKPDGTIKTGVKLTRNKSKRYRKIQHQLAMLQHRQADIRKRQHNELANYLLTLGDCFFVEDMDYRALTRKAKKTEISEKTGRYKCKKRFGKSIANKAPSMLIALLDQKCKSLNLEGVKKVDTAVKASQYNHQTDECKAKELKERWNIMPDGERIQRDLYSAFLLQHCRRDLPEYNRKELQKEFGEELYRVFDREALQRDYPQFVAYHHMTIQRLSELPHTIPSMGIRRIIS

SEQ ID NO: 1976 - protein, 534 aa, Unknown
  Description of Unknown: uncultivated organism sequence
  Category: MG81 effectors
  Description: MG81-254 effector
MGWKSKGRGGKRVKRSSTDTCCLTLPLKLEKWQSDRLEKRFEIGRQIYNTIVHAELKKLRKLERTQQYQEIEQKLENAKQEETKELWKKKRQLLDQNGLSEDHFKADMKYYYPHFKDNIASNVAVHGIASQAWTAFEKVLFSKDGKMVHFKKKGELSSLRGYSRAGKSGGVEIIFRGSYVEWKGLKLPLKLSPDNDYETEMLSKRVKYVRILRKDGKTKTHWYAQLALEGKPAVKRDSISGAPKHPVGHGVVGIDIGTRTLAYSTDSEVNLLELADRVQNIEQEKRRLQRKMDRSRRAMNPGNYKPDGSIKQGVKLTWNNSKRYKRIQHQYAMIQHHQADIRKQQHNELANYLLTLGDCFFVENMSYCDLAHRANKTEISEKTGRYKRKKRFGKSIANKAPAMLITMLKQKCQSRGLEGVKEVDTHVCASQYNHQTDTCIKKALENRWNVMPDGERIQRDLYSAFLLQHCRRDLPEYNREELQKEFGEELYRVFDREALQRDYPQFVAYHHMTIQRLSELPHTIPSMGIRRIIS

SEQ ID NO: 1977 - protein, 526 aa, Unknown
  Description of Unknown: uncultivated organism sequence
  Category: MG81 effectors
  Description: MG81-255 effector
MNNEEKEKDGATCCLTLPLKLEKWQSDRLEKRFEIGRQIYNTIVHAELKKLRKLERTQQYQEIEQKLENAKQEETKELWKKKRQLLDQNGLSENHFKADMKHYYPHFKDNIASSVAVHGIASQAWTAFEKVLLSKDGKMVHFKKKGELSSLRGYSQAGKSGGIEIIFRGSYVEWKGLKLPLKLSPDNDYETEMLSKRVKYVRILRKDGKTKTHWYAQLALEGKPAVKRDSISGAPKHPVGHGVVGIDIGTRTLAYSTDKEVNLLELADRVQNIEQEKRRLQRKMDRSRRAMNPGNYKPDGSIKQGVKLTWNNFKRYKRIQHQYAMIQHHQADIRKQQHNELANYLLTLGDCFFVENMSYCDLAHRANKTEISEKTGRYKRKKRFGKSIANKAPAMLITMLKQKCQSRGLEGVKEVDTHVCASQYNHQTDTCIKKALENRWNIMPDGERIQRDLYSAFLLQHCRRDLPEYNRKELQKEFGEELYRVFDREALQRDYPQFVAYHHMTIQRLSELPHTIPSMGIRRIIS

SEQ ID NO: 1978 - protein, 538 aa, Unknown
  Description of Unknown: uncultivated organism sequence
  Category: MG81 effectors
  Description: MG81-256 effector
MDNEEKEKDGATCCLMLPLKLEKWQSDHLEKRFEIARQLYNTLVHAELKKKCQVERMPEYQEIMKMIDAASNQKEKWALEKKRKAFLEENGFSRNAFKADMEKYYKHFNDNIGANVALHGITAQVWIAFDKVFVDNYKQKGKVHFKKPGELCSVQGYSQKKSGGKEIMFREDRIIWNQQGNRDRKKVKREFLLKLSPDNPYEAEMLKRHVKFVRILRKDGKTKPHWYAQLVLEGKPAVKRDPASGAPKHPIGHGVVGIDIGTRTLAYSTDSEVNLLELADRVQNIEQEKRRLQRKMDRSRRAMNPGNYKPDGSIKQGVKLTWNNSKRYKRIQHQYAMIQHHQADIRKQQHNELANYLLTLGDCFFVENMSYCDLAHRANKTEISEKTGRYKRKKRFGKSIANKAPAMLITMLKQKCQSRGLEGVKEVDTHVCASQYNHQTDTCIKKALENRWNIMPDGERIQRDLYSAFLLQHCRRDLPEYNRKELQKEFGEELYRVFDREALQRDYPQFVAYHHMTIQRLSELPHTIPSMGIRRIIS

SEQ ID NO: 1979 - protein, 511 aa, Unknown
  Description of Unknown: uncultivated organism sequence
  Category: MG81 effectors
  Description: MG81-257 effector
MGKSSTDTCCLTLPLKLEKWQEDRLAKRFEIARQIYNTMVRAELKRLRQVEQSPQYRSNKKAIQALDWKNTADKPKLKTLYRERDKLLKGGGFTEYGFKSDIKNFYKHFAENIGSSVAVHGIAPQVWAAFERVLFKKEGKKVHFKKTGDIRSLRGYSVTGKSGGVEIIFRGSYIEWKGLNLPLKLSPDNAYETEMLSYRVKYVRILRKPGKTRDRWYAQLSLEGKPAIKRNPASGNPVHPVGQGAVGLDIGPQTLAYAAEKEANLVELADRVQNIEREKHLLQRKMDRSRRAANPDNYAENGTIRRGVKLTHNKSKRYLRLQRELCYLQHCQAETRKRQHTELANHLLSLGSCFYVEDMAWPSLTHRAKKTEISDKTGRIKRKKRFGKSIANKAPAALINILRTKCVSLGIPGVVEVPTSLKASQYNHQSKEYTPKPLSQRWNDMPDGSRIQRDLYSAFLLQHYDPQSGNFDQASLEADYPQFVQLHNQSIQRLLTVPKTPSSMGIRRSVS

SEQ ID NO: 1980 - protein, 538 aa, Unknown
  Description of Unknown: uncultivated organism sequence
  Category: MG81 effectors
  Description: MG81-258 effector
MNNEEKEKEGATCCLTLPLKLEKWQSDHLEKRFEIAQQLYNTLVHAELKKKCQVERMPEYQEIMKMIDTASNQKEKWALEKKRKAFLEENGFSRNAFKADMEKYYKHFNDNIGANVALHGITAQVWIAFDKVFVDNYKQKGKVHFKKPGELCSVQGYSQKKSGGKEIMFREDRIIWNQQGNRDRKKVKREFLLKLSPDNPYEAEMLKRHVKFVRILCKDGKTKPHWYAQLVLEGKPAVKRDPISSAPKHPVGHGVVGIDIGTRTLAYSTDKEVNLLELADHVQNIEQEKRRLQRKMDRSRRATNPENYNPDGTFKRGVKLTRNKSKRYRRIQHQLAMIQHHQADIRKQQHNELANYLLTLGDCFFVENMSYCDLVHRANKTEISEKTGRYKRKKRFGKSIANKAPAMLITMLKQKCQSRGLKGVKEVDTHVRASQYNHQTDTCIEKALENRWNVMPDGERIQRDLYSAFLLQHCKQGLPEYNRKELKKEFGEELYRVFDREALQRDYPQFVAYHHMTIQRLSELPHTIPSMGIRRIIS

SEQ ID NO: 1981 - protein, 533 aa, Unknown
  Description of Unknown: uncultivated organism sequence
  Category: MG81 effectors
  Description: MG81-259 effector
MILLANNNNNNNNNNTDTCVLTLPLRVEKWQEDCLLKRFEAARRIYNSLLNFELKKLRQLERTVEYRQIQSVISSAYRSNTKDSPECKDAFKRREKLISANGISEYGFKSDVKFFYKHFDGLIGSSVAVHCIAVQLWAAFDKYLRGSGKEIHFKRLGEISSLKGYSVKGKSGGLEIIFRGQYIEWTRKKKKLLLPLKIDPDNEYEREMLSRRVKYVRIIKKPGKNRLRWYAQLTLEGKPALKYSAETGKPIHSVGKGNVGIDIGPQTVAYASDKEVALLELADRVTNIEHQKKKLQRKLDRSRRATNPDNYKPDGTIKRGVKLTRNKSKRYLKLQSKLAYIQHRQAEIRKLQHTCLANHMLTLGDRFFVEKMNWPGLAHRAKETSISEKTGRYKRKKRFGKSLANKAPAMFISILKRKCETLGLPGVVEVDTYNLKASQYNHLSDTYEKKSLSERWNYMPISDGSDSSKTKRIQRDLYSAFLLQHTIPQPCSFDKEALRIDYPNFVTMHDAEIHRLESLPKTVTSMGVRRSHS

SEQ ID NO: 1982 - protein, 414 aa, Unknown
  Description of Unknown: uncultivated organism sequence
  Category: MG81 effectors
  Description: MG81-260 effector
MWIAFDKVFVDNYKQKGKVHFKKPGELCSVQGYSQKKSGGKEIMFREDRIIWNQQGNRDRKKVKREFLLKLSPDNPYEAEMLKRHVKFVRILRKDGKTKPHWYAQLVLEGKPAVKRDPASGAPKHPIGHGVVGIDIGTRTLAYSTDKEVNLLELADRVQNIEQEKRRLQRKMDRSRRATNPENYNPDGTFKRGVKLTRNKSKRYKRIQHQYAMIQHHQADIRKQQHNELANYLLTLGDCFFVENMSYCDLVHRANKTEISEKTGRYKRKKRFGKSIANKAPAMLITMLKQKCQSRGLEGVKEVDTHVCASQYNHQTDTCIKKALENRWNIMPDGERIQRDLYSAFLLQHCRRDLPEYNRKELQKEFGEELYRVFDREALQRDYPQFVAYHHMTIQRLSELPHTIPSMGIRRIIS

SEQ ID NO: 1983 - protein, 534 aa, Unknown
  Description of Unknown: uncultivated organism sequence
  Category: MG81 effectors
  Description: MG81-261 effector
MGWKSKGRGGTRVKKSSTDTCCLTLPLKLEKWQSDRLEKRFEIGRQIYNTVVRAELKKLHQVERTPQYREIEQKLKGAKQEEAKELWKKRTQLLSKSGFSEYGFKSDMKYYYQHFKENIGSSVAVHGIASQVWTAFEKVLFSKDGKMVHFKKKGELSSLRGYSQAGKSGGIEIIFRGSYVEWKGLKLPLKLSSNNDYETEMLSKRVKYVRILRQEGKTKPHWYAQLVLEGKPAIKRDPASGTPKHPIGHGVVGIDIGTRTLAYSTDKEVNLLELADRVQNIEQEKRRLQRKMDRSRRAMNPENYNSDGTFKRGVKLTRNKSKRYRRIQHQLAMIQHHQADIRKQQHNELANYLLTLGDCFFVENMSYCDLVHRANKTEISEKTGRYKRKKRFGKSIANKAPAMLITMLKQKCQSRGLKGVKEVDTHVRASQYNHQTDTCIEKALENRWNVMLDGERIQRDLYSAFLLQHCKQGLPEYNRKELKKEFGEELYRVFDREALQRDYPQFVAYHHMTIQRLSELPHTIPSMGIRRIIS

SEQ ID NO: 1984 - protein, 538 aa, Unknown
  Description of Unknown: uncultivated organism sequence
  Category: MG81 effectors
  Description: MG81-262 effector
MDNEEKEKDGATCCLTLPLKLEKWQSDHLEKRFEIARQLYNTLVHAELKKKCQVERMPEYQEIMKMIDAASNQKEKWALEKKRKAFLEENGFSRNAFKADMEKYYKHFNDNIGANVALHGITAQVWIAFDKVFVDNYKQKGKVHFKKPGELCSVQGYSQKKSGGKEIMFREDRIIWNQQGNRDRKKVKREFLLKLSPDNPYEAEMLKRHVKFVRILRKDGKTKPHWYAQLVLEGKPAVKRDPASGAPKHPIGHGVVGIDIGTRTLAYSTDKEVNLLELADHVQNIEQEKRRLQRKMDRSRRATNPENYNPDGTFKRGVKLTRNKSKRYRRIQHQLAMIQHHQADIRKQQHNELANYLLTLGDCFFVENMSYCDLVHRANKTEISEKTGRYKRKKRFGKSIANKAPTMLITMLKQKCQSRGLEGVKEVDTHVRASQYNHQTDTCIEKALENRWNVMPDGERIQRDLYSAFLLQHCKQGLPEYNRKELKKEFGEELYRVFDREALQRDYPQFVAYHHMTIQRLSELPHTIPSMGIRRIIS

SEQ ID NO: 1985 - protein, 534 aa, Unknown
  Description of Unknown: uncultivated organism sequence
  Category: MG81 effectors
  Description: MG81-263 effector
MGWKSTGRGGTRVKRSSTDTCCLTLPLKLEKWQSDRLEKRFEIGRQIYNTIVHAELKKLRKLERTQQYQEIEQKLENAKQEETKELWKKKRQLLDQNGLSENHFKADMKYYYPHFKDNIASSVAVHGIASQAWTAFEKVLLSKDGKMVHFKKKGELSSLRGYSQAGKSGGIEIIFRGSYVEWKGLKLPLKLSPNNEYETEMLSKRVKYVRILRKDGKTKTHWYAQLALEGKPAVKRDSISGAPKHPVGHGVVGIDIGTRTLAYSTDSEVNLLELADRVQNIEQEKRRLQRKMDRSRRAMNPGNYKPDGSIKQGVKLTWNNSKRYKRIQHQYAMIQHHQADIRKQQHNELANYLLTLGDCFFVENMSYCDLAHRANKTEISEKTGRYKRKKRFGKSIANKAPAMLITMLKQKCQSRGLEGVKEVDTHVCASQYNHQTDTCIKKALENRWNVMPDGERIQRDLYSAFLLQHCRRDLPEYNRKELQKEFGEELYRVFDREALQRDYPRFVAYHHMTIQRLSELPHTIPSMGIRRIIS

SEQ ID NO: 1986 - protein, 550 aa, Unknown
  Description of Unknown: uncultivated organism sequence
  Category: MG81 effectors
  Description: MG81-264 effector
MGWKSKGRGGTLVDNEEKKEDGATCCLTLPLKLEKWQSDHLEKRFEIARQLYNTLVHAELKKKCQVERMPEYQEIMKMIDTASNQKEKWALEKKRKAFLEENGFSRNAFKADMEKYYKHFNDNIGANVALHGITAQVWIAFDKVFVDNYKQKGKVHFKKPGELCSVQGYSQKKSGGKEIMFREDRIIWNQQGNCDRKKVKREFLLKLSPDNPYEAEMLKRHVKFVRILRKDGKTKPHWYAQLVLEGKPAVKRDPASGAPKHPIGHGVVGIDIGTRTLAYSTDKEVNLLELADRVQNIEQEKRRLQRKMDRSRRATNPENYNPDGTFKRGVKLTRNKSKRYRRIQHQLAMIQHHQADIRKQQHNELANYLLTLGDCFFVENMSYCDLVHRANKTEISEKTGRYKRKKRFGKSIANKAPAMLITMLKQKCQSRGLKGVKEVDTHVRASQYNHQTDTCIEKALENRWNVMPDGERIQRDLYSAFLLQHCKQGLPEYNRKELKKEFGEELYRVFDREALQRDYPQFVAYHHMTIQRLSELPHTIPSMGIRRIIS

SEQ ID NO: 1987 - protein, 482 aa, Unknown
  Description of Unknown: uncultivated organism sequence
  Category: MG81 effectors
  Description: MG81-265 effector
MPEYQEIMKMIDTASNQKEKWALEKKRKAFLEENGFSRNAFKADMEKYYKHFNDNIGANVALHGITAQVWIAFDKVFVDNYKQKGKVHFKKPGELCSVQGYSQKKSGGKEIMFREDRIIWNQQGNRDRKKVKREFLLKLSPDNPYEAEMLKRHVKFVRILRKDGKTKPHWYAQLVLEGKPAVKRDPASGAPKHPIGHGVVGIDIGTRTLAYSTDKEVNLLELADRVQNIEQEKRRLQRKMDRSRRATNPENYNPDGTFKRGVKLTRNKSKRYRRIQHQLAMIQHHQADIRKQQHNELANYLLTLGDCFFVENMSYCDLVHRANKTEISEKTGRYKRKKRFGKSIANKAPAMLITMLKQKCQSRGLKGVKEVDTHVRASQYNHQTDTCIEKALENRWNVMPDGERIQRDLYPAFLLQHCKQGLPEYNRKELKKEFGEELYRVFDREALQRDYPQFVAYHHMTIQRLSELPHTIPSMGIRRIIS

SEQ ID NO: 1988 - protein, 512 aa, Unknown
  Description of Unknown: uncultivated organism sequence
  Category: MG81 effectors
  Description: MG81-266 effector
MPTKQKEDSNRCVLTLPLLTEPWQEHKKKKRFKIIEHLKNQLISIELRKLKKLQRTKAYKNLIKQIESVPKSERTALYKERNKMLKDAGFSQYTFMDDMAGKKSLMQKHFESHINVQIAHKAAIDVWSSFEKFLFGTGQIVHYQKRGTLSSVASKSPKTGMFYYPDENIFKWSGGGTKPKGGIILCLRVASVKTNYEKEMVANNEIKYYRVVRKWMKTKYKYYLQITFAGKPADKHREISTGRVGIDIGTQTIAIASDKSVKLLELADKVNKNHIKKCELQRKLDRSRRYTNPDNFNPDGTVKRGTKGHKLKWNKSKHYLEIAGKIRELERKNADIRKYQHTCLANDILAMGNQIYIEPMNYKGLQKRAKETQVDEKGRYKKKKRFGKSLANKAPAMFVTILKTKAEQHGGEVYEVDIMSYRASQCDHTTGEYTKHGLNDRWRILGNGDKVQRDLYSAFLIKNSNKTHDEIDLDKCSKTYDSFKKLHDKEIENIRNEVILRKRRNISSYGIA

SEQ ID NO: 1989 - protein, 534 aa, Unknown
  Description of Unknown: uncultivated organism sequence
  Category: MG81 effectors
  Description: MG81-267 effector
MGWKSKGRGGKRVKKSSTDTCCLTLPLKLEKWQSDRLEKRFEIGRQIYNTVVRAELKKLHQVERTPQYREIEQKLKEAKQEEAKELWKKRTQLLSKSGFSEYGFKSDMKYYYQHFKENIGSSVAVHGIASQVWTAFEKVLFSKDGKMVHFKKKGELSSLRGYSQAGKSGGIEIIFRGSYVEWKGLKLPLKLSSNNDYETEMLSKRVKYVRILRKEGKTKPHWYAQLVLEGKPAIKRDPASGAPKHPVGHGVVGIDIGTRTLAYSADSKVDLIELADRVQNIELEKMLLQRKLDRSRRATNPENYKPDGTIKKGVKLTRNKSKRYRKIQHQLAMLQHRQADIRKRQHNELANYLLTLGDCFFVEDMDYRALTRKAKKTEISEKTGRYKRKKRFGKSIANKAPSMLIALLDQKCKSLNLEGVKKVDTAVKASQYNHQTDECKAKELKERWNIMPDGERIQRDLYSAFLLQHCRRDLPEYNRKKLQEAFGNELYRVFDREALQRDYPKFVEYHRKTIQRLSALPKTIASMGIRRIIS

SEQ ID NO: 1990 - protein, 521 aa, Unknown
  Description of Unknown: uncultivated organism sequence
  Category: MG81 effectors
  Description: MG81-268 effector
MMVMWKGGIPVGKSSTDTCCLTLPLKLEKWQEDRLAKRFEIARQIYNTMVRAELKKLDRVKQLPEYRKNQKEIQALDWKNSADKQRLKELYGNQRKILQKQGFTEYGFKADSKDYYKHFIENIGSSVATHGIAPQVWNAFDKMLFQKDGKVVHFKRYGDVHSLKGGSVAHKSGGAEIMFRKTYIEWKGLKLPLKLSPNNAYEAEMLSYRVKYVRILRTRGKTKDRWYAQLSLEGKPAVKYDSNTGKPVHPVGRGAVGLDIGPQTLAYAGANEANLVELADQVQNIEQEKRRLQRKLDRSRRATNPDNYNENGTIRRGVKLTHNKSKRYCKLQKELSWIQHCQAETRKRQHIALANHLLSLGDCFYVEPMAWPSLTHRAKKTEVSEETGRIKRKKRFGKSVANKAPASLIGILKLKCISLGLTGVVEVPMLLRASQYNHQSKDYAKKSLSQRWNDMPDGNRIQRDLYSAFLLQHYDSRSESFDQETLERDYPQFVRLHNQTIQRLSALPKTPSSMGIRRSVS

SEQ ID NO: 1991 - protein, 529 aa, Unknown
  Description of Unknown: uncultivated organism sequence
  Category: MG81 effectors
  Description: MG81-269 effector
MAKNNNNNNNNTDTCVLTLPLRVEKWQEDCLLKRFEAARRIYNSLLNFELKKLRQLERTVEYRQIQSVISSAYRSNTKDSPECKDAFKRREKLISANGISENGFKSDVKFFYKHFDGLIGSNVAVHCIAVQLWAAFDKYLSGSGKEIHFKRLGDISSLKGYSVKGKSGGCEIIFRGQYVEWTRKKKKLLLPLKIDPDNEYEREMLSRRVKYVRIIKKPGKNRLRWYAQLTLEGKPALKYSAETGKPIHSVGKGNVGIDIGPQTVAYASDKEVALLELADRVTNIEHQKKKLQRKLDRSRRATNPDNYKPDGTIKCGVKLTRNKSKRYLKLQSKLAYIQHRQAEIRKLQHTCLANHMLTLGDRFFVEKMNWPGLAHRAKETSISEKTGRYKRKKRFGKSLANKAPAMFISILKRKCETLGLPGVVEVDTFRLRASQYNHLSDTYEKKSLSERWNYMPISDGSDSSKTKRIQRDLYSAFLLQHTIPQPCSFDKEALRIDYPNFVIMHDAEIHRLESLPKTITSMGVRRSHS

SEQ ID NO: 1992 - protein, 512 aa, Unknown
  Description of Unknown: uncultivated organism sequence
  Category: MG81 effectors
  Description: MG81-270 effector
MKKSSTDTCCLTLALKLEKWQEDRLAKRFEIARQLYNTLVHAELKRLVQIKRTAEYLENEQKIRALDRNNPADRAKLQELYKEQRKSLKTAGFTDYSFTTDMGKYYKHFRDNIGSSVAVHGIAPQVWAAFDKVLFKKGGKKVHYKRPGEVNSVQGYSRTGKSGGREIMFRGPYIEWKGLKLPLKLSPDNAYETDMLQRRVKLVRLVRRPGKRRDRWYAQLVLEGKPAIKADPVTGKAVHPIGSGPVGLDIGPQTLAYSAARVAGLVELADRVQNIEQEKRCLQRKMDRSRRAANPDNYAEDGTIRRGVKLTHNKSKRYRRSQQELKYLQHRQVEIRKLQHIQLANHLLSLGDHFYVEKMEWSSLTHRAKKTVISEKTGKPRSKKRFGKSIANKAPAMLIEILRQKCKSLGLPNVVEINPADIKASQYNHLTGEYVKKSLSRRWNEMQDGEHLQRDLYSAFLLQHYDSMSKALDLDSLARDYPAFVQYHHREIERLHALPKTPSSMGIRRSIA

SEQ ID NO: 1993 - protein, 511 aa, Unknown
  Description of Unknown: uncultivated organism sequence
  Category: MG81 effectors
  Description: MG81-271 effector
MKKSNTDTCCLTLPLKLEKWQEDRLAKRFEIARQIYNTMVHAELKKLRNIENSQPYRQIQKQIEALNWKNQNDKARLKSLYNDRNKLLNTIGFSEYGFKADIKYYYKHFNDNIGSSVAVHGIAPQVWAAFEKMLFHKEGKKVHYKKKDDIHSLHGYSVTGKSGGVGIIFRKTYIEWKGLKLPLKRSPDNAYETEMLGRRVKYVRLLRKPGKRKDCWYAQLSLEGKPAIKRDPESGKRRHSIGRGAVGLDIGPQTLAYSACGAADLVELADQVQNIEQMKRRLQRKLDRSRRATNPDNYADNGTIRRGVKLTHNKSNRYRRTQRELRYLQHCQAEIRKRQHIELANHLLALGDCFYVEDMAWPSLTHRAKETAISEKTGRIKRKKRFGKSVANKAPATLIGILEQKCNSLGLPGVVKVPTSLRASQYNHQSGEYTSKPLSQRWNNMPDGERIQRDLYSAFLLQHYDPKAGNFDSALLQQDYPQFVQYHHRAIQRLSTVPKTLSSMGIQRSLR

SEQ ID NO: 1994 - protein, 548 aa, Unknown
  Description of Unknown: uncultivated organism sequence
  Category: MG81 effectors
  Description: MG81-272 effector
MGWKSKGRGGTRVNNEEKEKDGATCCLTLPLKLEKWQSDHLEKRFEIARQLYNTLVHAELKRIHRIERMPEYREIERLIEATTDKKEKWALKNQKKQFLRKNGINRNTFTMDMKRLYKHFNDNIGSNVAQHGIVSQVLTAFEKVYIENQSGEVHFKKPGDLRSVQGYSQKKSGGVEIMFREGKIIWNQQGNNDRKGVAREFPLKLSPDNSYEAEMLKKHVKFVRILRKEGKTKPHWYAQLVLEGKPAIKRDPASGAPKHPVGHGVVGIDIGTRTLAYSADSKVDLIELADRVQNIEQEKLLLQRKLDRSRRATNPENYKPDGTIKKGVKLTWNNSKRYKRIQHQYAMIQHHQADIRKQQHNELANYLLTLGDCFFVEDMDYRALTRKAKKTEISEKTGRYKRKKRFGKSIANKAPSMLIALLDQKCKSLNLEGVKKVDTAVKASQYNHQTDECKAKELKERWNIMPDGERIQRDLYSAFLLQHCRRDLPEYNRKKLQETFGNELYRIFDREALQRDYPKFVEYHRETIQRLSALPKTIASMGIRRSIS

SEQ ID NO: 1995 - protein, 1387 aa, Unknown
  Description of Unknown: uncultivated organism sequence
  Category: MG81 effectors
  Description: MG81-273 effector
MKLTKVEKARIAVSREKKDSGRIILYTNPEDVKKTSVTTMEQQVSKRIDQANKLYQVFFKSVIPVELNKHFAEISKIAAKCRNTEEFYKKACGYSGYEWTDAKQKKRTSQISRFSYTSSGKNMYVVMDNFVKEYMVQIWQEKDFRNAAVKILCCICDGKKFASKLEKVKKESPDTLKKFIEISGKCEGNPFVDYDTSFLEKVFTLVISQMVKNCDRKSYEQDDKEKIKKSIQKEIQWLSHVQSVTERSFGREGKTYLLFKIRNPYATEERLQTVLIRMRKTLKRGRNRDIAIVLLQGLAQMNQVTFTDTVKHLYQEEEKAFCDFIDAVNRDYYRVNIVKSVRNMDVKVQPDLNDNSILKLSGLGNIKKEALSDTLLRYAASADESDQVLLDIKKLLFEYFLPENSKETSKYTTVQNLWNIPYLPKIFFDYGFENEDSDDDNECAEDIETLCDVEPQYKINQHSLKRRIRYVNYGKYLQMTKNESDRERRYWIHYIKEFVEKNYVDSGRTLSEKNCYASSMMLNCWKEIIRYLCGKYIDIGKAVFHFTNLTAMPKPKDKIIYGQLEEQYKKGISSFDYEAIKAEETLQRDIVQSVVAAAFAFSKSVIDETKMEECQETNKEDILFLSENVLGSLLKENTIKLILRFYGGESSVAQKEYFDQQEIVQEMISHLKSIRNENFHYLDGAKKDNPHKYASILWKNDEMAYQKLTKQRYYANNVGLFYRAEEIQELVQELYSQKNITEAQIPAFRTVLKRKDLPGYMEELGILFPDNTQEKSKGDFEGTLYFLMKEIYYRDFIVKDKAAAYFFKAVDQNKEQSKKEDKHTERAAENFHRYVKSLEKKYNKKEISFGTVCQYIMMEYNQQNTTKQETEIYKHFKMLISLCIRKAFGNYIKETYRFLFHPIYSKQQGEPEYLDTLELESGVKEKNYEWFTLAHFLHPVQLNHLVGDLKSYIQYREDILRRIVFAEQRVYADQQKEVQQKVKTAKEILEVLEFVREVSGRVSNEYTDYYENEEEYAEFLYQYIDFRKREGKSAFESLKYFCQNILDSGTVVDLYADTENPKVLRNIELTRMYAGSNVKIPEYEKITEDEIKMYYQEKNSVALILSRGLCRNEKEQKKVIEFNWKKKRLTLNEITDVFSLVNDLLGKMISFSYLRERDQMYLLLGFYYMALCAENKSENHLGWKGETLDKLESSDSKFDIGGGLVLYQIVSAFNFGSKLLYISEDGRWKMAGGAFPGKYGRFENDYNHRTSLSKVIRLFENESYEREIIYWRDYVDHMKYYVNQNQSIMEIYSAFYSKVLGYSAKLRKSVVFNLQAALEKHHINPECIWMTSDGKCADIKLMKNLESQKFTYKLAKREGEKTERKICMNALNENFLKTIRTSLEYKK

SEQ ID NO: 1996 - protein, 536 aa, Unknown
  Description of Unknown: uncultivated organism sequence
  Category: MG81 effectors
  Description: MG81-274 effector
MNNEEKEKDGATCCLTLPLKLEKWQSDHLEKRFEIARQLYNTLVHAELKRIHRIERMPEYREIERLIEATTDKKEKWALKNQKKQFLRKNGINRNTFTTDMKRLYKHFNDNIGSNVAQHGIVSQVLTAFEKVYIENQSGEVHFKKPGDLRSVQGYSQKKSGGVEIMFREGKIIWNQQGNNDRKGVAREFPLKLSPDNSYEAEMLKKHVKFVRILRKEGKTKPHWYAQLVLEGKPTVKRDPISGAPKHPVGHGVVGIDIGTRTLAYSTDSEVNLLELADRVQNIEQEKRRLQRKMDRSRRAMNPENYNSDGTFKRGVKLTRNKSKRYRRIQHQLAMIQHHQADIRKQQHNELANYLLTLGDCFFVENMSYCDLVHRANKTEISEKTGRYKRKKRFGKSIANKAPAMLITMLKQKCQSRGLEGVKEVDTHVRASQYNHQTDTCIEKALENRWNVMPDGERIQRDLYSAFLLQHCKQGLPEYDRKELKKEFGEELYRVFDREALQRDYPQFVAYHHMTIQRLSELPHTIPSMGIRRIIS

SEQ ID NO: 1997 - protein, 550 aa, Unknown
  Description of Unknown: uncultivated organism sequence
  Category: MG81 effectors
  Description: MG81-275 effector
MGWKSKGRGGTLVDNEEKKEDGATCCLTLPLKLEKWQSDHLEKRFEIARQLYNTLVHAELKKKCQVERMPEYQEIMKMIDTASNQKEKWALEKKRKAFLEENGFIRNAFKADMEKYYKHFNDNIGANVALHGITAQVWIAFDKVFVDNYKQKGKVHFKKPGELCSVQGYSQKKSGGKEIMFREDRIIWNQQGNRDRKKVKREFLLKLSPDNPYEAEMLKRHVKFVRILRKDGKTKPHWYAQLVLEGKPAVKRDPASGAPKHPIGHGVVGIDIGTRTLAYSTDKEVNLLELADRVQNIEQEKRRLQRKMDRSRRATNPENYNPDGTFKRGVKLTRNKSKRYKRIQHQYAMIQHHQADIRKQQHNELANYLLTLGDCFFVENMSYCDLVHRANKTEISEKTGRYKRKKRFGKSIANKAPAMLITMLKQKCQSRGLEGVKEVDTHVCASQYNHQTDTCIKKALENRWNIMPDGERIQRDLYSAFLLQHCRRDLPEYNRKELQKEFGEELYRVFDREALQRDYPQFVAYHHMTIQRLSELPHTIPSMGIRRIIS

SEQ ID NO: 1998 - protein, 511 aa, Unknown
  Description of Unknown: uncultivated organism sequence
  Category: MG81 effectors
  Description: MG81-276 effector
MKRSGTDTCCLTLPLRLEKWQEDRLAKRFEIARQIYNTMVRAELKKLRKMELSQPYRSIQEQIKALDWKNQNDKQQLRSLYNERDQLLKKNGFTEYGFKSDIKYYYKYFNDNIGSSVAVHGIAPQVWAAFEKMLFRKEGKKVHYKKKDDIHSLRGYSVTGKSGGVEIIFHETYIEWKGLKLPLKLSPHNAYETEMLSRRVKYVRLLRKPGKRKDRWYAQLSLEGKPAIKHNPASGELRHPVGQGAVGLDIGPQTLAYSACCAADLVELADRVQNIEQVKRLLLRKMDRSRRATNPDNYTDDGTIRRGVKLTHNKSKRYQRTQRELRYLQHCQAEMRKRQHIELANHLLTLGDRFYVEDMAWPSLTRRAKETAISEKTGKIKRKKRFGKSIANKAPAALIGILEQKCYSLGLPGVVKVPTSLKASQYNHQSGEYTPKPLSRRWNNMPDGERIQRDLYSAFLLQHYDPQTGNFDPVLLQQDYPQFVQYHHCAIQRLSAMPRTLSSMGIQRSLR

SEQ ID NO: 1999 - protein, 534 aa, Unknown
  Description of Unknown: uncultivated organism sequence
  Category: MG81 effectors
  Description: MG81-277 effector
MGWKSKGRGGTLVKKSSTDTCCLTLPLKLEKWQSDRLEKRFEIGRQIYNTIVHAELKKLRKLERTQQYQEIEQKLENAKQEETKELWKKKRQLLDQNGLSENHFKADMKYYYPHFKDNIASSVAVHGIASQAWTAFEKVLLSKDGKMVHFKKKGELSSLRGYSQAGKSGGIEIIFRGSYVEWKGLKLPLQLSPNNEYETEMLSKRVKYVRILRKDGKTKTHWYAQLALEGKPAVKRDSISGAPKHPVGHGVVGIDIGTRTLAYSADSKVDLIELADRVQNIEQEKMLLQRKLDRSRRATNPENYKPDGSIKQGVKLTWNNSKRYKRIQHQYAMIQHHQADIRKQQHNELANYLLTLGDCFFVEDMDYRALTRKAKKTEISEKTGRYKRKKRFGKSIANKAPSMLIALLDQKCKSLNLEGVKKVDTAVKASQYNHQTDECKAKELKERWNIMPDGERIQRDLYSAFLLQHCRRDLPEYNRKKLQETFGNELYRVFDREALQRDYPKFVEYHRETIQRLSALPKTIASMGIRRIIS

SEQ ID NO: 2000 - protein, 499 aa, Unknown
  Description of Unknown: uncultivated organism sequence
  Category: MG81 effectors
  Description: MG81-278 effector
MAKGKKKNQSVRCVLTLPLLTEPWQDKIIETRFHIMERIKNILISKELGKLKSLERTREWKKLKKDIEKCKEKDEEEKKILYEQRSKMIYDAGLSKNHFVVDITPIQKHFAEHIATQIAHMSASDVWRSFEKYFYGSGQRIHFVEYDKLNSIACEKIGNGMNLKDWKLVWGGGRCPNKISLTIKVRLPRNDYEREMMQKPIKYLRVVRKWMKTRYKYYLQITFEGNPVIKSRPVGNGRVGIDIGTQTIAWSSDTEVRLAELAAGIKQNQKKIAELKRKMDRSRRAMNPQNYNSNGTAKRGRHKWVKSKRYIRMRGILRELERKNADIRKYEHTCMVNHILSLGNQIYIEDMNWIALARRAKRTKKNKNGRYAKKKRFGKSIGKRAPGMFMLILKQKCNLVGGEYHEVDKSTFKASQYDHITDTFRKKPLGKRWNVLGGTDNVQRDMYSSFLIKNSDDTYMQTDRNRCIDTYTHFKELHDIEIERLMNENKKHLSSMGVA

SEQ ID NO: 2001 - protein, 551 aa, Unknown
  Description of Unknown: uncultivated organism sequence
  Category: MG81 effectors
  Description: MG81-279 effector
MSNLLFLLENEEKMRYNGVEKQREGEGTRVKRSSTDTCCLTLPLKLEKWQSDRLEKRFEIGRQIYNTIVHAELKKLRKLERTQQYQEIEQKLENAKQEETKELWKKKRQLLDQNGLSENHFKADMKYYYPHFKDNIASSVAVHGIASQAWTAFEKVLLSKDGKMVHFKKKGELSSLRGYSQAGKSGGIEIIFRGSYVEWKGLKLPLQLSPNNEYETEMLSKRVKYVRILRKDGKTKTHWYAQLALEGKPAVKRDSISGAPKHPVGHGVVGIDIGTRTLAYSTDSEVNLLELADRVQNIEQEKRRLQRKMDRSRRAMNPGNYKPDGSIKQGVKLTWNNSKRYKRIQHQYAMIQHHQADIRKQQHNELANYLLTLGDCFFVENMSYCDLVHRANKTEISEKTGRYKRKKRFGKSIANKAPAMLITMLKQKCQSRGLKGVKEVDTHVRASQYNHQTDTCIEKALENRWNVMPDGERIQRDLYSAFLLQHCRRDLPEYNRKELQKEFGEELYRVFDREALQRDYPQFVAYHHMTIQRLSELPHTIPSMGIRRIIS

SEQ ID NO: 2002 - protein, 522 aa, Unknown
  Description of Unknown: uncultivated organism sequence
  Category: MG81 effectors
  Description: MG81-280 effector
MKRSSTDTCCLTLPLKLEKWQSDRLEKRFEIGRQIYNTIVHAELKKLRKLERTQQYQEIEQKLENAKQEETKELWKKKRQLLDQNGLSENHFKADMKYYYPHFKDNIASSVAVHGIASQAWTAFEKVLLSKDGKMVHFKKKGELSSLRGYSQAGKSGGIEIIFRGSYVEWKGLKLPLQLSPNNEYETEMLSKRVKYVRILRKEGKTKTHWYAQLALEGKPAVKRDSISGAPKHPVGHGVVGIDIGTRTLAYSTDSEVNLLELADRVQNIEQEKRRLQRKMDRSRRAMNPGNYKPDGSIKQGVKLTWNNSKRYKRIQHQYAMIQHHQADIRKQQHNELANYLLTLGDCFFVEDMDYRALTRKAKKTEISEKTGRYKRKKRFGKSIANKAPSMLIALLDQKCKSLNLEGVKKVDTAVKASQYNHQTDECKAKELKERWNIMPDGERIQRDLYSAFLLQHCRRDLPEYNRKKLQETFGNELYRVFDREALQRDYPKFVEYHRETIQRLSALPKTIASMGIRRIIS

SEQ ID NO: 2003 - protein, 538 aa, Unknown
  Description of Unknown: uncultivated organism sequence
  Category: MG81 effectors
  Description: MG81-281 effector
MNNEEKEKEGATCCLTLPLKLEKWQSDHLEKRFEIARQLYNTLVHAELKKKCQVERMPEYQEIMKMIDTASNQKEKWALEKKRKAFLEENGFSRNAFKADMEKYYKHFNDNIGANVALHGITAQVWIAFDKVFVDNYKQKGKVHFKKPGELCSVQGYSQKKSGGKEIMFREDRIIWNQQGNRDRKKVKREFLLKLSPDNPYEAEMLKRHVKFVRILCKDGKTKPHWYAQLVLEGKPAVKRDPISSAPKHPVGHGVVGIDIGTRTLAYSTDKEVNLLELADHVQNIEQEKRRLQRKMDRSRRATNPENYNPDGTFKRGVKLTRNKSKRYRRIQHQLAMIQHHQADIRKQQHNELANYLLTLGDCFFVENMSYCDLVHRANKTEISEKTGRYKRKKRFGKSIANKAPAMLITMLKQKCQSRGLKGVKEVDTHVRASQYNHQTDTCIEKALENRWNVMPDGERIQRDLYSAFLLQHCKQGLPEYNRKELKKEFGEELYRVFDREALQRDYPQFVAYHHMTIQRLSELPHTIPSMGIRRIIS

SEQ ID NO: 2004 - protein, 550 aa, Unknown
  Description of Unknown: uncultivated organism sequence
  Category: MG81 effectors
  Description: MG81-282 effector
MGRKSTGRGGTRVNNEEKEKDGATCCLTLPLKLEKWQSDHLEKRFEIARQLYNTLVHAELKKKCQVVRMPEYQEIMKMIDAASNQKEKWALEKKRKAFLGENGFSRNAFKADMEKYYKHFNDNIGANVALHGITAQVWIAFDKVFVDNYKQKGKVHFKKPGELCSVQGYSQKKSGGKEIMFREDRIIWNQQGNRDRKKVKREFLLKLSPDNPYEAEMLKRHVKFVRILRKDGKTKPHWYAQLVLEGKPAVKRDPISSAPKHPVGHGVVGIDIGTRTLAYSTDKEVNLLELADRVQNIEQEKRRLQRKMDRSRRAMNPENYNSDGTFKRGVKLTRNKSKRYRRIQHQLAMIQHHQADIRKQQHNELANYLLTLGDCFFVENMSYCDLVHRANKTEISEKTGRYKRKKRFGKSIANKAPAMLITMLKQKCQSRGLEGVKEVDTHVRASQYNHQTDTCIEKALENRWNVMPDGERIQRDLYSAFLLQHCKQGLPEYNRKELKKEFGEELYRVFDREALQRDYPQFVAYHHMTIQRLSELPHTIPSMGIRRIIS

SEQ ID NO: 2005 - protein, 1387 aa, Unknown
  Description of Unknown: uncultivated organism sequence
  Category: MG81 effectors
  Description: MG81-283 effector
MKLTKVEKARIAVSREKKDSGRIILYTNPEDVKKTSVTTMEQQVSKRIDQANKLYQVFFKSVIPVELNKHFAEISKIAAKCRNTEEFYKKACGYSGYEWTDAKQKKRTSQISRFSYTSSGKNMYVVMDNFVKEYMVQIWQEKDFRNAAVKILCCICDGKKFASKLEKVKKESPDTLKKFIEISGKCEENPFVDYDTSFLEKVFTLVISQMVKNCDRKSYEQDDKEKIKKSIQKEIQWLSHVQSVTERSFGREGKTYLLFKIRNPYATEERLQTVLIRMRKTLKRGRNRDIAIVLLQGLAQMNQVTFTDTVKHLYQEEEKAFCDFIDAVNRDYYRVNIVKSVRNMDVKVQPDLNDNSILKLSGLGNIKKEALSDTLLRYAASADESDQVLLDIKKLLFEYFLPENSKETSKYTTVQNLWNIPYLPKIFFDYGFENEDFDDDNECAEDIETLCDVEPQYKINQHSLKRRIRYVNYGKYLQMTKNESDRERRYWIHYIKEFVEKNYVDSGRTLSEKNCYASSMMLNCWKEIIRYLCGKYIDIGKAVFHFTNLTAMPKPKDKIIYGQLEEQYKKGISSFDYEAIKAEETLQRDIVQSVVAAAFAFSKSVIDETKMEECQETNKEDILFLSENVLGSLLKENTIKLILRFYGGESTVAQKEYFDQQEIVQEMISHLKSIRNENFHYLDGAKKDNPHKYASILWKNDEMAYQKLTKQRYYANNVGLFYRAEEIQELVQELYSQKNITEAQIPAFRTVLKRKDLPGYMEELGILFPDNTQEKSKGDFEGTLYFLMKEIYYRDFIVKDKAAAYFFKAVDQNKEQSKKEDKHTERAAENFHRYVKSLEKKYNKKEISFGTVCQYIMMEYNQQNTTKQETEIYKHFKMLISLCIRKAFGNYIKETYRFLFHPIYSKQQGEPEYLDTLELESGVKEKNYEWFTLAHFLHPVQLNHLVGDLKSYIQYREDILRRIVFAEQRVYADQQKEVQQKVKTAKEILEVLEFVREVSGRVSNEYTDYYENEEEYAEFLYQYIDFRKREGKSAFESLKYFCQNILDSGTVVDLYADTENPKVLRNIELTRMYAGSNVKIPEYEKITEDEIKMYYQEKNSVALILSRGLCRNEKEQKKVIEFNWKKKRLTLNEITDVFSLVNDLLGKMISFSYLRERDQMYLLLGFYYMALCAENKSENHLGWKGETLDKLESSDSKFDIGGGLVLYQIVSAFNFGSKLLYISEDGRWKMAGGAFPGKYGRFENDYNHRTSLSKVIRLFENESYEREIIYWRDYVDHMKYYVNQNQSIMEIYSAFYSKVLGYSAKLRKSVVFNLQAALEKHHINPECIWMTSDGKCADIKLMKNLESQKFTYKLAKREGEKTERKICMNALNENFLKTIRTSLEYKK

SEQ ID NO: 2006 - protein, 536 aa, Unknown
  Description of Unknown: uncultivated organism sequence
  Category: MG81 effectors
  Description: MG81-284 effector
MNNEEKEKDGATCCLTLPLKLEKWQSDHLEKRFEIARQLYNTLVHAELKRIHRIERMPEYREIERLIEATTDKKEKWALKNQKKQFLRKNGINRNTFTTDMKRLYKHFNDNIGSNVAQHGIVSQVLTAFEKVYIENQSGEVHFKKPGDLRSVQGYSQKKSGGVEIMFREGKIIWNQQGNNDRKGVAREFPLKLSPDNSYEAEMLKKHVKFVRILRKDGKTKPHWYAQLVLEGKPAIKRDPASGAPKHPIGHGVVGIDIGTRTLAYSADSKVDLIELADRVQNIEQEKLLLQRKLDRSRRATNPENYKPDGTIKKGVKLTWNNSKRYKRIQHQYAMIQHHQADIRKQQHNELANYLLTLGDCFFVEDMDYRALTRKAKETEISEKTGRYKRKKRFGKSIANKAPSMLITLLDQKCKSLNLEGVKKVDTAVKASQYNHQTDECKAKELKERWNIMPDGERIQRDLYSAFLLQHCRRDLPEYNRKKLQEAFGNELYRVFDREALQRDYPKFVEYHRKTIQRLSALPKTIASMGIRRSIS

SEQ ID NO: 2007 - protein, 522 aa, Unknown
  Description of Unknown: uncultivated organism sequence
  Category: MG81 effectors
  Description: MG81-285 effector
MKRSSTDTCCLTLPLKLEKWQSDRLEKRFEIGRQIYNTIVHAELKKLRKLERTQQYQEIEQKLENAKQEETKELWKKKRQLLDQNGLSENHFKADMKYYYPHFKDNIASSVAVHGIASQAWTAFEKVLLSKDGKMVHFKKKGELSSLRGYSQAGKSGGIEIIFRGSYVEWKGLKLPLQLSPNNEYETEMLSKRVKYVRILRKEGKTKTHWYAQLALEGKPAVKRDSISGAPKHPVGHGVVGIDIGTRTLAYSTDSEVNLLELADRVQNIEQEKRRLQRKMDRSRRATNPENYNPDGTFKRGVKLTRNKSKRYRRIQHQLAMIQHHQADIRKQQHNELANYLLTLGDCFFVENMSYCDLVHRANKTEISEKTGRYKRKKRFGKSIANKAPAMLITMLKQKCQSRGLKGVKEVDTHVRASQYNHQTDTCIEKALENRWNVMPDGERIQRDLYSAFLLQHCKQGLPEYNRKELKKEFGEELYRVFDREALQRDYPQFVAYHHMTIQRLSELPHTIPSMGIRRIIS

SEQ ID NO: 2008 - protein, 530 aa, Unknown
  Description of Unknown: uncultivated organism sequence
  Category: MG81 effectors
  Description: MG81-286 effector
MANNNNNNNNNNTDTCVLTLPLRVEKWQEDCLLKRFEAARRIYNSLLNFELKKLRQLERTVEYRQIQSVISSAYRSNTKDSPECKDAFKRREKLISANGISENGFKSDVKFFYKHFDGLIGSNVAVHCIAVQLWAAFDKYLSGSGKEIHFKRLGDISSLKGYSVKGKSGGREIIFRGQYVEWTRKKKKLLLPLKIDPDNEYEREMLSRRVKYVRIIKKPGKNRLRWYAQLTLEGKPALKYSAETGKPIHSVGKGNVGIDIGPQTVAYASDKEVALLELADRVTNIEHQKKKLQRKLDRSRRATNPDNYKPDGTIKRGVKLTRNKSKRYLKLQSKLAYIQHRQAEIRKLQHTCLANHMLTLGDRFFVEKMNWPSLAHRAKETSISEKTGRYKRKKRFGKSLANKAPAMFISILKRKCETLGLPGVVEVDTYSLKASQYNHLSDTYEKKSLSERWNYMPISDGSDSSKTKRIQRDLYSAFLLQHTIPQPCSFDKEALRIDYPNFVTMHDAEIHRLESLPKTITSMGVRRSHS

SEQ ID NO: 2009 - protein, 550 aa, Unknown
  Description of Unknown: uncultivated organism sequence
  Category: MG81 effectors
  Description: MG81-287 effector
MGWKSKGRGGTLVDNEEKKEDGATCCLTLPLKLEKWQSDHLEKRFEIARQLYNTLVHAELKKKCQVERMPEYQEIMKMIDTASNQKEKWALEKKRKAFLEENGFSRNAFKADMEKYYKHFNDNIGANVALHGITAQVWIAFDKVFVDNYKQKGKVHFKKPGELCSVQGYSQKKSGGKEIMFREDGIIWNQQGNRDRKKVKREFLLKLSPDNPYEAEMLKRHVKFVRILRKDGKTKPHWYAQLVLEGKPAVKRDPASGAPKHPIGHGVVGIDIGTRTLAYSTDKEVNLLELADRVQNIEQEKRRLQRKMDRSRRATNPENYNPDGTFKRGVKLTRNKSKRYKRIQHQYAMIQHHQADIRKQQHNELANYLLTLGDCFFVENMSYCDLVHRANKTEISEKTGRYKRKKRFGKSIANKAPAMLITMLKQKCQSRGLEGVKEVDTHVCASQYNHQTDTCIKKALENRWNIMPDGERIQRDLYSAFLLQHCRRDLPEYNRKELQKEFGEELYRVFDREALQRDYPQFVAYHHMTIQRLSELPHTIPSMGIRRIIS

SEQ ID NO: 2010 - protein, 511 aa, Unknown
  Description of Unknown: uncultivated organism sequence
  Category: MG81 effectors
  Description: MG81-288 effector
MGKSSTDTCCLTLPLKLEKWQEDRLAKRFEIARQIYNTMVRAELKRLRQVEQSPQYRSNKKAIQALDWKNTADKPKLKTLYRERDKLLKGGGFTKYGFKSDIKNFYKHFAENIGSSVAVHGIAPQVWAAFERVLFKKEGKKVHFKKTGDIRSLRGYSVTGKSGGVEIIFRGSYIEWKGLNLPLKLSPDNAYETEMLSYRVKYVRILRKPGKTRDRWYAQLSLEGKPAIKRNPASGNPVHPVGQGTVGLDIGPQTLAYAAEKEANLVELADRVQNIEREKHLLQRKMDRSRRAANPDNYAENGTIRRGVKLTHNKSKRYLRLQRELCYLQHCQAETRKRQHTELANHLLSLGSCFYVEDMAWPSLTHRAKKTEISDKTGRIKRKKRFGKSIANKAPAALINILRTKCVSLGIPGVVEVPTSLKASQYNHQSKEYTPKPLSQRWNDMPDGSRIQRDLYSAFLLQHYDPQSGNFDQASLEADYPQFVQLHNQSIQRLLTVPKTPSSMGIRRSVS

SEQ ID NO: 2011 - protein, 532 aa, Unknown
  Description of Unknown: uncultivated organism sequence
  Category: MG81 effectors
  Description: MG81-289 effector
MILLAKNNNNNNNNTDTCVLTLPLRVEKWQEDCLLKRFEAARRIYNSLLNFELKKLRQLERTVEYRQIQSVISSAYRSNTKDSPECKDAFKRREKLISANGISEYGFKSDVKFFYKHFDGLIGSNVAVHCIAVQLWAAFDKYLRGSGKEIHFKRLGDISSLKGYSVKGKSGGCEIIFRGQYIEWTRKKKKLLLPLKIDPDNEYEREMLSRRVKYVRIIKKPGKNRLRWYAQLTLEGKPALKYSAETGKPIHSVGKGNVGIDIGPQTVAYASDKEVALLELADRVTNIEHQKKKLQRKLDRSRRATNPDNYKPDGTIKRGVKLTRNKSKRYLKLQSKLAYIQHRQAEIRKLQHTCLANHMLTLGDRFFVEKMNWPGLAHRAKETSISEKTGRYKRKKRFGKSLANKAPAMFISILKRKCETLGLPGVVEVDTYSLKASQYNHLSDTYEKKSLSERWNYMPISDGSDSSKTKRIQRDLYSAFLLQHTIPQPCSFDKKALRIDYPNFVTMHDAEIHRLESLPKTITSMGVRRSHS

SEQ ID NO: 2012 - protein, 512 aa, Unknown
  Description of Unknown: uncultivated organism sequence
  Category: MG81 effectors
  Description: MG81-290 effector
MPTKQKEDSNRCVLTLPLLTEPWQEHIIEKRFKIIEHLKNQLISIELRKLKNLQRTKAYKNLMKRIESVPKAERTALYKERNKMLEGKGFSQYTFMDDMAGKKSLMQKHFESHINVQIAHKAAIDVWSSFEKFLFGSGQMIHYQKRGTLSSVASKSPKTGMFYYSDENIFKWSGGGTKPKGGIILCLRVASVKTNYEKEMVANNEIKYYRVVRKWMKTKYKYYLQITFAGKPADKHREISTGRVGIDIGTQTIAIASDKSVKLLELADKVNKNHIKKCELQRKLDRSRRYTNPDNFNPDGTVKRGTKGHKLKWNKSKHYIEIAGKIRELERKNADIRKYQHTCLANDILAMGNQIYIEPMNYKGLQKRAKETQVDEKGRYKKKKRFGKSLANKAPAMFVTILKTKAEQHGGEVYEVDIMSYRASQCDHTTGEYTKHGLNDRWRILGNGDKVQRDLYSAFLIKNSNKTHDEIDLDKCSKTYDNFKKLHDKEIENIRNEVKLRERKNISSYGIA

SEQ ID NO: 2013 - protein, 467 aa, Unknown
  Description of Unknown: uncultivated organism sequence
  Category: MG81 effectors
  Description: MG81-291 effector
MAKCSTDTCCLTLPLRLEKWQEDRLAKRFEIARQIYNTMVRAELKKLRAMEQSEPYKANQEKIQALDRKTQTDKQALKALYKERDKLLRDGGFSEYGFKSDIKNYYKHFNNNIGSNVAFHGIAPQVWAAFEKMLFKKEGKKVHFKKKGDIRSLRGYSVTGKSGGVEIIFRETYIEWKGLKLPLKLSPDNIYETQMLSYRVKYVRLLRKPGKRKDRWYAQLSLEGKPVIKYNPKTGEVRHPIGKGAVGLDIGPQTLAYSAATGADLVELANQVQNVEQEKRRLQRKLDRSRRATNPGNYANDGTIRRGIALTHNQSKRYLRTQQELKYLQHQQAEIRKRQHTELANHLLSLGDCFYVEKMVWTSLTHRAKETEISEKTGKIKRKKRFGKSVANKAPATLIGILQRKSAALGIPGVIEVPTSVKASQYNHQSGTYTPKPLSQRWNNMPDGERIQLRIFITALRPANKHF

SEQ ID NO: 2014 - protein, 511 aa, Unknown
  Description of Unknown: uncultivated organism sequence
  Category: MG81 effectors
  Description: MG81-292 effector
MAKCSTDTCCLTLPLRLEKWQEDRLAKRFEIARQIYNTMVRAELKKLRAMEQSEPYKANQEKIQALDWKTQTDKQALKALYKERDKLLRDGGFSEYGFKSDIKNYYKHFNNNIGSNVAFHGIAPQVWAAFEKMLFKKEGKKVHFKKKGDIHSLRGYSAAGKSGGVEIIFRETYIEWKGLKLPLKLSPDNIYETQMLSYRVKYVRLLRKPGKRKDRWYAQLSLEGKPVIKYNPKTGEVRHPIGKGAVGLDIGPQTLAYSAATGADLVELANQVQNVEQEKRRLQRKLDRSRRATNPGNYADDGTIRRGIALTHNKSKRYLRTQQELKYLQHQQAEIRKRQHTELANHLLSLGDCFYVEKMVWTSLTHRAKETEISEKTGKIKRKKRFGKSVANKAPATLIGILQRKSAALGIPGVIEVPTSVKASQYNHQSGTYTHKPLSQRWNNMPDGERIQRDLYSAFLLQHYDPQTNTFDANSLHQDYPQFVQYHHDAVLRLYAMPKAPSSMGIKRSLR

SEQ ID NO: 2015 - protein, 510 aa, Unknown
  Description of Unknown: uncultivated organism sequence
  Category: MG81 effectors
  Description: MG81-293 effector
MKKCSTDTCCLTLPLKLEKWQEDRLAKRFELARQIYNTMVHAELKKLKALEHSEQYQEIQEQLRVLTQKEHQDKKKLRLLYKARDELLKSWGFSEYGFKENIKYYYKHFNKNIGSSVAFHGIAPQVWTAFEKVLFGNGKKVHYKRFGEMRSLRGFSSTGKSGGVEIMFRGTYIEWKGLKLLLKLSPNNAYENEMLSYRVKYVRLIRKPGKQKDRWYAQLVLEGKPAVKYDLGTGKAIHPVGSGAVGLDIGPQTLAYSASSEADLVELADQVQNIEQIKCRLQRKMDRSRRATNPDNYKDDGTIKRGVKLTHNKSKRYCKIQRELKYLQHCQAETRKRQHIQLANHLISLGDCFYVEEMSWAALVHRSKKTEVSEKTGRFKRKKRFGKSIANKAPRSMIEILRQKCISLGVPGVIEVPTSVRASQYNHQSDEYTKKTLSQRWNLMPDGQRIQRDLYSAFLLQHYDPKTENFDSDSLQHDYPQFVIYHQQVIQRLSVIPKTPSSMGIYRSVR

SEQ ID NO: 2016 - protein, 512 aa, Unknown
  Description of Unknown: uncultivated organism sequence
  Category: MG81 effectors
  Description: MG81-294 effector
MKKSSTDTCCLTLPLKLEKWQEDRLAKRFEIARQLYNTLVHAELKRLAQVKQTAEYRENERKIRTLDWNDPGDQAKLKGLYKERRKSLKTAGFTDYSFTTDMGKYYKHFRDNIGSSVAVHGIAPQVWAAFDKLLFKKGGKKVHYKKPGEVNSVQGYSRTGKSGGTEIMFRGPYIEWKGLKLPLKLSPDNAYETDMLQRRVKLVRLVRRPGKRRDRWYAQLVLEGKPAIKADPVTGKAVHPIGSGPVGLDIGPQTLAYSAAGAAGLVELADRVQNIEQEKRCLQRKMGRSRRATNPDNYAEDGTIRRGVKLTHNKSKRYRRSQQELKYLQRRQAEIRKLQHIQLANHLLSLGDHFYVEKMEWSSLTHRAKKTVISEKTGKPRSKKRFGKSIANKAPAMLIEILRQKCKSLGLPNVVEINPADIKASQYNHLTGEYVKKSLSRRWNDMQDGEHLQRDLYSAFLLQHYDSMSKALDLDSLARDYPAFVQYHHQEIERLHALPKTPASMGIRRSIA

SEQ ID NO: 2017 - protein, 602 aa, Unknown
  Description of Unknown: uncultivated organism sequence
  Category: MG81 effectors
  Description: MG81-295 effector
MTTILRAYKTELDPTDEQRVVLARHVAGARVAHNWALEKWKELDGTRGVALGCRALAGIDAKGGEAAALFGYCLAALIRGEPVKVRTPKSEAGSRYRYRPASGVQLPDFRAGRVDWYSQLVSAKEEQPERFGWLSELSAFAIREAVLDVADGWKHFFEHLKAGRYASAGPPRFRGRQRASYHSDQPDPIRVTERAVKIPGVGWVRMKERGYLPVTEENSHRFIGGGKACGLGVSEKDGRWYVALRCEVPRPFPQKRGPGRALAMHQTKRVPGRELGVEVGVRVLAVASTGERAGHVWHSPLRDDRRIDKFEMLRKRWERRMARRWKDGVKTRDQSQGWKEAAMRVAHYHARIKSLRDDVCGKAARQIADMGAETVRMRGPGIAKMLSRAGKRGDAARTRNRLAKNVHAARMGDLRRRLEYKQAWAGGRLELVPIEEPTTNRCSACNAVRDTNAGYPTFMCPTCGYQEDRDDNSAINLLNYRAPSGDPAAGPRSAGLKPPKGDNGRRKRTARAEEKSSVTAPHGDVTSAPGPGNRVSGASHSVRPIDAYHEVPFEQSGDAHLGSRQFGLDTALFGADDPNRSQIEPQRSEFPGLLAHRAGGTS

SEQ ID NO: 2018 - protein, 525 aa, Unknown
  Description of Unknown: uncultivated organism sequence
  Category: MG81 effectors
  Description: MG81-296 effector
MTKNNNNTDTCVLTLPLRVEKWQEDCLLKRFEAARRIYNSLLNFELKKLRQLERTVEYRQIQSVISSAYRSNTKDSPECKDAFKRREKLISANGISEYGFKSDVKFFYKHFDGLIGSSVAVHCIAVQLWAAFDKYLRGSGKEIHFKRLGEISSLKGYSVKGKSGGLEIIFRGQYVEWTRKKKKLLLPLKIDPDNEYEREMLSRRVKYVRIIKKPGKNRLRWYAQLTLEGKPALKYSAETGKPIHSVGKGDVGIDIGPQTVAYASDKEVALLELADRVTNIEHQKKKLQRKLDRSRRATNPDNYKPDGTIKRGVKLTRNKSKRYLKLQSKLAYIQHRQAEIRKLQHTCLANHMLTLGDRFFVEKMNWPGLAHRAKETSISEKTGRYKRKKRFGKSLANKAPAMFISILKRKCETLGLPGVVEVDTFRLKASQYNHLSDTYEKKSLSERWNYMPISDGSDSSKTKRIQRDLYSAFLLQHTIPQPCSFDKEALREDYPNFVTMHDAEIHRLEYLPKTITSMGVRRSHS

SEQ ID NO: 2019 - protein, 527 aa, Unknown
  Description of Unknown: uncultivated organism sequence
  Category: MG81 effectors
  Description: MG81-297 effector
MAKKNNNNNTDTCVLTLPLRVEKWQEDCLLKRFEAARRIYNSLLNFELKKLRQLERTVEYRQIQSVISSAYRSNTKDSPECKDAFKRREKLISANGISENGFKSDVKFFYKHFDGLIGSNVAVHCIAVQLWAAFDKYLSGSGKEIHFKRLGDISSLKGYSVKGKSGGCEIIFRGQYVEWTRKKKKLLLPLKIDPDNEYEREMLSRRVKYVRIIKKPGKNRLRWYAQLTLEGKPALKYSAETGKPIHSVGKGNVGIDIGPQTVAYASDKEVALLELADRVTNIEHQKKKLQRKLDRSRRATNPDNYKPDGTIKCGVKLTRNKSKRYLKLQSKLAYIQHRQAEIRKLQHTCLANHMLTLGDRFFVEKMNWPGLAHRAKETSISEKTGRYKRKKRFGKSLANKAPAMFISILKRKCETLGLPGVVEVDTFRLRASQYNHLSDTYEKKSLSERWNYMPISDGSDSSKTKRIQRDLYSAFLLQHTIPQPCSFDKEALRIDYPNFVIMHDAEIHRLESLPKTITSMGVRRSHS

SEQ ID NO: 2020 - protein, 542 aa, Unknown
  Description of Unknown: uncultivated organism sequence
  Category: MG81 effectors
  Description: MG81-298 effector
MATTDKKDEDKEKLRAYKFRLDPNQAQTIALYQAAGAARYTYNMLTAYNLEVNRLRDEYWKKRHDEGISDADIKKELNALAKEDKRYKQLKYGAFGTQYLTPEKKRHEQAEHRIENGEDPSVVWNQETERSANPWLHTANRRVLVSGLQNASDAWDNFWDSRTGKRAGRLVGTPRFKKKGVSRDSFTVPAAEKMGAYGAAYLRGEPAYKQGRRKITDYRHVRLSYLGTIRTFNSTKPLVKAVAAGAKIRSYTVSRNADRWYVSFLVKFSEPIRRSATKRARAAGSVGVDLGVKYLASLSDSEAPQRFPNLKFVEGLPSLENPRWSEASSRRLHKLQRALARSQKGSNRRSRLVKQIARLHHMTALRRESNLHQLTKKLATGYTLVGFEDLNVSGMTASAKGTVENPGKNVAQKSGLNRVVLDAAFGVFRNQLEYKAVWYGSAFEKVNRYFASSQTCSECGRKAKTKLTLRDRVFDCAYCGNMMDRDFNAAVNICREAQRLFDEKLASEDGESLNGRGSRGALRGAKTVEASRPPASHRRGSP

SEQ ID NO: 2021 - protein, 514 aa, Unknown
  Description of Unknown: uncultivated organism sequence
  Category: MG81 effectors
  Description: MG81-299 effector
MGNSSTDTCCLTLPLKLEKWQEDRLAKRFELARQIYNTLVRAELKKLERVKHSAPYREIQGQIQALDWSNPNDKGALRRLYKARDALLKSSGFTEYSFKSDIKYYYKHFSDNIGSDVAFHGIAPQVWTAFEKVLFKGGKKIHYKQYGDVSSVQGYSKTRKSGGREIMFRGTYIEWKGLKLPLKLSPDNAYENEMLRYRIKFVRLVRKPGKQKDRWYAQLVLEGKPVVKREPATGEAVHPVGSGVVGLDIGPRTLAYSAPGEAGLVELADQVQNIEQAKCRLQRKLDRSRRATNPDNYSENGTIRRGVKLTRNKSKRYRKIQNQLKYLQYCQAETRKRQHTQLANHLLSLGDSFYVEDMPWPALARRAKETVVSEKTGRIKRKKRFGKSIANKAPATLTRILKQKCTSLGLPGVVEVPTSVRASQYNHQTGEYIKKPLSQRWNNMPDGQRIQRDLYSAFLLQHYDPGTGTFDSASLQRDYPQFTQYHHQVIQHLLSMPKTLSSMGIRQSIRQYEF

SEQ ID NO: 2022 - protein, 1387 aa, Unknown
  Description of Unknown: uncultivated organism sequence
  Category: MG81 effectors
  Description: MG81-300 effector
MKLTKVEKARIAVSREKKDSGRIILYTNPEDVKKTSVTTMEQQVSKRIDQANKLYQVFFKSVIPVELNKHFAEISKIAAKCRNTEEFYKKACGYSGYEWTDAKQKKRTSQISRFSYTSSGKNMYVVMDNFVKEYMVQIWQEKDFRNAAVKILCCICDGKKFASKLEKVKKESPDTLKKFIEISGKCEGNPFVDYDTSFLEKVFTLVISQMVKNCDRKSYEQDDKEKIKKSIQKEIQWLSHVQSVTERSFGREGKTYLLFKIRNPYATEERLQTVLIRMRKTLKRGRNRDIAIVLLQGLAQMNQVTFTDTVKHLYQEEEKAFCDFIDAVNRDYYRVNIVKSVRNMDVKVQPDLNDNSILKLSGLGNIKKEALSDTLLRYAASADESDQVLLDIKKLLFEYFLPGNSKETSKYTTVQNLWNIPYLPKIFFDYGFENEDSDDDNECAEDIETLCDVEPQYKINQHSLKRRIRYVNYGKYLQMTKNESDRERRYWIHYIKEFVEKNYVDSGRTLSEKNCYASSMMLNCWKEIIRYLCGKYIDIGKAVFHFTNLTAMPKPKDKIIYGQLEEQYKKGISSFDYEAIKAEETLQRDIVQSVVAAAFAFSKSVIDETKMEECQETNKEDILFLSENVLGSLLKENTIKLILRFYGGESSVAQKEYFDQQEIVQEMISHLKSIRNENFHYLDGAKKDNPHKYASILWKNDEMAYQKLTKQRYYANNVGLFYRAEEIQELVQELYSQKNITEAQIPAFRTVLKRKDLPGYMEELGILFPDNTQEKSKGDFEGTLYFLMKEIYYRDFIVKDKAAAYFFKAVDQNKEQSKKEDKHTERAAENFHRYVKSLEKKYNKKEISFGTVCQYIMMEYNQQNTTKQETEIYKHFKMLISLCIRKAFGNYIKETYRFLFHPIYSKQQGEPEYLDTLELESGVKEKNYEWFTLAHFLHPVQLNHLVGDLKSYIQYREDILRRIVFAEQRVYADQQKEVQQKVKTAKEILEVLEFVREVSGRVSNEYTDYYENEEEYAEFLYQYIDFRKREGKSAFESLKYFCQNILDSGTVVDLYADTENPKVLRNIELTRMYAGSNVKIPEYEKITEDEIKMYYQEKNSVALILSRGLCRNEKEQKKVIEFNWKKKRLTLNEITDVFSLVNDLLGKMISFSYLRERDQMYLLLGFYYMALCAENKSENHLGWKGETLDKLESSDSKFDIGGGLVLYQIVSAFNFGSKLLYISEDGRWKMAGGAFPGKYGRFENDYNHRTSLSKVIRLFENESYEREIIYWRDYVDHMKYYVNQNQSIMEIYSAFYSKVLGYSAKLRKSVVFNLQAALEKHHINPECIWMTSDGKCADIKLMKNLESQKFTYKLAKREGEKTERKICMNALNENFLKTIRTSLEYKK

SEQ ID NO: 2023 - protein, 538 aa, Unknown
  Description of Unknown: uncultivated organism sequence
  Category: MG81 effectors
  Description: MG81-301 effector
MDNEEKKEDGATCCLTLPLKLEKWQSDHLEKRFEIARQLYNTLVHAELKKKCQVERMPEYQEIMKMIDTASNQKEKWALEKKRKAFLEENGFSRNAFKADMEKYYKHFNDNIGANVALHGITAQVWIAFDKVFVDNYKQKGKVHFKKPGELCSVQGYSQKKSGGKEIMFREDRIIWNQQGNRDRKKVKREFLLKLSPNNPYEAEMLKRHVKFVRILRKDGKTKPHWYAQLVLEGKPAVKRDPISSAPKHPVGHGVVGIDIGTRTLAYSTDKEVNLLELADRVQNIEQEKRRLQRKMDRSRRAMNPENYNPDGTFKRGVKLTRNKSKRYRRIQHQLAMIQHHQADIRKQQHNELANYLLTLGDCFFVENMSYCDLVHRANKTEISEKTGRYKRKKRFGKSIANKAPAMLITMLKQKCQSRGLEGVKEVDTHVRASQYNHQTDTCIEKALENRWNVMPDGERIQRDLYSAFLLQHCKQGLPEYNRKELKKEFGEELYRVFDREALQRDYPQFVAYHHMTIQRLSELPHTIPSMGIRRIIS

SEQ ID NO: 2024 - protein, 511 aa, Unknown
  Description of Unknown: uncultivated organism sequence
  Category: MG81 effectors
  Description: MG81-302 effector
MAKCSTDTCCLTLPLRLEKWQEDRLAKRFEIARQIYNTMVRAELKKLRAIEQSEPYKANQEKIQALDWKTQADKRALKALYKERDKLLRAGGFSERGFKSDIKNYYMHFNNNIGSNVAAHGIAPQVWAAFEKMLFKKEGKKVHFKKKGDIHSLRGYSVTRKSGGVEIIFRETYIEWKGLKLPLKLSPDNIYETQMLSYRVKYVRLLRKSGKRKDRWYAQLSLEGKPVIKYNPKTGEVRHPIGKGAVGLDIGPQTLAYSAATGADLVELANQVQNVEQEKRRLQRKLDRSRRATNPGNYADDGTIRRGIALTHNKSKRYLRTQQELKYLQHQQAEIRKRQHTELANHLLSLGDRFYVEKMAWTSLTHRAKETEISEKTGKIKRKKRFGKSVANKAPATLIGILQRKSAALGIPGVIEVPTSVKASQYNHQSGTYTPKPLSQRWNNMPDGKRIQRDLYSAFLLQHYDPQTNTFDANSLHQDYPQFVQYHHDAVLRLYAMPKTPSSMGIKRSLR

SEQ ID NO: 2025 - protein, 512 aa, Unknown
  Description of Unknown: uncultivated organism sequence
  Category: MG81 effectors
  Description: MG81-303 effector
MKKSSTDTCCLTLPLKLEKWQEDRLAKRFEIARQLYNTLVHAELKRLAQVKQTAEYRENERKIRTLDWNDPGDQAKPKGLYKERRKSLKTAGFTDYSFTTDMGKYYKHFRDNIGSSVAVHGIAPQVWAAFDKVLFKKGGKKVHYKRPGEVNSVQGYSRTGKSGGREIMFRGAYIEWKGLKLPLKLSPDNAYETDMLQRRLKLVRLVRRPGKRRDRWYAQLVLEGKPAIKADPVTGKAVHPIGSGPIGLDIGPQTLAYSAAGVAGLVELADRVQNIEQEKRCLQRKMDRSRRATNPDNYAEDGTIRRGVKLTHNKSKRYRRSQQELKYLQHRQAEIRKLQHIQLANHLLSLGDHFYVEKMEWSSLTHRAKETVISEKTGKPRSKRRFGKSIANKAPAMLIEILRQKCKSLGLSDVVEINPADIKASQYNHLTGEYVKKSLSRRWNDMQDGEHLQRDLYSAFLLQHYDSCSKTLDHDSIVRDYPAFVQYHHREIERLHALPKTPSSMGIRRSIA

SEQ ID NO: 2026 - protein, 534 aa, Unknown
  Description of Unknown: uncultivated organism sequence
  Category: MG81 effectors
  Description: MG81-304 effector
MGWKSKGRGGTLVKKSSTDTCCLTLPLKLEKWQSDRLEKRFEIGRQIYNTVVRAELKKLQQVERTPQYREIEQKLKEAKQEEAKELWKTRTQLLSKSGFSEYGFKSDMKYYYQHFKENIGSSVAVHGIASQVWTAFEKVLFSKDGKMVHFKKKGELSSLRGYSQAGKSGGIEIIFRGSYVEWKGLKLPLKLSPDNDYETEMLSKRVKYVRILRKEGKTKPHWYAQLVLEGKPAIKRDPASGAPKHPVGHGVVGIDIGTRTLAYSADSKVDLIELADRVQNIEQEKMLLQRKLDRSRRATNPENYKPDGTIKKGVKLTRNKSKRYRKIQHQLAMLQHRQADIRKRQHNELANYLLTLGDCFFVEDMDYRALTRKAKKTEISENTGRYKRKKRFGKSIANKAPSMLIALLDQKCKSLNLEGVKKVDTAVKASQYNHQTDECKAKELKERWNIMPDGERIQRDLYSAFLLQHCRRDLPEYNRKKLQETFGNELYRVFDREALQRDYPKFVEYHRETIQRLSALPKTIASMGIRRSIS

SEQ ID NO: 2027 - protein, 511 aa, Unknown
  Description of Unknown: uncultivated organism sequence
  Category: MG81 effectors
  Description: MG81-305 effector
MGKSKTETCCLTLPLKLEKWQEDRLAKRFEIARQIYNTLVHAKLKKLNQIERSSEYQTIQDQITNLDRNDPERIKELPSLYKKRTKLLRDAGFTEYGFKSDVKHYYKYFHKNIGSSVAVHGIAPQVWAAFEKKLFKKQGKIVHYKRKGTLRSVKGGSATGKSGGTEIIFRGTYIQWKDLNLPLKRSPDNAYESEMLGYRVKYVRILRKPGKSKNRWYAQLVLEGKPVIKRNPMTGAALHPVGHGAVGLDIGPQTLAYSAADGVGLLELADQVQNIERQKALLQRKLDQSRRASNPDNYNEDGTIKRGVKLTRNQSKRYCKTQRDLAYLQHCQAETRKRQHIALANHLLTLGDRFYVEQMSWVALARRSKKTEVSEKTGKIKRKKRFGKSIANKAPAMLIEILRQKCISLGLPGVVDVPTSIKASQYNHQSKDYIKKNLSERWNDMPDGEKIQRDLYSAFLLQHCTPELNAFDQESLQQDYPQFVQYHHQVMQQLSEMPKTPSSMGIRRRTS

SEQ ID NO: 2028 - protein, 538 aa, Unknown
  Description of Unknown: uncultivated organism sequence
  Category: MG81 effectors
  Description: MG81-306 effector
MNNEEKEKEGATCCLTLPLKLEKWQSDHLEKRFEIARQLYNTLVHAELKKKCQVERMPEYQEIMKMIDTASNQKEKWALEKKRKAFLEENGFSRNAFKADMEKYYKHFNDNIGANVALHGITAQVWIAFDKVFVDNYKQKGKVHFKKPGELCSVQGYSQKKSGGKEIMFREDRIIWNQQGNRDRKKVKREFLLKLSPNNPYEAEMLKRHVKFVRILRKDGKTKPHWYAQLVLEGKPAVKRDPISSAPKHPVGHGVVGIDIGTRTLAYSTDKEVNLLELADHVQNIEQEKRRLQRKMDRSRRATNPENYNPDGTFKRGVKLTRNKSKRYRRIQHQLAMIQHHQADIRKQQHNELANYLLTLGDCFFVENMSYCDLVHRANKTEISEKTGRYKRKKRFGKSIANKAPAMLITMLKQKCQSRGRKGVKEVDTHVRASQYNHQTDTCIEKALENRWNVMPDGERIQRDLYSAFLLQHCKQGLPEYNRKELKKEFGEELYRVFDREALQRDYPQFVAYHHMTIQRLSELPHTIPSMGIRRIIS

SEQ ID NO: 2029 - protein, 522 aa, Unknown
  Description of Unknown: uncultivated organism sequence
  Category: MG81 effectors
  Description: MG81-307 effector
MKRSSTDTCCLTLPLKLEKWQSDRLEKRFEIGRQIYNTIVHAELKKLRKLERTQQYQEIEQKLENAKQEETKELWKKKRQLLDQNGLSEDHFKADMKYYYPHFKDNIASNVAVHGIASQAWTAFEKVLFSKDGKMVHFKKKGELSSLRGYSRAGKSGGVEIIFRGSYVEWKGLKLPLKLSPDNDYETEMLSKRVKYVRILRKDGKTKTHWYAQLALEGKPAVKRDSISGVPKHPVGHGVVGIDIGTRTLAYSTDSEVNLLELADRVQNIEQEKRRLQRKMDRSRRAMNPGNYKPDGSIKQGVKLTWNNSKRYKRIQHQYAMIQHHQADIRKQQHNELANYLLTLGDCFFVENMSYCDLAHRANKTEISEKTGRYKRKKRFGKSIANKAPAMLITMLKQKCQSRGLEGVKEVDTHVCASQYNHQTDTCIKKALENRWNVMPDGERIQRDLYSAFLLQHCRRDLPEYNRKELQKEFGEELYRVFDREALQRDYPRFVAYHHMTIQRLSELPHTIPSMGIRRIIS

SEQ ID NO: 2030 - protein, 550 aa, Unknown
  Description of Unknown: uncultivated organism sequence
  Category: MG81 effectors
  Description: MG81-308 effector
MGRKSTGRGGTRVNNEEKEKDGATCCLTLPLKLEKWQSDHLEKRFEIARQLYNTLVHAELKKKCQVVRMPEYQEIMKMIDAASNQKEKWALEKKRKAFLGENGFSRNAFKADMEKYYKHFNDNIGANVALHGITAQVWIAFDKVFVDNYKQKGKVHFKKPGELCSVQGYSQKKSGGKEIMFREDRIIWNQQGNRDRKKVKREFLLKLSPDNPYEAEMLKRHVKFVRILRKDGKTKPHWYAQLVLEGKPAVKRDPISSAPKHPVGHGVVGIDIGTRTLAYSTDKEVNLLELADRVQNIEQEKRRLQRKMDRSRRAMNPENYNSDGTFKRGVKLTRNKSKRYRRIQHQLAMIQHHQADIRKQQHNELANYLLTLGDCFFVENMSYCDLVHRANKTEISEKTGRYKRKKRFGKSIANKAPAMLITMLKQKCQSRGLKGVKEVDTHVRASQYNHQTDTCIEKALENRWNVMPDGERIQRDLYSAFLLQHCKQGLPEYNRKELKKEFGEELYRVFDREALQRDYPQFVAYHHMTIQRLSELPHTIPSMGIRRIIS

SEQ ID NO: 2031 - protein, 485 aa, Unknown
  Description of Unknown: uncultivated organism sequence
  Category: MG81 effectors
  Description: MG81-309 effector
MDNEEKEKDGATCCLTLPLKLEKWQSDHLEKRFEIARQLYNTLVHAELKKKCQVVRMPEYQEIMKMIDAASNQKEKWALEKKRKAFLEENGFSRNAFKADMEKYYKHFNDNIGANVALHGITAQVWIAFDKVFVDNYKQKGKVHFKKPGELCSVQGYSQKKSGGKEIMFREDRIIWNQQGNRDRKKVKREFLLKLSPDNPYEAEMLKRHVKFVRILRKDGKTKPHWYAQLVLEGKPAVKRDPASGAPKHPIGHGVVGIDIGTRTLAYSTDKEVNLLELADHVQNIEQEKRRLQRKMDRSRRATNPENYNPDGTFKRGVKLTRNKSKRYRRIQHQLAMIQHHQADIRKQQHNELANYLLTLGDCFFVENMSYCDLVHRANKTEISEKTGRYKRKKRFGKSIANKAPAMLITMLKQKCQSRGLKGVKEVDTHVRASQYNHQTDTCIEKALENRWNVMPDGERIQRDLYSAFLLQHCKQGLRNIIGRN

SEQ ID NO: 2032 - protein, 511 aa, Unknown
  Description of Unknown: uncultivated organism sequence
  Category: MG81 effectors
  Description: MG81-310 effector
MGKSSTDTCCLTLPLKLEKWQEDRLAKRFEIARQIYNTMVRAELKRLRQVEQSPQYRSNKKAIQALDWKNTADKPKLKTLYRERDKLLKGGGFTEYGFKSDIKNFYKHFAENIGSSVAVHGIAPQVWAAFERVLFKKEGKKVHFKKTGGIRSLRGYSVTGKSGGVEIIFRGSYIEWKGLNLPLKLSPDNAYETEMLSYRVKYVRILRKPGKTRDRWYAQLSLEGKPAIKRNPASGNPVHPVGQGAVGLDIGPQTLAYAAEKEANLVELADRVQNIEREKHLLQRKMDRSRRAANPDNYAENGTIRRGVKLTHNKSKRYLRLQRELCYLQHCQAETRKRQHTELANHLLSLGSCFYVEDMAWPSLTHRAKKTEISDKTGRIKRKKRFGKSIANKAPAALINILRTKCVSLGIPGVVEVPTSLKASQYNHQSKEYTPKPLSQRWNDMPDGSQIQRDLYSAFLLQHYDPQSGNFDQASLEADYPQFVQLHNQSIQRLLTVPKAPSSMGIRRSVS

SEQ ID NO: 2033 - protein, 512 aa, Unknown
  Description of Unknown: uncultivated organism sequence
  Category: MG81 effectors
  Description: MG81-311 effector
MKKSSTDTCCLTLPLKLEKWQEDRLAKRFEIARQLYNTLVHAELKRLVQIKRTAEYLENEQKIRALDRNNPADRAKLQELYKEQRKSLKTAGFTDYSFTTDMGKYYKHFRDNIGSSVAVHGIAPQVWAAFDKVLFKKGGKKVHYKKPGEVNSVQGYSRTGKSGGTEIMFRGPYIEWKGLKLPLKLSPDNAYETDMLQRRVKLVRLVRRPGKRRDRWYAQLVLEGKPAIKADPVTGKAVHPIGSGPVGLDIGPQTLAYSAAGAAGLVELADRVQNIEQEKHCLQRKMDRSRRATNPDNYAEDGTIRRGVKLTHNKSKRYRRSQQELKYLQRRQAEIRKLQHIQLANHLLSLGDHFYVEKMEWSSLTHRAKKTVISEKTGKPRSKKRFGKSIANKAPAMLIEILRQKCKSLGLPNVVEINPADIKASQYNHLTGEYVKKSLSRRWNEMQDGEHLQRDLYSAFLLQHYDSMSKALDLDSLARDYPAFVQYHHREIERLHALPKTPASMGIRRSIA

SEQ ID NO: 2034 - protein, 534 aa, Unknown
  Description of Unknown: uncultivated organism sequence
  Category: MG81 effectors
  Description: MG81-312 effector
MGWKSKGRGGTLVKKSSTDTCCLTLPLKLEKWQSDRLEKRFEIGRQIYNTVVRAELKKLQQVERTPQYREIEQKLKEAKQEEAKELWKTRTQLLSKSGFSEYGFKSDMKYYYQHFKENIGSSVAVHGIASQAWTAFEKVLLSKDGKMVHFKKKRELSSLRGYSQAGKSGGIEIIFRGSYVEWKGLKLPLQLSPNNEYETEMLSKRVKYVRILRKDGKTKTHWYAQLALEGKPAVKRDSISGAPKHPVGHGVVGIDIGTRTLAYSTDSEVNLLELADRVQNIEQEKRRLQRKMDRSRRAMNPGNYKPDGSIKQGVKLTWNNSKRYKRIQHQYAMIQHHQADIRKQQHNELANYLLTLGDCFFVEDMDYRALTRKAKKTEISEKTGRYKRKKRFGKSIANKAPSMLIALLDQKCKSLNLEGVKKVDTAVKASQYNHQTDECKAKELKERWNIMPDGERIQRDLYSAFLLQHCRRDLPEYNRKKLQEAFGNELYRVFDREALQRDYPKFVEYHRKTIQRLSALPKTIASMGIRRIIS

SEQ ID NO: 2035 - protein, 512 aa, Unknown
  Description of Unknown: uncultivated organism sequence
  Category: MG81 effectors
  Description: MG81-313 effector
MPAKQKEDSNRCVLTLPLLTEPWQEHIIEKRFKIIEHLKNQLISIELRKLKNLQRTKAYKNLMKRIESVPKSERTALYKERNKMLKDAGFSQYTFMDDMAGKKSLMQKHFESHINVQIAHKAAIDVWSSFEKFLFGSGQMIHYQKRGTLSSVASKSPKTGMFYYSDENIFKWSGGGTKPKGGIILCLRVAPVKTNYEKEMVANNEIKYYRVVRKWMKTKYKYYLQITFAGKPADKHHEVSTDRVGIDIGTQTIAIASDKSVKLLELADKVNKNHIKKCELQRKLDRSRRYTNPDNFNPDGTVKRGTKGHKLKWNKSKHYIEIAGKIRELERKNADIRKYQHTCLANDILAMGNQIYIEPMNYKGLQKRAKETQVDEKGRYKKKKRFGKSLANKAPAMFVTILKTKAEQHGGEVYEVDIMSYRASQCDHTTGEYTKHGLNDRWRILGNGDKVQRDLYSAFLIKNSNKTHDEIDLDKCSKTYDNFKKLHDKEIENIRNEVILRKRRNISSYGIA

SEQ ID NO: 2036 - protein, 385 aa, Unknown
  Description of Unknown: uncultivated organism sequence
  Category: MG81 effectors
  Description: MG81-314 effector
MKTLKLRILDKHVPKLGQVASACNYVWNYVNALGFTHLQRTGKFFGAYDIALYTKGAGELLGLHSQTIQAITETYVKSRKQFCKAKLKWRTNRHDSKHKALGWIPFKKSAVKVLPSRQTGRKKRKTGIVLSLAKGCKLHIEVWDSYNLDLYQANTCELVQDSRGRWYACITVKDFPKTKCGTNKVGIDLGLKTAATTSNGDQLITKVTQAYAKALGTAQRAGNKARVKAINAKIRHTRQDLIHKFTTNLVKDSAVIVVGDVKSTAIIQPRKRDKPTNQQTTPRPHRKRMKLAKSVYDAGWFELKRQLEYKCKHAGCQLEIVSERMTTQTCSCCGNTTGSPKGRTGLGIREWTCGTCHTTHDRDINAARNILAVGLHRLDVGIPSL

SEQ ID NO: 2037 - protein, 532 aa, Unknown
  Description of Unknown: uncultivated organism sequence
  Category: MG81 effectors
  Description: MG81-315 effector
MILLANNNNNNNNNTDTCVLTLPLRVEKWQEDCLLKRFEAARRIYNSLLNFELKKLRQLERTVEYRQIQSVISSAYRSNTKDSLECKDAFKRREKLISANGISENGFKSDVKFFYKHFDGLIGSSVAVHCIAVQLWAAFDKYLSGSGKEIHFKRLGDISSLKGYSVKGKSGGCEIIFRGQYVEWTRKKKKLLLPLKIDPDNEYEREMLSRRVKYVRIIKKPGKNRLRWYAQLTLEGKPALKYSAGTGKPIHSVGKGNVGIDIGPQTVAYASDKEVALLELADRVTNIEHQKKKLQRKLDRSRRATNPDNYKPDGTIKRGVKLTRNKSKRYLKLQSKLAYIQHRQAEIRKLQHTCLANHMLTLGDRFFVEKMNWPGLAHRAKETSISEKTGRYKRKKRFGKSLANKAPAMFISILKRKCETLGLPGVVEVDTYSLKASQYNHLSDTYEKKSLSERWNYMPISDGSDSSKTKRIQRDLYSAFLLQHTIPQPCSFDKEALRIDYPNFVTMHDAEIHRLESLPKTVTSMGVRRSHS

SEQ ID NO: 2038 - protein, 511 aa, Unknown
  Description of Unknown: uncultivated organism sequence
  Category: MG81 effectors
  Description: MG81-316 effector
MKKSNTDTCCLTLPLKLEKWQEDRLAKRFEIARQIYNTMVHAELKKLRNIENSQPYRQIQKQIEALNWKNQNDKARLKSLYNDRNKLLNTIGFSEYGFKADIKYYYKHFNDNIGSSVAVHGIAPQVWAAFEKMLFHKEGKKVHYKKKDDIHSLHGYSVTGKSGGVEIIFRKTYIEWKGLKLPLKRSPDNAYETEMLGRRVKYVRLLRKPGKRKDCWYAQLSLEGKPAIKRDPESGERRHSIGWGAVGLDIGPQTLAYSACGAADLVELADQVQNIEQMKRRLQRKLDRSRRATNPDNYADNGTIRRGVKLTHNKSNRYRRTQRELRYLQHCQAEIRKRQHIELANHLLALGDCFYVEDMAWPSLTHRAKETAISEKTGRIKRKKRFGKSVANKAPATLIGILEQKCNSLGLPGVMKVPTSLRASQYNHQSGEYTSKPLSQRWNNMPDGERIQRDLYSAFLLQHYDPKAGNFDSALLQQDYPQFVQYHHRAIQRLSTVPKTLSSMGIQRSLR

SEQ ID NO: 2039 - protein, 398 aa, Unknown
  Description of Unknown: uncultivated organism sequence
  Category: MG81 effectors
  Description: MG81-317 effector
MKTLKLKVRKEAYNWLNAAAKETNTVWNWTKETRLKALNFNYDCNHEFHYNEETGRYQRKILSRGTWLSNEDKWAPKTSIWLSHYDLTKLTKGATKDDLFKHLPMQSINLVVKEYVRKSIQFKKSELRWRKSMGSKRNLGWIPFQAQGLSRCKNKKYIKFAGKTFRVFEHNRLNEGKWCDGCFSEDSVGDWWLCIPIKTTQSENKIAPGEAVGIDLGIRKVATTSKPSNSLATIRSYRDTEDKIKEAQRRGHKRQAKRLHRKAANQRKDILHKYSTKLVDGYQEIYIGDLNSKFLSGSKLAKSASDNAIGMLKDMVQYKGERAGRTVKIVNERYTTQDCSVCGSRSGPKGQLDIREWTCTECGTTHDRDVNAAKNILKLGKLTFVRDNSATTTPCCKK

SEQ ID NO: 2040 - protein, 538 aa, Unknown
  Description of Unknown: uncultivated organism sequence
  Category: MG81 effectors
  Description: MG81-318 effector
MDNEEKKEDGATCCLTLPLKLEKWQSDHLEKRFEIARQLYNTLVHAELKKKCQVERMPEYQEIMKMIDTASNQKEKWALEKKRKAFLEENGFSRNAFKADMEKYYKHFNDNIGANVALHGITAQVWIAFDKVFVDNYKQKGKVHFKKPGELCSVQGYSQKKSGGKEIMFREDRIIWNQQGNRDRKKVKREFLLKLSPDNPYEAEMLKRHVKFVRILRKDGKTKPHWYAQLVLEGKPAVKRDPASGAPKHPIGHGVVGIDIGTRTLAYSTDKEVNLLELADRVQNIEQEKRRLQRKMDRSRRAMNPENYNSDGTFKRGVKLTRNKSKRYRRIQHQLAMIQHHQADIRKQQHNELANYLLTLGDCFFVENMSYCDLVHRANKTEISEKTGRYKRKKRFGKSIANKAPAMLITMLKQKCQSRGLEGVKEVDTHVRASQYNHQTDTCIEKALENRWNVMPDGERIQRDLYSAFLLQHCKQGLPEYNRKELKKEFGEELYRVFDREALQRDYPQFVAYHHMTIQRLSELPHTIASMGIRRSIS

SEQ ID NO: 2041 - protein, 354 aa, Unknown
  Description of Unknown: uncultivated organism sequence
  Category: MG81 effectors
  Description: MG81-319 effector
MKTLKIRIKDSNQTKLLCQLASEVNLVWNYCNELGFKYLQRTGKFLSAYDIDKYTAGASKECGLHSQTIQAISNEYVTRRKQFKKSKLSWRVSNPKSAKCSLGWIPFKKSAIKYGKGFIQYGKNIFKLWDSYNLSQFDIYTGSFVQDSRGRWYVCVTVDTPKQLPNQATKAIGIDLGLKDLATCSDGTKISNPKYYSHYQAKLGKSQRANKKRLVQTLHAKIKNSRKDYLQKQSTQLVKDNGLIIVGSLSANKLTKTKMAKSVNDTGFSAFKTMLKYKCENAGVWFVEVSENYTTQICSCCGEISANSPKGRINLGIREWTCSLCNATHDRDVNASKNILRLGHQTLAGGIPSL

SEQ ID NO: 2042 - protein, 511 aa, Unknown
  Description of Unknown: uncultivated organism sequence
  Category: MG81 effectors
  Description: MG81-320 effector
MKKSNTDTCCLTLPLKLEKWQEDRLAKRFEIARKIYNTMVHAELKKLRNIENSQPYRQIQKQIEALNWKNQNDKARLKTLYNDRNKLLNTIGFSEYGFKADIKYYYKHFNDNIGSSVAVHGIAPQVWAAFEKMLFHKEGKKVHYKKKDDIHSLHGYSVTGKSGGVEIIFRKTYIEWKGLKLPLKRSPDNAYETEMLGRRVKYVRLLRKPGKRKDCWYAQLSLEGKPAIKRDPESGKRRHSIGRGAVGLDIGPQTLAYSACGAADLVELADQVQNIEQMKRRLQRKLDRSRRATNPDNYADNGTIRRGVKLTHNKSNRYRRTQRELRYLQHCQAEIRKRQHIELANHLLALGDCFYVEDMAWPSLTHRAKETAISEKTGKIKRKKRFGKSVANKAPATLIGILEQKCNSLGLPGVIKVPTSLRASQYNHQSGEYTSKPLSQRWNNMPDGERIQRDLYSAFLLQHYDPQAGNFDSALLQQDYPQFVQYHHRAIQRLSTVPKTLSSMGIQRSLR

SEQ ID NO: 2043 - protein, 341 aa, Unknown
  Description of Unknown: uncultivated organism sequence
  Category: MG81 effectors
  Description: MG81-321 effector
MLPLKIDPDNEYEREMLSRRVKYVRIIKKPGKNRLRWYAQLTLEGKPALKYSAGTGKPIHSVGKGNVGIDIGPQTVAYASDKEVALLELADRVTNIEHQKKKLQRKLDRSRRATNPDNYKPDGTIKRGVKLTRNKSKRYLKLQSKLAYIQHRQAEIRKLQHTCLANHMLTLGDRFFVEKMNWPGLAHRAKETSISEKTGRYKRKKRFGKSLANKAPAMFISILKRKCETLGLPGVVEVDTFRLKASQYNHLSDTYEKKSLSERWNYMPISDGSDSSKTKRIQRDLYSAFLLQHTIPQPCSFDKEALRIDYPNFVTMHDAEIHRLESLPKTITSMGVRRSHS

SEQ ID NO: 2044 - protein, 511 aa, Unknown
  Description of Unknown: uncultivated organism sequence
  Category: MG81 effectors
  Description: MG81-322 effector
MGKSSTDTCCLTLPLKLEKWQEDRLAKRFEIARQIYNTMVRAELKKLDRVKQLPEYRKNQKEIQALDWKNSADKQRLKELYGNQRKILQKQGFTEYGFKADSKDYYKHFIENIGSSVATHGIAPQVWNAFDKMLFQKDGKVVHFKRYGDVHSLKGGSVAHKSGGAEIMFRKTYIEWKGLKLPLKLSPDNAYEAEMLSYHVKYVRILRTRGKTKDRWYAQLSLEGKPAVKYDSNTGKPVHPVGKGAVGLDIGPQTLAYVAANEANLVELADQVQNIEQEKRRLQRKLDRSRRATNPDNYNENGTIRRGVKLTHNKSKRYCKLQKELSWIQHCQAETRKRQHIALANHLLSLGDCFYVEPMAWPSLTHRAKKTEVSEKTGRIKRKKRFGKSVANKAPASLIGILKLKCISLGLTGVVEVPKLLKASQYNHQSKDYAPKSLSQRWNDMPDGNRIQRDLYSAFLLQHYNSQLENFNQETLERDYPQFVRLHNQTIQRLSALPKTPSSMGIRRSVS

SEQ ID NO: 2045 - protein, 533 aa, Unknown
  Description of Unknown: uncultivated organism sequence
  Category: MG81 effectors
  Description: MG81-323 effector
MILLANNNNNNNNNNTDTCVLTLPLRVEKWQEDCLLKRFEAARRIYNSLLNFELKKLRQLERTVEYRQIQSVISSAYRSNTKDSLECKDAFKRRKKLTDENGISEYGFKSDVKFFYKHFDGLIGSNVAVHCIAVQLWVAFDKYLSGSGKEIHFKRLGDISSLKGYSVKGKSGGCEIIFRGQYVEWTRKKKKLLLPLKIDPDNEYEREMLSRRVKYVRIIKKPGKNRLRWYAQLTLEGKPALKYSAGTGKPIHSVGKGNVGIDIGPQTVAYASDKEVALLELADRVTNIEHQKKKLQRKLDRSRRATNPDNYKPDGTIKRGVKLTRNKSKRYLKLQSKLAYIQHRQAEIRKLQHTCLANHMLTLGDRFFVEKMNWPGLAHRAKETSISEKTGRYKRKKRFGKSLANKAPAMFISILKRKCETLGLPGVVEVDTYSLKASQYNHLSDTYEKKSLSERWNYMPISDGSDSSKTKRIQRDLYSAFLLQHTIPQPCSFDKEALRIDYPNFVTMHDAEIHRLESLPKTVTSMGVRRSHS

SEQ ID NO: 2046 - protein, 536 aa, Unknown
  Description of Unknown: uncultivated organism sequence
  Category: MG81 effectors
  Description: MG81-324 effector
MILLANNNNNNNNNNNNNTDTCVLTLPLRVEKWQEDCLLKRFEAARRIYNSLLNFELKKLRQLERTVEYRQIQSVISSAYRSNTKDSPECKDAFKRRKKLTDENGISEYGFKSDVKFFYKHFDGLIGSSVAVHCIAVQLWAAFDKYLRGSGKEIHFKRLGDISSLKGYSVKGKSGGCEIIFRGQYVEWTRKKKKLLLPLKIDPDNEYEREMLSRRVKYVRIIKKPGKNRLRWYAQLTLEGKPALKYSAETGKPIHSVGKGNVGIDIGPQTVAYASDKEVALLELADRVTNIEHQKKKLQRKLDRSRRATNPDNYKPDGTIKRGVKLTRNKSKRYLKLQSKLAYIQHRQAEIRKLQHTCLANHMLTLGDRFFVEKMNWPGLAHRAKETSISEKTGRYKRKKRFGKSLANKAPAMFISILKRKCETLGLLGVVEVDTFRLRASQYNHLSDTYEKKSLSERWNYMPISDGSDSSKTKRIQRDLYSAFLLQHTIPQPCSFDKEALRIDYPNFVTMHDAEIHRLESLPKTVTSMGVRRSHS

SEQ ID NO: 2047 - protein, 528 aa, Unknown
  Description of Unknown: uncultivated organism sequence
  Category: MG81 effectors
  Description: MG81-325 effector
MILLAKNNNNTDTCVLTLPLRVEKWQEDCLLKRFEAARRIYNSLLNFELKKLRQLERTVEYRQIQSVISSAYRSNTKDSPECKDAFKRREKLISANGISKSGFKSDVKFFYKHFDGLIGSNVAVHCIAVQLWAAFDKYLSGSGKEIHFKRLGDISSLKGYSVKGKSGGREIIFRGQYIEWTRKKKKLLLPLKIDPDNEYEREMLSRRVKYVRIIKKPGKNRLRWYAQLTLEGKPALKYSAETGKPIHSVGKGDVGIDIGPQTVAYASDKEVALLELADRVTNIEHQKKKLQRKLDRSRRATNPDNYKPDGTIKRGVKLTRNKSKRYLKLQSKLAYIQHRQAEIRKLQHTCLANHMLTLGDRFFVEKMNWPGLAHRAKETSISEKTGRYKRKKRFGKSLANKAPAMFISILKRKCETLGLPGVVEVDTFRLRASQYNHLSDTYEKKSLSERWNYMPISDGSDSSKTKRIQRDLYSAFLLQHTIPQPCSFDKEALRIDYPNFVTMHDAEIHRLESLPKTVTSMGVRRSHS

SEQ ID NO: 2048 - protein, 534 aa, Unknown
  Description of Unknown: uncultivated organism sequence
  Category: MG81 effectors
  Description: MG81-326 effector
MILLANNNNNNNNNNNTDTCVLTLPLRVEKWQEDCLLKRFEAARRIYNSLLNFELKKLRQLERTVEYRQIQSVISSAYRSNTKDSLECKDAFKRREKLISANGISENGFKSDVKFFYKHFDGLIGSSVAVHCIAVQLWAAFDKYLSGSGKEIHFKRLGDISSLKGYSVKGKSGGLEIIFRGQYVEWTRKKKKLLLPLKIDPDNEYEREMLSRRVKYVRIIKKPGKNRLRWYAQLTLEGKPALKYSAETGKPIHSVGKGDVGIDIGPQTVAYASDKEVALLELADRVTNIEHQKKKLQRKLDRSRRATNPDNYKPDGTIKRGVKLTRNKSKRYLKLQSKLAYIQHRQAEIRKLQHTCLANHMLTLGDRFFVEKMNWPGLAHRAKETSISEKTGRYKRKKRFGKSLANKAPAMFISILKRKCETLGLPGVVEVDTYNLKASQYNHLSDTYEKKSLSERWNYMPISDGSDSSKTKRIQRDLYSAFLLQHTIPQPCSFDKEALRIDYPNFVTMHDAEIHRLESLPKTVTSMGVRRSHS

SEQ ID NO: 2049 - protein, 523 aa, Unknown
  Description of Unknown: uncultivated organism sequence
  Category: MG81 effectors
  Description: MG81-327 effector
MPTKQKEGGNRCVLTLPLLTEPWQEHIIEKRFKIIEHLKNQLISIELRKLKNLQRTKAYKNLIKQIESVPKSERTVLYKERNKMLKDAGFSQYTFMDDMAGKKSLMQKHFESHINVQIAHKAAIDVWSSFEKFLFGSGQMIHYQKRGTLKSIASKSPKNGMHYFPESNTFKWSGGKQKKIGQKGEQKKVSIKPISLCLRVSPLKTDYEKEMVANNEIKYYRVVRKWMKTKYKYYLQITFAGKPADKHREISTGRVGIDIGTQTIAIASDKSVKLLELADKVNKNHIKKCELQRKLDRSRRYTNPDNFNPDGTVRRGTKGHKLKWNKSKHYLEIAGKIRELERKNSDIRKYQHTCLANDILAMGNQIYIEPMNYKGLQKKAKETQVDEKGRYKKKKRFGKSLANKAPSMFVTILKTKAEQHGGEVYEVDIMSYRASQCDHTTGEYTKHGLNDRWRILGNGDKVQRDLYSAFLIKNSNKTHDEIDLDKCSKTYDNFKKLHDTEIENIRNEVKLRERKNISSYGIT

SEQ ID NO: 2050 - protein, 512 aa, Unknown
  Description of Unknown: uncultivated organism sequence
  Category: MG81 effectors
  Description: MG81-328 effector
MPTKQKEDSNRCVLTLPLLTEPWQEHIIEKRFKIIEHLKNQLISIELRKLKNLQRTKAYKNLIKQIESVPKSERTALYKERNKMLKDAGFSQYTFMDDMAGKKSLMQKHFESHINVQIAHKAAIDVWSSFEKFLFGTGQIVHYQKRGTLSSVASKSPKTGMFYYSDENIFKWSGGGTKPKGGIILCLRVAPVKTNYEKEMVANNEIKYYRVVRKWMKTKYKYYLQITFAGKPADKHHEVSTGRVGIDIGTQTIAIASDKSVKLLELADKVNKNHIKKCELQRKLDRSRRYTNPDNFNPDGTVKRGTKAHKLKWNKSKHYIEIAGKIRELERKNADIRKYQHTCLANDILAMGNQIYIEPMNYKGLQKRAKETQVDEKGRYKKKKRFGKSLANKAPAMFVTILKTKAEQHGGEVYEVDIMSYRASQCDHTTGEYTKHGLNDRWRILGNGDKVQRDLYSAFLIKNSNKTHDEIDLDKCSKTYDSFKKLHDKEIENIRNEVKLRERKNISSYGIA

SEQ ID NO: 2051 - protein, 534 aa, Unknown
  Description of Unknown: uncultivated organism sequence
  Category: MG81 effectors
  Description: MG81-329 effector
MGWKSKGRGGKRVKRSSTDTCCLTLPLKLEKWQSDRLEKRFEIGRQIYNTIVHAELKKLRKLERTQQYQEIEQKLENAKQEETKELWKKKRQLLDQNGLSENHFKADMKYYYPHFKDNIASSVAVHGIASQAWTAFEKVLLSKDGKMVHFKKKGELSSLRGYSQAGKSGGIEIIFRGSYVEWKGLKLPLQLSPNNEYETEMLSKRVKYVRILRKDGKTKTHWYAQLALEGKPAVKRDSISGAPKHPVGHGVVGIDIGTRTLAYSADSKVDLIELADRVQNIEQEKMLLQRKLDRSRRATNPENYKPDGSIKQGVKLTWNNSKRYKRIQHQYAMIQHHQADIRKQQHNELANYLLTLGDCFFVEDMDYRALTRKAKKTEISEKTGRYKRKKRFGKSIANKAPSMLIALLDQKCKSLNLEGVKKVDTAVKASQYNHQTDECKAKELKERWNIMPDGERIQRDLYSAFLLQHCRRDLPEYNRKKLQETFGNELYRVFDREALQRDYPKFVEYHRETIQRLSALPKTIASMGIRRSIS

SEQ ID NO: 2052 - protein, 511 aa, Unknown
  Description of Unknown: uncultivated organism sequence
  Category: MG81 effectors
  Description: MG81-330 effector
MKKSNTDTCCLTLPLKLEKWQEDRLAKRFEIARQIYNTMVHAELKKLRNIENSQPYRQIQKQIEALNWKNKNDKARLKSLYNDRNKLLNTIGFSEYGFKADIKYYYKHFNDNIGSSVAVHGIAPQVWAAFEKMLFHKEGKKVHYKKKDDIHSLHGYSVTGKSGGVEIIFRKTYIEWKGLKLPLKRSPDNAYETEMLGRRVKYVRLLRKPGKRKDCWYAQLSLKGKPAIKRDPESGKRRHSIGRGAVGLDIGPQTLAYSACGAADLVELADQVQNIEQMKRRLQRKLDRSRRATNPDNYADNGTIRRGVKLTHNKSNRYRRTQRELRYLQHCQAEIRKRQHIELANHLLALGDCFYVEDMAWPSLTHRAKETAISEKTGRIKRKKRFGKSVANKAPATLIGILEQKCNSLGLPGVIKVPTSLRASQYNHQSGEYTSKPLSQRWNNMPDGERIQRDLYSAFLLQHYDPKAGNFDSALLQQDYPQFVQYHHRAIQRLSTVPKTLSSMGIQRSLR

SEQ ID NO: 2053 - protein, 534 aa, Unknown
  Description of Unknown: uncultivated organism sequence
  Category: MG81 effectors
  Description: MG81-331 effector
MGRKSTGRGGTLVKKSSTDTCCLTLPLKLEKWQSDRLEKRFEIGRQIYNTVVRAELKKLQQVERTPQYREIEQKLKGAKQEEAKELWKKRTQLLSKSGFSEYGFKSDMKYYYQHFKENIGSSVAVHGIASQVWTAFEKVLLSKDGKMVHFKKKGELSSLRGYSQAGKSGGIEIIFRGSYVEWKGLKLPLQLSPNNEYETEMLSKRVKYVRILRKDGKTKTHWYAQLALEGKPAVKRDSISGAPKHPVGHGVVGIDIGTRTLAYSTDSEVNLLELADRVQNIEQEKRRLQRKMDRSRRAMNPGNYKPDGSIKQGVKLTWNNSKRYKRIQHQYAMIQHHQADIRKQQHNELANYLLTLGDCFFVENMSYCDLAHRANKTEISEKTGRYKRKKRFGKSIANKAPAMLITMLKQKCQSRGLEGVKEVDTHVCASQYNHQTDTCIKKALENRWNIMPDGERIQRDLYSAFLLQHCRRDLPEYNRKELQKEFGEELYRVFDREALQRDYPQFVAYHHMTIQRLSELPHTIPSMGIRRIIS

SEQ ID NO: 2054 - protein, 511 aa, Unknown
  Description of Unknown: uncultivated organism sequence
  Category: MG81 effectors
  Description: MG81-332 effector
MAKCSTDTCCLTLPLRLEKWQEDRLAKRFEIARQIYNTMVRAELKKLRAIEQSEPYKANQEKIQALDWKTQADKQALKALYKERDKRLRDGGFSEYGFKSDIKNYYKHFNNNIGSSVAVHGIAPQVWAAFEKMLFKKEGKKVHFKKKGDIRSLRGYSVTGKSGGVEIIFRETYIEWKGLKLPLKLSPDNIYETQMLSYRVKYVRLLRKPGKRKDRWYAQLSLEGKPVIKYNPKTGEVRHPIGKGAVGLDIGPQTLAYSAATGADLVELANQVQNVEQEKRRLQRKLDRSRRATNPGNYADDGTIRRGIALTHNKSKRYLRTQQELKYLQHQQAEIRKRQHTELANHLLSLGDCFYVEKMVWTSLTHRAKETEISEKTGKIKRKKRFGKSVANKAPATLIGILQRKSAALGIPGVIEVPTSVKASQYNHQSGTYTPKPLSQRWNNMPDGERIQRDLYSAFLLQHYDPQTNTFDTNSLHQDYPQFVQYHHDAVLRLYAMPKTPSSMGIKRSLR

SEQ ID NO: 2055 - protein, 511 aa, Unknown
  Description of Unknown: uncultivated organism sequence
  Category: MG81 effectors
  Description: MG81-333 effector
MGKSSTDTCCLTLPLKLEKWQEDRLAKRFEIARQIYNTMVRAELKKLDRVKQLPEYRKNQKEIQALDGKNSADRARLKELRANQNRILQKQGFTEYGFKADSKDYYKHFIENIGSSVATHGIAPQVWNAFDKMLFQKDGKVVHFKRYGDVHSLKGGSVAHKSGGAEIMFRKTYIEWKGLKLPLKLSPNNAYEAEMLSYRVKYVRILRTRGKTKDRWYAQLSLEGKPAVKYDSNTGKPVHPVGRGAVGLDIGPQTLAYAAANEANLVELADQVQNIEQEKRRLQRKLDRSRRATNPDNYNENGTIRRGVKLTHNKSKRYCKLQKELSWIQHCQAETRKRQHIALANHLLSLGDCFYVEPMAWPSLTHRAKKTEVSEETGRIKRKKRFGKSVANKAPASLIGILRLKCISLGLTGVVEVPMLLRASQYNHQSKDYAKKSLSQRWNDMPDGNRIQRDLYSAFLLQHYNSQLENFDQETLERDYPQFVRLHNQTIQRLSALPKTPSSMGIRRSVS

SEQ ID NO: 2056 - protein, 512 aa, Unknown
  Description of Unknown: uncultivated organism sequence
  Category: MG81 effectors
  Description: MG81-334 effector
MPTKQKEDSNRCVLTLPLLTEPWQEHIIEKRFKIIEHLKNQLISIELRKLKNLQRTKAYKNLMKRIESVPKSERTALYKERNKMLKDAGFSQYTFMDDMAGKKSLMQKHFESHINVQIAHKAAIDVWSSFEKFLFGTGQIVHYQKRGTLSSVASKSPKTGMFYYSDENIFKWSGGGTKPKGGIILCLRVASVKTNYEKEMVANNEIKYYRVVRKWMKTKYKYYLQITFAGKPADKHREISTGRVGIDIGTQTIAIASDKSVKLLELADKVNKNHIKKCELQRKLDRSRRYTNPDNFNPDGTVKRGTKGHKLKWNKSKHYLEIAGKIRELERKNTDIRKYQHTCLANDILAMGNQIYIEPMNYKGLQKRAKETQVDEKGRYKKKKRFGKSLANKAPAMFVTILKTKAEQHGGEVYEVDIMSYRASQCDHTTGEYTKHGLNDRWRILGNGDKVQRDLYSAFLIKNSNKTHDEIDLDKCSKTYDSFKKLHDKEIENIRNEVILRKRRNISSYGIA

SEQ ID NO: 2057 - protein, 512 aa, Unknown
  Description of Unknown: uncultivated organism sequence
  Category: MG81 effectors
  Description: MG81-335 effector
MKKSSTDTCCLTLPLKLEKWQEGRLAKRFEIARQLYNTLVHAELKRLAQVKQTAEYRENERKIRTLDWNDPGDQAKLKGLYKERRKSLKTAGFTDYSFTTDMGKYYKHFRDNIGSSVAVHGIAPQVWAAFDKLLFKKGGKKVHYKKPGEVNSVQGYSRTGKSGGTEIMFRGPYIEWKGLKLPLKLSPDNAYETDMLQRRVKLVRLVRRPGKRRDRWYAQLVLEGKPAIKADPVTGKAVHPIGSGPVGLDIGPQTLAYSAAGAAGLVELADRVQNIEQEKRCLQRKMGRSRRATNPDNYAEDGTIRRGVKLTHNKSKRYRRSQQELKYLQRRQAEIRKLQHIQLANHLLSLGDHFYVEKMEWSSLTHRAKKTVISEKTGKPRSKKRFGKSIANKAPAMLIEILRQKCKSLGLPNVVEINPVDIKASQYNHLTGEYVKKSLSRRWNEMQDGEHLQRDLYSAFLLQHYDSMSKALDLDSLARDYPAFVQYHHQEIERLHALPKTPSSMGIRRSIA

SEQ ID NO: 2058 - protein, 536 aa, Unknown
  Description of Unknown: uncultivated organism sequence
  Category: MG81 effectors
  Description: MG81-336 effector
MDNVEKEKDGATCCLTLPLKLEKWQSDHLEKRFEIARQLYNTLVHAELKRIHRIERMPEYREIERQIEATTDKKEKWALKNQKKQFLRKNGINRNTFTTDMKRLYKHFNDNIGSNVAQHGIVSQVLTAFEKVYIENQSGEVHFKKPGDLRSVQGYSQKKSGGVEIMFREGKIIWNQQGNNDRKGVAREFPLKLSPDNSYEAEMLKKHVKFVRILRNEGKTKPHWYAQLVLEGKPAIKRDPASGAPKHSVGHGAVGIDIGTRTLAYSADSKVDLIELADRVQNIEQEKLLLQRKLDRSRRATNPENYKPDGTIKKGVKLTRNKSKRYRKIQHQLAMLQHRQADIRKRQHNELANYLLTLGDCFFVEDMDYRALTRKAKKTEISEKTGRYKRKKRFGKSIANKAPSMLIALLDQKCKSLNLEGVKKVDTAVKASQYNHQTDECKAKELKERWNIMPDGERIQRDLYSAFLLQHCRRDLPEYNRKKLQEAFGNELYRVFDREALQRDYPKFVEYHRKTIQRLSALPKTIASMGIRRIIS

SEQ ID NO: 2059 - protein, 512 aa, Unknown
  Description of Unknown: uncultivated organism sequence
  Category: MG81 effectors
  Description: MG81-337 effector
MKKSSTDTCCLTLPLKLEKWQEDRLAKRFEIARQLYNTLVHAELKRLVQIKRTAEYLENEQKIRALDRNNPADRAKLQELYKEQRKSLKTAGFTDYSFTTDMGKYYKHFRDNIGSSVAVHGIAPQVWAAFDKLLFKKGGKKVHYKKPGEVNSVQGYSRTGKSGGTEIMFRGPYIEWKGLKLPLKLSPDNAYETDMLQRRVKLVRLVRRPGKRRDRWYAQLVLEGKPAIKADPVTGKAVHPIGSGPVGLDIGPQTLAYSASGAAGLVELADRVQNIEQEKRRLQRKMDRSRRATNPDNYAEDGTIRRGVKLTHYKSKRYRRSQQELKYLQHRQAEIRKLQHIQFANHLLSLGDHFYVEKMEWSSLTHRAKETVISEKTGKPRSKRRFGKFIANKAPAMLIEILRQKCKSLGLPNVVEINPADIKASQYNHLTGEYVKKSLSRRWNEMQDGEHLQRDLYSAFLLQHYDSMSKALDLDSLARDYPAFVQYHHREIERLHALPKTPASMGIRRSIA

SEQ ID NO: 2060 - protein, 536 aa, Unknown
  Description of Unknown: uncultivated organism sequence
  Category: MG81 effectors
  Description: MG81-338 effector
MVNDDYNKVLKQFHKLSNRHILVAETDMSCSDIQKVVKLSDRIRKAGNELIGLMKKNYDQLMRTKRYRGLLKLYGSTKNKQKRKMFADQLNEMQKQYNVTWDYCRKSMIHIGKKYSIDAVFALTKAEDVWHGVEKCLYGNGKTLHFSKHGDLPCIRAKQINRGIPISAKNNQLQFKLGKSVFGIQIKDRFQTDEVNAVLDYLAAPEIADCKAVQTLLEEACCISTYRPCYATLVPKLIRGKYRVYLHLAIEGRAKPKYDRFGNPRHKYGKGIIGADIGTQTVAYTSDTETGLKNLSDRGNSIQTSERLERLYYRAMDRSRRATNPQNYNDDGTVKQGKKTWNYSNHYKKLKAKHAELCRINAANRRLAINEDANHLRSIGDVFITEPKNAAKLMKRASKTTVNNKGKINKKKRFGKSIKNRCPGGFQTAVENKFKASGGTYIEVSNNYRASQYDHTADDYIKKKLSDRMYKLADGTLVQRDWYSSFLLYCYDFRTSDIDKDKCAAKFDKCYSMERELIEWIKTNKIKVLNSGIKIA

SEQ ID NO: 2061 - protein, 511 aa, Unknown
  Description of Unknown: uncultivated organism sequence
  Category: MG81 effectors
  Description: MG81-339 effector
MAQRHSTPTCCLTLPLQLEKWQEDRLIKRFEIAGKIYNALLNAELKKLHRLEQLPEYKEIQSQLKAYYQNNLPKTAAFKELNNRRSKLLSEHGFSEYAFKGDMKKFYKHFSSNIGSSVATHCIASQVWSAFEKRLFGGGKFVHFKKSGDIRSLKGFSSSRKSGGVEIMFRGDHIEWKGLLLRLKLDPDNQYESEMLSRRIKYVRIIRKPGKAKWRWYAQLSVEGLPAIKRNDETGEPVHPIGRGAVGIDIGPQTIAYVSQTEVALKELADRVQNIEHEKRLIQRKLDRSRRATNPANYADNGTIKRGVKLTRNKSKRYLKLQMELSFLQHKQAEIRKQQHINLANHLLSLGDCFYVEDMAWSSLARKAKETAVSEKTGKYKRKKRFGKSIANKAPASLISILDQKCTSLGLLGVIKVPTSVRASQYNHITKSYEKKTLSQRWNIMPDGRRIQRDIYSAFLLQHVTPQRDGFSDEALQQDYENFVSLHDSVFQQLRLMPKTIASMGIRRTYS

SEQ ID NO: 2062 - protein, 352 aa, Unknown
  Description of Unknown: uncultivated organism sequence
  Category: MG81 effectors
  Description: MG81-340 effector
MYTTLNYRIKDSNVSDTLNKWASDANRIWNMCNEINMISWQKFQRPMSGFDLGYSAKGMSKMMAIPQRSIGCICTEYATRTKQFKKRKLNWRSYKKNTGWIPFATQQMKCFSDGIFFNGQKFKLWDYKPFDEKTIKSGSFQQDARGRWYVSITVEIEASSEIPKTGKAVGIDLGLKSLVTLSDGTVYDRVNLTEMYAKKLATAQLAGNLMQVRNIHAKIKNTRKNFYHEISLAIVKNYDEIYIGNISSSKLIKTKMAKSVSDAAWYDFKFMLKYKAERAGKKFVEVNESFSTVTCSSCLERTGPSGLSALGVRSWICSHCGAAHDRDVNAAKNILRSGQCADLRVKGSSLKN

SEQ ID NO: 2063 - protein, 512 aa, Unknown
  Description of Unknown: uncultivated organism sequence
  Category: MG81 effectors
  Description: MG81-341 effector
MKKSNTDTCCLTLPLKLEKWQEDRLAKRFEIARQLYNTLVHAELKRLAQVKQTAEYRENERKIRALDWNDPGDQAKLKGLYKERRKSLKTAGFTDYSFTTDMGKYYKHFRDNIGSSVAVHGIAPQVWAAFDKLLFKKGGKKVHYKKPGEVNSVQGYSRTGKSGGTEIMFRGPYIEWKGLKLPLKLSPDNAYETDMLQRRVKLVRLVRRPGKRRDRWYAQLVLEAKPAIKADPVTGKAVHPIGSGPVGLDIGPQTLAYSAAGAAGLVELADRVQNIEQEKRRLQRKMDRSRRATNPDNYAEDGTIRRGVKLTHNKSKRYRRSQQELKYLQHRQAEIRKLQHIQFANHLLSLGDHFYVEKMEWSSLTHRAKKTVISEKTGKPRSKKRFGKSIANKAPAMLIEILRQKCKSLGLPNVVEINPADIKASQYNHLTGEYVKKSLSRRWNEMQDGEHLQRDLYSAFLLQHYDSMSKALDLDSLARDYPAFVQYHHREIERLHALPKTPSSMGIRRSIA

SEQ ID NO: 2064 - protein, 550 aa, Unknown
  Description of Unknown: uncultivated organism sequence
  Category: MG81 effectors
  Description: MG81-342 effector
MGWKSKGRGGTLVDNEEKKEDGATCCLTLPLKLEKWQSDHLEKRFEIARQLYNTLVHAELKKKCQVERMPEYQEIMKMIDTASNQKEKWALEKKRKAFLEENGFSRNAFKADMEKYYKHFNDNIGANVALHGITAQVWIAFDKVFVDNYKQKGKVHFKKPGELCSVQGYSQKKSGGKEIMFREDRIIWNQQGNRDRKKVKREFLLKLSPDNPYEAEMLKRHVKFVRILRKDGKTKPHWYAQLVLEGKPAVKRDPASGAPKHPIGHGVVGIDIGTRTLAYSTDKEVNLLELADRVQNIEQEKRRLQRKMDRSRRAMNPENYNSDGTFKRGVKLTRNKSKRYRRIQHQLAMIQHHQADIRKQQHNELANYLLTLGDCFFVENMSYCDLVHRANKTEISEKTGRYKRKKRFGKSIANKAPAMLITMLKQKCQSRGLEGVKEVDTHVRASQYNHQTDTCIEKALENRWNVMPDGERIQRDLYSAFLLQHCKQGLPEYNRKELKKEFGEELYRVFDREALQRDYPQFVAYHHMTIQRLSELPHTIASMGIRRSIS

SEQ ID NO: 2065 - protein, 524 aa, Unknown
  Description of Unknown: uncultivated organism sequence
  Category: MG81 effectors
  Description: MG81-343 effector
MAKNNNTDTCVLTLPLRVEKWQEDCLLKRFEAARRIYNSLLNFELKKLRQLERTVEYRQIQSVISSAYRSNTKDSPECKDAFKRREKLISANGISKSGFKSDVKFFYKHFDGLIGSNVAVHCIAVQLWAAFDKYLSGSGKEIHFKRLGDISSLKGYSVKGKSGGREIIFRGQYIEWTRKKKKLLLPLKIDPDNEYEREMLSRRVKYVRIIKKPGKNRLRWYAQLTLEGKPALKYSAETGKPIHSVGKGNVGIDIGPQTVAYASDKEVALLELADRVTNIEHQKKKLQRKLDRSRRATNPDNYKPDGTIKRGVKLTRNKSKRYLKLQSKLAYIQHRQAEIRKLQHTCLANHMLTLGDRFFVEKMNWPGLAHRAKETSISEKTGRYKRKKRFGKSLANKAPAMFISILKRKCETLGLPGVVEVDTYSLKASQYNHLSDTYEKKSLSERWNYMPISDGSDSSKTKRIQRDLYSAFLLQHTIPQPCSFDKEALRIDYPNFVIMHDAEIHRLESLPKTVTSMGVRRSHS

SEQ ID NO: 2066 - protein, 511 aa, Unknown
  Description of Unknown: uncultivated organism sequence
  Category: MG81 effectors
  Description: MG81-344 effector
MAARSKTDTCCLTLPLRLEKWQADRLAKRFHIAEQIYNAMLLSWIKKLRVVEQMPEYRAIQSQLQKLYEEDKQKTDAAKELFSRRKEILKKNGFSEYSFKTGIRKYYAHFKENIASNVATHCIASQVWDAFSKKLFGNGGRLHFKRAGDIHSLRGYSKSGESGGVEIIFRGTYIEWNGLRLPLKLDPQNPYEAEMLAKRVKYVRILRTPGKSIDHWYAQLALEGKPTVKRNAATGEPVHPSGRGAVGIDIGPRTIAYVSENEVGLRELADQVENIERDKRRLQRKLDRSRRATNPDNYAPDGTIKRGIKHTHNKSSRYRRMQKELSLLQHRQALIRKRQHTELANHLLSLGDCFYVEDMPWKGLARRTKETTVSPTTGRYRRKKRFGKSISNKAPGTLILILEQKCKSRGVSGVIRVPTNIKASQYNHMTDTYKPKPLSQRWNDMPDGKRIQRDLYSAFLLQHVTPELDGFERTKLIEDYDGFIHLHDKEIHELTLAPKTIASMGISRTRS

SEQ ID NO: 2067 - protein, 349 aa, Unknown
  Description of Unknown: uncultivated organism sequence
  Category: MG81 effectors
  Description: MG81-345 effector
MIQRQIKLRLKPKQEALLNDWLWQCTGLFNWAIRKIELDAQGGVYYTKQGFQNILAGHSRKMGMPSHTMQAMLTQAYIGWQRCFKKLAKKPRLKGMRNKLNSIPFPDPLKQPVQNKIKVPGLGQVRFHKQSLPDGKIKCGRIIKRASGWYLALTIDAEPNIKHTFKAKNNRVVGIDPGFKDVIALSDGEKKKATLEYNQGLQRLAQAQRGHDKKLVARLHERIANRKKDRNHKLSRHLVETCELIAFSKDNIKGIQRKFGKSVANANIYQLRQMIDYKSSSCDRRYVEVDGKYSTMTCSACGSRTGPTGIAGLRVRYWTCGCGTKHDRDINAAINTLNTAVGSTVELAA

SEQ ID NO: 2068 - protein, 512 aa, Unknown
  Description of Unknown: uncultivated organism sequence
  Category: MG81 effectors
  Description: MG81-346 effector
MKKSSTDTCCLTLPLKLEKWQEDRLAKRFEIARQLYNTLVHAELKRLVQIKRTAEYRENERKIRTLDWNNPAHRTELEKLYEERRKSLKKAGFTDNSFTTDMGKYYKHFRDNIGSSVAVHGIAPQVWAAFDKLLFKKGGKKVHCKRPGEVNSVQGYSRTGKSGGREIMFRGAYIEWKGLKLPLKLSPDNAYETDMLQRRVKLVRLVRRPGKRRDRWYAQLVLEGKPAIKADPVTGKAVHPIGSGPVGLDIGPQTLAYSAAGVAGLVELADRVQNIEQEKRCLQRKMDRSRRATNPDNYAEDGTIRRGVKLTHNKSKRYRRNQQELKYLQHRQAEIRKLQHIQLANHLLSLGDHFYVEKMEWSSLTRRAKKTVISEKTGKPRSKKRFGKSIANKAPAMLIEILRQKCKSLGLPNVVEINPADIKASQYNHLTGEYVKKSLSRRWNDMQDGEHLQRDLYSAFLLQHYDSMSKALDLDSLSRDYPAFVQYHHQEIERLHALPKTPASMGIRRSIA

SEQ ID NO: 2069 - protein, 536 aa, Unknown
  Description of Unknown: uncultivated organism sequence
  Category: MG81 effectors
  Description: MG81-347 effector
MVNDDYNKVLKQFHKLSNRHILVAETDMSCSDIQKVVKLSDRIRKAGNELIGLMKKNYDQLMRTKRYRGLLKLYGSTKNKQKRKMFADQLNEMQKQYNVTWDYCRKSMIHIGKKYSIDAVFALTKAEDVWHGVEKCLYGNGKTLHFSKHGDLPCIRAKQINRGIPISAKNNQLQFKLGKSVFGIQIKDRFQTDEVNAVLDYLAAPEIADCKAVQTLLEEACCISTYRPCYATLVPKLIRGKYRVYLHLAIEGRAKPKYDRFGNPRHKYGKGIIGADIGTQTVAYTSDTETGLKNLSDRGNSIQTSERLERLYYRAMDRSRRATNPQNYNDDGTVKQGKKTWNYSNHYKKLKAKHAELCRINVANRRLAINEDANHLRSIGDVFITEPKNAAKLMKRASKTTVNNKGKINKKKRFGKSIKNRCPGGFQTAVENKFKASGGTYIEVSNNYRASQYDHTADDYIKKKLSDRMYKLADGTLVQRDWYSSFLLYCYDFRTSDIDKDKCAAKFDKCYSMERELIEWIKTNKIKVLNSGIKIA

SEQ ID NO: 2070 - protein, 538 aa, Unknown
  Description of Unknown: uncultivated organism sequence
  Category: MG81 effectors
  Description: MG81-348 effector
MDNEEKEKDGATCCLTLPLKLEKWQSDHLEKRFEIARQLYNTLVHAELKKKCQVERMPEYQEIMKMIDAASNQKEKWALEKKRKAFLEENGFSRNAFKADMEKYYKHFNDNIGANVALHGITAQVWIAFDKVFVDNYKQKGKVHFKKPGELCSVQGYSQKKSGGKEIMFREDRIIWNQQGNRDRKKVKREFLLKLSPDNPYEAEMLKRHVKFVRILRKDGKTKPHWYAQLVLEGKPAVKRDPISSAPKHPIGHGVVGIDIGTRTLAYSTDSEVNLLELADRVQNIEQEKRRLQRKMDRSRRAMNPGNYKPDGSIKQGVKLTWNNSKRYKRIQHQYAMIQHHQADIRKQQHNELANYLLTLGDCFFVENMSYCDLAHRANKTEISEKTGRYKRKKRFGKSIANKAPAMLITMLKQKCQSRGLEGVKEVDTHVCASQYNHQTDTCIKKALENRWNIMPDGERIQRDLYSAFLLQHCRRDLPEYNRKELQKEFGEELYRVFDREALQRDYPQFVAYHHMTIQRLSELPHTIPSMGIRRIIS

SEQ ID NO: 2071 - protein, 534 aa, Unknown
  Description of Unknown: uncultivated organism sequence
  Category: MG81 effectors
  Description: MG81-349 effector
MGWKSKGRGGTRVKKSSTDTCCLTLPLKLEKWQSDRLEKRFEIGRQIYNTVVRAELKKLHQLERTPQYREIEQKLKEAKQEEAKELWKKRTQLLSQSGFTEYGFKSDMKYYYQHFKENIGSSVAVHGIASQVWTAFEKVLFSKDGKMVHFKKKGELSSLRGYSQAGKSGGIEIIFRGSYVEWKGLKLPLKLSPDNDYETEMLSKRVKYVRILRKEGKTKPHWYAQLVLEGKPAIKRDPASGAPKHPVGHGVVGIDIGTRTLAYSADSKVDLIELADRVQNIEQEKMLLQRKLDRSRRATNPENYKPDGTIKKGVKLTRNKSKRYRKIQHQLAMLQHRQADIRKRQHNELANYLLTLGDCFFVEDMDYRALTRKAKKTEISEKTGRYKRKKRFGKSIANKAPSMLIALLDQKCKSLNLEGVKKVDTAVKASQYNHQTDECKAKELKERWNIMPDGERIQRDLYSAFLLQHCKRGLPEYNRKELQKEFGEELYRVFDREALQRDYPQFVVYHHMTMQRLSALPKTIASMGIRRSIS

SEQ ID NO: 2072 - protein, 538 aa, Unknown
  Description of Unknown: uncultivated organism sequence
  Category: MG81 effectors
  Description: MG81-350 effector
MNNEEKEKEGATCCLTLPLKLEKWQSDHLEKRFEIARQLYNTLVHAELKKKCQVERMPEYQEIMKMIDTASNQKEKWALEKKRKAFLEENGFSRNAFKADMEKYYKHFNDNIGANVALHGITAQVWIAFDKVFVDNYKQKGKVHFKKPGELCSVQGYSQKKSGGKEIMFREDRIIWNQQGNRDRKKVKREFLLKLSPDNPYEAEMLKRHVKFVRILRKDGKTKPHWYAQLVLEGKPAVKRDPISSAPKHPVGHGVVGIDIGTRTLAYSTDKEVNLLELADHVQNIEQEKRRLQRKMDRSRRATNPENYNPDGTFKRGVKLTRNKSKRYRRIQHQLAMIQHHQADIRKQQHNELANYLLTLGDCFFVENMSYCDLVHRANKTEISEKTGRYKRKKRFGKSIANKAPAMLITMLKQKCQSRGLKGVKEVDTHVRASQYNHQTDTCIEKALENRWNVMPDGERIQRDLYSAFLLQHCKQGLPEYNRKELKKEFGEELYRVFDREALQRDYPQFVAYHHMTIQRLSELPHTIPSMGIRRIIS

SEQ ID NO: 2073 - protein, 511 aa, Unknown
  Description of Unknown: uncultivated organism sequence
  Category: MG81 effectors
  Description: MG81-351 effector
MKKSNTDTCCLTLPLKLEKWQEDRLAKRFEIARQIYNTMVHAELKKLRNVENSQPYRQIQKQIEALNWKNQNDKARLKSLYNDRNKLLNTIGFSEYGFKADIKYYYKHFNDNIGSSVAVHGIAPQVWAAFEKMLFHKEGKKVHYKKKDDIHSLHGYSVTGKSGGVEIIFRKTYIEWKGLKLPLKRSPDNAYETEMLDRRVKYVRLLRKPGKRKDCWYAQLSLEGKPAIKRDPESGKRRHSIGRGAVGLDIGPQTLAYSACGAADLVELADQVQNIEQMKRRLQRKLDRSRRATNPDNYADNGTIRRGVKLTHNKSNRYRRTQRELRYLQHCQAEIRKRQHIELANHLLALGDCFYVEDMAWPSLTHRAKETAISEKTGRIKRKKRFGKSVANKAPATLIGILEQKCNSLGLPGVMKVPTSLRASQYNHQSGEYTSKPLSQRWNNMPDGERIQRDLYSAFLLQHYDPKAGNFDSALLQQDYPQFVQYHHRAIQRLSTVPKTLSSMGIQRSLR

SEQ ID NO: 2074 - protein, 334 aa, Unknown
  Description of Unknown: uncultivated organism sequence
  Category: MG81 effectors
  Description: MG81-352 effector
MLSKRVKYVRILRKDGKTKTHWYAQLALEGKPAVKRDSISGAPKHPVGHGVVGIDIGTRTLAYSTDKEVNLLELADRVQNIEQEKRRLQRKMDRSRRAMNPENYNSDGTFKRGVKLTRNKSKRYRRIQHQLAMIQHHQADIRKQQHNELANYLLTLGDCFFVENMSYCDLVHRANKTEISEKTGRYKRKKRFGKSIANKAPAMLITMLKQKCQSRGLKGVKEVDTHVRASQYNHQTDTCIEKALENRWNVMLDGERIQRDLYSAFLLQHCKQGLPEYNRKELKKEFGEELYRVFDREALQRDYPQFVAYHHMTIQRLSELPHTIPSMGIRRIIS

SEQ ID NO: 2075 - protein, 540 aa, Unknown
  Description of Unknown: uncultivated organism sequence
  Category: MG81 effectors
  Description: MG81-353 effector
MATTDKKNEENLRAYKFRLDPNQAQTIALYQAAGAARYTYNMLTAYNLEVNRLRDDYWKKRHDEGISDADIKKELNALTKEDKRYKQLKYGAFGTQYLTPEKKRHEQAEHRIENGEDPSVVWNQETERSANPWLHTANQRVLVSGLQNASDAWDNFWASRTGKRAGRLVGTPRFKKKGVSRDSFTVPAPEKMGAYGTAYLRGEPAYKQGRRKITDYRHVRLSYLGTIRTFNSTKPLVKAVAAGAKIRRYTVSRNADRWYVSFLVKFSEPIRRSATKRARAAGSVGVDLGVKYLASLSDSEAPQRFPNLKFVEGLPSLENPRWSEASSRRLHKLQRALARSQKGSNRRSRLVKQIARLHHMTALRRESNLHQLTKKLATEYTLVGFEDLNVSGMTASAKGTVENPGKNVAQKSGLNRVVLDAAFGVFRNQLEYKAVWYGSAFEKVDRYFASSQTCSECGRKAKTKLTLRDRVFDCAYCGNMMDRDLNAAVNICREAQRLFDEKLASEDRESLNGRGSRGALRGAETVEASRPPASHRRGSP

SEQ ID NO: 2076 - protein, 536 aa, Unknown
  Description of Unknown: uncultivated organism sequence
  Category: MG81 effectors
  Description: MG81-354 effector
MNEKEYKKSLRQFHKHSDRHILVVETDMSFSDIQKVVALSDKIRKAGNELVGLMIKNYDQLIRTKRYRKVRKLYGATEEKKKRKVLASQLNEMQKQYHVTWDDCRTSMIPIGKKYGIDAVFALTKTEDVWRGIEKCLYANGKTLHFSKYGVLPCIRAKQMNRGIPISVKENQLQFKFGESTFGIQRKDRFQSDEIHAVLDYLAEPEIIDKKAIQTFVEKAYCINTYRPCYATLVPKLIRGKYRVYLHLTIEGKAKPKQDRFGNPRHKFGKGIIGADIGTQTVAYTSDTEVGLKNLSERGNSIQKSERLERLYYRAMDRSRRATNPQNYNEDGTIKKGRKSWKYSNHYKRLKAKHAELCRINARNRQLAINEDANSLRSLGDVLITEPKNASKLMKRAKETTKNKKGKFNKKKRFGKSIKSRCPGGFQSTIEKKFEVSGGRYIEVPGNYRASQYDHTADTYVKKKLSDRMYHLADGTLVQRDWYSSFLLYCYDDKIEEINKTKCRTEFEKHYKKEKALIEWIQANQIKILNSGIKTA

SEQ ID NO: 2077 - protein, 554 aa, Unknown
  Description of Unknown: uncultivated organism sequence
  Category: MG81 effectors
  Description: MG81-355 effector
MNNEEKEKDGATCCLTLPLKLEKWQSDHLEKRFEIARQLYNTLVHAELKRIHRIERMPEYREIERLIEATTDKKEKWALKNQKKQFLRKNGINRNTFTTDMKRLYKHFNDNIGSNVAQHGIVSQVLTAFEKVYIENQSGEVHFKKPGDLRSVQGYSQKESGGKEIMFRNGKIIWTQQENDDRKKSPKYQQRKKRQNYKGVKGIAREFPVVFSKNNPYEAEMLTKHVKFVRILRKDGKTKPHWYAQLVLEGKPAIKRDPASGAPKHPIGHGVVGIDIGTRTLAYSTDKEVNLLELADHVQNIEQEKRRLQRKMDRSRRATNPENYNPDGTFKRGVKLTRNKSKRYRRIQHQLAMIQHHQADIRKQQHNELANYLLTLGDCFFVENMSYCDLVHRANKTEISEKTGRYKRKKRFGKSIANKAPAMLITMLKQKCQSRGLKGVKEVDTHVRASQYNHQTDTCIEKALENRWNVMPDGERIQRDLYSAFLLQHCKQGLPEYNRKELKKEFGEELYRVFDREALQRDYPQFVAYHHMTIQRLSELPHTIPSMGIRRIIS

SEQ ID NO: 2078 - protein, 512 aa, Unknown
  Description of Unknown: uncultivated organism sequence
  Category: MG81 effectors
  Description: MG81-356 effector
MGKSSTDTCCLSLPLKLEKWQEDRLAKRFEIARQIYNTLVHAELKRLSQVKRSQQYREIENKIRALDRNDQEDKKELSLLHKLRDDLLRKSGFNDYGFKADIKYFYKHFGENIGANVAVHGIAPQVWSAFDSVLFKKRGKKVHYKKPGDICSLRGYSVTGKSGGSEIMFRGTYIEWKGLKMPLKLSPDNIYESEMLDHRVKYVRIVRKPGKRKDRWYAQLSLECKPVIKCDPVSGEMRHPVGKGPVGLDIGPQTLAYCALSEAGLVELADQVQDIEREKQRLQRRLDRSRRAANPNNYAADGTIKRGVKLTHNKSKRYCILQRELRYLQQQQAETRKRQHTELANYLLSLGDRFYVEDMNWSSLARRAKKTEISEKTGRYKRKKRFGKSIANKAPGSLIDILKQKCESLGIPGVEKLPTSLLKASQYNHQTGEYTPKPRSQRWNDMPDGERIQRDLYSAFLLQHYDPVSKGYDQAALQRDYPQFLQHHHHSIQRLTAKPKTPSSMGIHQRLR

SEQ ID NO: 2079 - protein, 594 aa, Unknown
  Description of Unknown: uncultivated organism sequence
  Category: MG81 effectors
  Description: MG81-357 effector
MVDLKKQLCSSASNSENQGVRFQTVVLYTKFVHKSVQLSPESSVFAVALFVRMMYNTKYQAKRGDPVGEKKNNNNNTDTCVLTLPLRVEKWQEDCLLKRFEAARRIYNSLLNFELKKLRQLERTVEYRQIQSVISSAYRSNTKDSPECKAALKRREKLIDENGLTKNGFKNDVKFFYKHFDGLIGSSVAVHCIAVQLWAAFNKYLCGNGKEIHFKRLGDISSLKGYSVKGKSGGCEIIFRGQYVEWTRKKKKLLLPLKIDPDNEYEREMLSRRVKYVRIIKKPGKNRLRWYAQLTLEGKPALKYSAETGKPIHSVGKGDVGIDIGPQTVAYASDKEVALLELADRVTNIEHQKKKLQRKLDRSRRATNPDNYKPDGTIKRGVKLTRNKSKRYLKLQSKLAYIQHRQAEIRKLQHTCLANHMLTLGDRFFVEKMNWPGLAHRAKETSISEKTGRYKRKKRFGKSLANKAPAMFISILKQKCETLGLPGVVEVDTFRLKASQYNHLSDTCEKKSLSERWNYMPISDGSDSSKTKRIQRDLYSAFLLQHTIPQSCSFDKEALRIDYPNFVTMHDAEIHRLESLPKTITSMGVRRSHS

SEQ ID NO: 2080 - protein, 511 aa, Unknown
  Description of Unknown: uncultivated organism sequence
  Category: MG81 effectors
  Description: MG81-358 effector
MKKSNTDTCCLTLPLKLEKWQEDRLAKRFEIARQIYNTMVHAELKKLRNIENSQPYRQIQKQIEALNWKNQNDKAQLKSLYNDRNKLLNTIGFSEYGFKADIKYYYKHFNDNIGSSVAVHGIAPQVWAAFEKMLFHKEGKKVHYKKKDDIHSLHGYSVTGKSGGVEIIFRKTYIEWKGLKLPLKRSPDNAYETEMLGRRVKYVRLLRKPGKRKDCWYAQLSLEGKPAIKRDPESGKRRHSIGRGAVGLDIGPQTLAYSACGAADLVELADQVQNIEQMKRRLQRKLDRSRRATNPDNYADNGTIRRGVKLTHNKSNRYRRTQRELRYLQHCQAEIRKRQHIELANHLLALGDCFYVEDMAWPSLTHRAKETAISEKTGRIKRKKRFGKSVANKAPATLIGILEQKCNSLGLPGVMKVPTSLRASQYNHQSGEYTSKPLSQRWNNMPDGERIQRDLYSAFLLQHYDPKAGNFDSALLQQDYPQFVQYHHRAIQRLSTVPKTLSSMGIQRSLR

SEQ ID NO: 2081 - protein, 512 aa, Unknown
  Description of Unknown: uncultivated organism sequence
  Category: MG81 effectors
  Description: MG81-359 effector
MPTKQKEGGNRCVLTLPLLTEPWQEHIIEKRFKIIEHLKNQLISIELRKLKNLQRTKAYKNLIKQIESVPKSERTALYKERNKMLKDAGFSQYTFMDDMAGKKSLMQKHFESHINVQIAHKAAIDVWSSFEKFLFGTGQIVHYQKRGTLSSVASKSPKTGMFYYPDENIFKWSGGGTKPKGGIILCLRVASVKTNYEKEMVANNEIKYYRVVRKWMKTKYKYYLQITFAGKPADKHREISTGRVGIDIGTQTIAIASDKSVKLLELADKVNKNHIKKCELQRKLDRSRRYTNPDNFNPDGTVKRGTKGHKLKWNKSKHYIEIAGKIRELERKNADIRKYQHTCLANDILAMGNQIYIEPMNYKGLQKRAKETQVDEKGRYKKKKRFGKSLANKAPAMFVTILKTKAEQHGGEVYEVDIMSYRASQCDHTTGEYTKHGLNDRWRILGNGDKVQRDLYSAFLIKNSNKTHDEIDLDKCSKTYDNFKKLHDKEIENIRNEVKLRERKNISSYGIA

SEQ ID NO: 2082 - protein, 538 aa, Unknown
  Description of Unknown: uncultivated organism sequence
  Category: MG81 effectors
  Description: MG81-360 effector
MNNEEKEKEGATCCLTLPLKLEKWQSDHLEKRFEIARQLYNTLVHAELKKKCQVERMPEYQEIMKMIDTASNQKEKWALEKKRKAFLEENGFSRNAFKADMEKYYKHFNDNIGANVALHGITAQVWIAFDKVFVDNYKQKGKVHFKKPGELCSVQGYSQKKSGGKEIMFREDRIIWNQQGNRDRKKVKREFLLKLSPDNPYEAEMLKRHVKFVRILRKDGKTKPHWYAQLVLEGKPAVKRDPASGAPKHPIGHGVVGIDIGTRTLAYSTDKEVNLLELADHVQNIEQEKRRLQRKMDRSRRATNPENYNPDGTFKRGVKLTRNKSKRYRRIQHQLAMIQHHQADIRKQQHNELANYLLTLGDCFFVENMSYCDLVHRANKTEISEKTGRYKRKKRFGKSIANKAPAMLITMLKQKCQSRGLKGVKEVDTHVRASQYNHQTDTCIEKALENRWNVMPDGERIQRDLYSAFLLQHCRRDLPEYNRKELQKEFGEELYRVFDREALQRDYPQFVAYHHMTIQRLSELPHTIPSMGIRRIIS

SEQ ID NO: 2083 - protein, 397 aa, Unknown
  Description of Unknown: uncultivated organism sequence
  Category: MG81 effectors
  Description: MG81-361 effector
MAKCSTDTCCLTLPLRLEKWQEDRLAKRFEIARQIYNTMVRAELKKLRAMEQSEPYKANQEKIQALDWKTQADKQALKALYKERDKLLRDGGFSEYGFKSDIKNYYKHFNNNIGSSVAVHGIAPQVWAAFEKMLFKKEGKKVHFKKKGDIHSLRGYSAAGKSGGVEIIFRETYIEWKGLKLPLKLSPDNIYETQMLSYRVKYVRLLRKPGKRKDRWYAQLSLEGKPVIKYNPKTGEVRHPIGKGAVGLDIGPQTLAYSAATGADLVELANQVQNVEQEKRRLQRKLDRSRRATNPGNYADDGTIRRGIALTHNKSKRYLRTQQELKYLQHQQAEIRKRQHTELANHLLSLGDCFYVEKMVWTSLTHRAKETEISEKPEKSKGKRGSGNPSLTKLQPR

SEQ ID NO: 2084 - protein, 335 aa, Unknown
  Description of Unknown: uncultivated organism sequence
  Category: MG81 effectors
  Description: MG81-362 effector
MAKCSTDTCCLTLPLRLEKWQEDRLAKRFEIARQIYNTMVRAELKKLRAMEQSEPYKANQEKIQALDWKTQTDKQALKALYKERDKLLRDGGFSEYGFKSDIKNYYKHFNNNIGSNVAFHGIAPQVWAAFEKMLFKKEGKKVHFKKKGDIHSLRGYSAAGKSGGVEIIFRETYIEWKGLKLPLKLSPDNIYETQMLSYRVKYVRLLRKPGKRKDRWYAQLSLEGKPVIKYNPKTGEVRHPIGKGAVGLDIGPQTLAYSAATGADLVELANQVQNVEQEKRRLQRKLDRSRRATNPGNYADDGTIRRGIALTHNKSKRYLRTQQELKYLQHQQAEI

SEQ ID NO: 2085 - protein, 512 aa, Unknown
  Description of Unknown: uncultivated organism sequence
  Category: MG81 effectors
  Description: MG81-363 effector
MPAKQKEGGNRCVLTLPLLTEPWQEHIIEKRFKIIEHLKNQLISIELRKLKNLQRTKAYKNLIKQIESVPKSERTALYKERNKMLKDAGFSQYTFMDDMAGKKSLMQKHFESHINVQIAHKAAIDVWSSFEKFLFGTGQIVHYQKRGTLSSVASKSPKTGMFYYSDENIFKWSGGGTKPKGGIILCLRVAPVKTNYEKEMVANNETKYYRVVRKWMKTKYKYYLQITFAGKPADKHREISTGRVGIDIGTQTIAIASDKSVKLLELADKVNKNHIKKCELQRKLDRSRRYTNPDNFNPDGTVKRGTKGHKLKWNKSKHYIEIAGKIRELERKNADIRKYQHTCLANDILAMGNQIYIEPMNYKGLQKRAKETQVDEKGRYKKKKRFGKSLANKAPAMFVTILKTKVEQHGGEVYEVDIMSYRASQCDHTTGEYTKHGLNDRWRILGNGDKVQRDLYSAFLIKNSNKTHDEIDLDKCSKTYDNFKKLHDKEIENIRNEVKLRERKNISSYGIA

SEQ ID NO: 2086 - protein, 512 aa, Unknown
  Description of Unknown: uncultivated organism sequence
  Category: MG81 effectors
  Description: MG81-364 effector
MPTKQKEGGNRCVLTLPLLTEPWQEHIIEKRFKIIEHLKNQLISIELRKLKNLQRTKAYKNLMKRIESVPKSERTALYKERNKMLKDAGFSQYTFMDDMAGKKSLMQKHFESHINVQIAHKAAIDVWSSFEKFLFGSGQMIHYQKRGTLSSVASKSPKTGMFYYSDENIFKWSGGGTKPKGGIILCLRVASVKTNYEKEMVANNEIKYYRVVRKWMKTKYKYYLQITFAGKPADKHREISTGRVGIDIGTQTIAIASDKSVKLLELADKVNKNHIKKCELQRKLDRSRRYTNPDNFNPDGTVKRGTKGHKLKWNKSKHYLEIAGKIRELERKNADIRKYQHTCLANDILAMGNQIYIEPMNYKGLQKRAKETQVDEKGRYKKKKRFGKSLANKAPAMFVTILKTKAEQHGGEVYEVDIMSYRASQCDHTTGEYTKHGLNDRWRILGNGDKVQRDLYSAFLIKNSNKTHDEIDLDKCSKTYDNFKKLHDKEIENIRNEVILRERRNISSYGIA

SEQ ID NO: 2087 - protein, 511 aa, Unknown
  Description of Unknown: uncultivated organism sequence
  Category: MG81 effectors
  Description: MG81-365 effector
MGKSSTDTCCLTLPLKLEKWQEDRLAKRFEIARQIYNTMVRAELKRLRQVEQSPQYRSNKKAIQALDWKNTADKPKLKTLYRERDKLLKGGGFTEYGFKSDIKNFYKHFVENIGSSVAVHGIAPQVWAAFERVLFKKEGKKVHFKKTGDIRSLRGYSVTGKSGGVEIIFRGSYIEWKGLNLPLKLSPDNAYETEMLSYRVKYVRILRKPGKTRDRWYAQLSLEGKPAIKRNPASGNPVHPVGQGAVGLDIGPQTLAYAAEKEANLVELADRVQNIEREKHLLQRKMDRSRRAANPDNYAENGTIRRGVKLTHNKSKRYLRLQRELCYLQHCQAETRKRQHTELANHLLSLGSCFYVEDMAWPSLTHRAKKTEISDKTGRIKRKKRFGKSIANKAPAALINILRTKCVSLGIPGVVEVPTSLKASQYNHQSKEYTPKPLSQRWNDMPDGSRIQRDLYSAFLLQHYDPQSGNFDQASLEADYPQFVQLHNQSIQRLLTVPKTPSSMGIRRSVS

SEQ ID NO: 2088 - protein, 512 aa, Unknown
  Description of Unknown: uncultivated organism sequence
  Category: MG81 effectors
  Description: MG81-366 effector
MKKSSTDTCCLTLPLKLEKWQEDRLAKRFEIARQLYNTLVHAELKRLAQVKQTAEYRENERKIRTLDWNDPGDQAKLKGLYKERRKSLKTAGFTDYSFTTDMGKYYKHFRDNIGSSVAVHGIAPQVWAAFDKVLFKKGGKKVHYKKPGEVNSVQGYSRTGKSGGTEIMFRGPYIEWKGLKLPLKVSPDNAYETDMLQRRVKLVRLVRRPGKRRDRWYAQLVLEGKPAIKADPVTGKAVRPIGSGPVGLDIGPQTLAYSAAGVAGLVELADRVQNIEQEKRCLQRKMDRSRRATNPDNYAEDGTIRRGVKLTHNKSKRYRRSQQELKYLQHRQAEMRKLQHIQLANHLLSLGDHFYVEKMEWSSLTHRAKKTVISEKTGKPRSKKRFGKSIANKAPAMLIEILRQKCKSLGLPNVVEINPADIKASQYNHLTGEYVKKSLSRRWNEMQDGEHLQRDLYSAFLLQHYDSMSKALDLDSLARDYPAFVQYHHREIERLHALPKTPSSMGIRRSIA

SEQ ID NO: 2089 - protein, 511 aa, Unknown
  Description of Unknown: uncultivated organism sequence
  Category: MG81 effectors
  Description: MG81-367 effector
MAKCSTDTCCLTLPLRLEKWQEDRLAKRFEIARQIYNTMVRAELKKLRAIEQSEPYKANQEKIQALDWKTQADKQALKALYKERDKLLRDGGFSEYGFKSDIKNYYKHFNNNIGSSVAVHGIAPQVWAAFEKMLFKKEGKKAHFKKKGDIRSLRGYSVAGKSGGVEMIFRETYIEWKGLKLPLKLSPDNIYETQMLSYRVKYVRLLRKPGKRKDRWYAQLSLEGKPVIKYNPKTGEVRHPIGKGAVGLDIGPQTLAYSAATGADLVELANQVQNVEQEKRRLQRKLDRSRRATNPGNYADDGTIRRGIALTHNKSKRYLRTQQELKYLQHQQAEIRKRQHTELANHLLSLGDCFYVEKMAWTSLTHRAKETEISEKTGKIKRKKRFGKSVANKAPATLIGILQRKSAALGIPGVIEVPTSVKASQYNHQSGTYTPKPLSQRWNNMPDGERIQRDLYSAFLLQHYDPQTNTFDANSLHQDYPQFVQYHHDAVLRLYAMPKTPSSMGIKRSLR

SEQ ID NO: 2090 - protein, 338 aa, Unknown
  Description of Unknown: uncultivated organism sequence
  Category: MG81 effectors
  Description: MG81-368 effector
MDYLAQPEIIDDKAVKILQDEACCISTYRPCYATLVPKFIRGKYRVYLHLVIEGKAKPKYDSSGKPRHKYGKGVVGADIGTQTVAYTSDTETGLKNLSERGNSIQKSERLERLYYRAMDRSRRATNPKNYNADGTIKKGKKKWTYSRHYKKLKAKHAELCRINAINRQLAINEDANHLRSLGDIFVTEPKNAARLMKRAKETTVNNKGRINRKKRFGKSVKNRCPGGFQTAVENKFKTSGGTYIEVPNNYRASQYDHTADDYIKKKLSDRMYKLTDGTLVQRDWYSSFLLYCYNYRTNDIDKKKCAAEFKKCYSMEKEFIEWIKANKIKVLNSGIKTA

SEQ ID NO: 2091 - protein, 528 aa, Unknown
  Description of Unknown: uncultivated organism sequence
  Category: MG81 effectors
  Description: MG81-369 effector
MILLTKNNNNTDTCVLTLPLRVEKWQEDCLLKRFEAARRIYNSLLNFELKKLRQLERTVEYRQIQSVISSAYRSNTKDSPECKDAFKRREKLISANGISENGFKSDVKFFYKHFDGLIGSNVAVHCIAVQLWAAFDKYLSGSGKEIHFKRLGDISSLKGYSVKGKSGGREIIFRGQYIEWTRKKKKLLLPLKIDPDNEYEREMLSRRVKYVRIIKKPGKNRLRWYAQLTLEGKPALKYSAETGKPIHSVGKGNVGIDIGPQTIAYASDKEVALLELADRVTNIEHQKKKLQRKLDRSRRATNPDNYKPDGTIKRGVKLTRNKSKRYLKLQSKLAYIQHRQAEIRKLQHTCLANHMLTLGDRFFVEKMNWPGLAHRAKETSISEKTGRYKRKKRFGKSLANKAPAMFISILKRKCETLGLPGVVEVDTFRLRASQYNHLSDTYEKKSLSERWNYMPISDGSDSSKTKRIQRDLYSAFLLQHTIPQPCSFDKEALRIDYPNFVIMHDAEIHRLESLPKTVTSMGVRRSHS

SEQ ID NO: 2092 - protein, 530 aa, Unknown
  Description of Unknown: uncultivated organism sequence
  Category: MG81 effectors
  Description: MG81-370 effector
MILLAKNNNNNNTDTCVLTLPLRVEKWQEDCLLKRFEAARRIYNSLLNFELKKLRQLERTVEYRQIQSVISSAYRSNTKDSPECKDAFKRREKLISANGISENGFKSDVKFFYKHFDGLIGSNVAVHCIAVQLWAAFDKYLSGSGKEIHFKRLGDISSLKGYSVKGKSGGREIIFRGQYVEWTRKKKKLLLPLKIDPDNEYEREMLSRRVKYVRIIKKPGKNRLRWYAQLTLEGKPALKYSAETGKPIHSVGKGNVGIDIGPQTVAYASDKEVALLELADRVTNIEHQKKKLQRKLDRSRRATNPDNYKPDGTIKRGVKLTRNKSKRYLKLQSKLAYIQHRQAEIRKLQHTCLANHMLTLGDRFFVEKMNWPGLAHRAKETSISEKTGRYKRKKRFGKSLANKAPAMFISILKRKCETLGLPGVVEVDTYNLKASQYNHLSDTYEKKSLSERWNYMPISDGSDSSKTKRIQRDLYSAFLLQHTIPQPCSFDKEALREDYPNFVTMHDAEIHRLESLPKTVTSMGVRRSHS

SEQ ID NO: 2093 - protein, 519 aa, Unknown
  Description of Unknown: uncultivated organism sequence
  Category: MG81 effectors
  Description: MG81-371 effector
MIQPELKAYRRCSDRHVLVLETNLTYVEKCQIFHYADLVRKAGNELTGIMKKRYDQLVRTKRYRKLKSLYKRYKDADNKKALKDVCDQMKEMQKQYDVTWDYCRTSMIPIGKKYGIDAVFALTKAEDVFRGIEKCLYSDGETVHFKKRGDLPCIRAKQINRGIIMKQMNFKFKNIEFGVKIKDRYEQEEVNAILYYLKHAEFMDSIAANTYKETNICISTYRPCYVSIVCKKIRGKLRVYVHITIEGLSKPKQDRFGNVKHNKGKGIVGCDIGTQTIAYTTETKAGLKNLAERGSCIEVNERKERRIYRAMDRSRRAMNPDNYNEDGTIKKGKKKWVLSNRYKKLRTKHTELCRINATNRHLAINADVNELRSLGDIFVTETKNAKKLQKKAKTGKRKKRFGRSIKNRCPGYFQSQAKRKFRIYVEVPNDYKASQYDHTSDEYVKKSLSQRMYKLQDGTMVQRDLYSSFLLYCIDLSTNKIDKNKCIHEFEKQYKNQNETIEYIQMNQIKVMNSGIRVN

SEQ ID NO: 2094 - protein, 680 aa, Unknown
  Description of Unknown: uncultivated organism sequence
  Category: MG81 effectors
  Description: MG81-372 effector
MKKSSTDTCCLTLPLKLEKWQSDRLEKRFEIGRQIYNTVVRAELKKLQQVERTPQYREIEQKLKGAKQEEAKELWKKRTQLLSKSGFSEYGFKSDMKYYYQHFKENIGSSVAVHGIASQVWTAFEKVLFSKDGKMVHFKKKGELSSLRGYSQAGKSGGIEIIFRGSYVEWKGLKLPLKLSPDNDYETEMLSKRVKYVRILRKEGKTKPHWYAQLVLEGKPAIKRDPASGAPKHPVGHGVVGIDIGTRTLAYSADSKVDLIELADRVQNIEQEKLLLQRKLDRSRRATNPGNYNPDGTIKKGVKLTRNKSKRYRKIQHQLAMLQHRQADIRKRQHNELANYLLTLGDCFFVEDMDYRALTRKAKKTEISEKTGRYKRKKRFGKSIANKAPSMLIALLDQKCESLNLEGVKKVDTAVKASQYNHQTDECKAKELKERWNIMPDGERIQRDLYSAFLLQHCKRGLPEYNRKKLQEAFGNELYRSLIVKHSKGTIRNLWNTIGRRFNAFPCCPKRLPAWASGESSANMKIRCGSHQQNRSIVRPGLSLMATKVALTAEEFRENSQRSIDLFNTEKLSTNSTHVRKKCILQFCAFLPLQSARSVWRQSLYPGDVEKVPQVAICTERVEAKEPASHGGRKRKSCNLHGACGGKARQGDPQRGQGGVAICTERVKAKYSHYAYSPLT

SEQ ID NO: 2095 - protein, 524 aa, Unknown
  Description of Unknown: uncultivated organism sequence
  Category: MG81 effectors
  Description: MG81-373 effector
MAKNNNTDTCVLTLPLRVEKWQEDCLLKRFEAARRIYNSLLNFELKKLRQLERTVEYRQIQSVISSAYRSNTKDSPECKDAFKRREKLISANGISEYGFKSDVKFFYKHFDGLIGSNVAVHCIAVQLWAAFDKYLRGSGKEIHFKRLGDISSLKGYSVKGKSGGREIIFRGQYIEWTRKKKKLLLPLKIDPDNEYEREMLSRRVKYVRIIKKPGKNRLRWYAQLTLEGKPALKYSAGTGKPIHSVGKGNVGIDIGPQTVAYASDKEVALLELADRVTNIEHQKKKLQRKLDRSRRATNPDNYKPDGTIKRGVKLTRNKSKRYLKLQSKLAYIQHRQAEIRKLQHTCLANHMLTLGDRFFVEKMNWPGLAHRAKETSISEKTGRYKRKKRFGKSLANKAPAMFISILKRKCETLGLPGVVEVDTYSLKASQYNHLSDTYEKKSLSERWNYMPISDGSDSSKTKRIQRDLYSAFLLQHTIPQPCSFDKKALRIDYPNFVTMHDAEIHRLESLPKTITSMGVRRSHS

SEQ ID NO: 2096 - protein, 534 aa, Unknown
  Description of Unknown: uncultivated organism sequence
  Category: MG81 effectors
  Description: MG81-374 effector
MGWKSKGRGGTLVKKSSTDTCCLTLPLKLEKWQSDRLEKRFEIGRQIYNTVVRAELKKLQQVERTPQYREIEQKLKEAKQEEAKELWKTRTQLLSKSGFSEYGFKSDMKYYYQHFKENIGSSVAVHGIASQVWTAFEKVLFSKDGKMVHFKKKGELSSLRGYSQAGKSGGIEIIFRGSYVEWKGLKLPLKLSPDNDYETEMLSKRVKYVRILRKEGKTKPHWYAQLVLEGKPAIKRDPASGAPKHPVGHGVVGIDIGTRTLAYSADSKVDLIELADRVQNIEQEKMLLQRKLDRSRRATNPENYKPDGTIKKGVKLTRNKSKRYRKIQHQLAMLQHRQADIRKRQHNELANYLLTLGDCFFVEDMDYRALTRKAKKTEISEKTGRYKRKKRFGKSIANKAPSMLIALLDQKCKSLNLEGVKKVDTAVKASQYNHQTDECKAKELKERWNIMPDGERIQRDLYSAFLLQHCRRDLPEYNRKKLQETFGNELYRVFDREALQRDYPKFVEYHRETIQRLSALPKTIASMGIRRSIS

SEQ ID NO: 2097 - protein, 537 aa, Unknown
  Description of Unknown: uncultivated organism sequence
  Category: MG81 effectors
  Description: MG81-375 effector
MIIDGGYKKLLKQFHKHSDRHILVIETDMPYSDILKVVALSDKIRKAGNELVGLMKKNYAQLLRTKRYRKLLFLYGNTEDKDKRKIYANQLNEMQKIYNVTWNYCRTSMIPIGKKYGIDAVFALTKAEDVWRGMEKCLYGNGNTVHFSKHGDLPCIRAKQISRGIPISVRNDKLQFKLGKTSFGIQVNDRFQQDEVNAVLSYLVEPEIMDNKAVNTLIEDAYCIDTYRPCYATLVPKMIRGKYRVYLHLTIEGKTKLKYDKHGNPRYKYGKGIIGADIGTQTVAYTSDTEVGLKNLSERGNSIQTSERKERLLYRAMDRSRRATNPQNFNEDGTVKKGRKTWKYSNHYKKLKTKHSELCRINAVNRQLAINEDANHLRGLGDTLVTEPKNASKLMKRAKETTVNSKGKFNKKKRFGKSIKNRCPSGFQTTVEKKFKTTGGTYIEVPNNYRASQYDHTVDDYIKKKLSDRLYKLQDGTEVQRDWYSSFLLYCYDYKIQNIDKNKCITEFDNCYKKEKALITWIKTHKIKVLNSGIKTA

SEQ ID NO: 2098 - protein, 511 aa, Unknown
  Description of Unknown: uncultivated organism sequence
  Category: MG81 effectors
  Description: MG81-376 effector
MGKSSTDTCCLTLPLKLEKWQEDRLAKRFEIARQIYNTMVRAELKKLDRVKQLPEYRKNQKEIQALDWKNSADKQRLKELYGNQRKILQKQGFTEYGFKSDSKDYYKHFIENIGSSVATHCIAPQVWNAFDKMLFQKDGKVVHFKRYGDVHSLKGGSVAHKSGGTEIMFRKTYIEWKGLKLPLKLSPNNAYEAEMLSYRVKYVRILRTRGKTKDRWYAQLSLEGKPAVKYDSNTGKPVHPVGRGAVGLDIGPQTLAYAAANEANLVELADQVQNIEQEKRRLQRKLDRSRRATNPDNYNENGTIRQGVKLTHNKSKRYCKLQKELSWIQHCQAETRKRQHIALANHLLSLGDCFYVEPMAWPSLTHRAKKTEVSEKTGRIKRKKRFGKSVANKAPASLIGILKLKCISLGLTGVVEVPMLLKASQYNHQSKDYAKKSLSQRWNDMPDGNRIQRDLYSAFLLQHYNSQSESFDQETLERDYPQFVRLHNQTIQRLSALPKTPSSMGIRRSVS

SEQ ID NO: 2099 - protein, 353 aa, Unknown
  Description of Unknown: uncultivated organism sequence
  Category: MG81 effectors
  Description: MG81-377 effector
MSGKSGGTEIIFHKTYIAWKGLTLPLKLSPDNAYEKEMLMRRIKYVRILRKPGKHKDRWYAQLSLEGNPVVKLDPVSGLPRHPIGKGAVGIDIGPQTLAYSAEGGADLVELADQVQCIEQEKSRLQRKMDRSRRASNPDNYAQDGTIKRGVKLTHNKSRRYCKLQKELAYMLYRQAETRKRQHRELINRLLTMGDCFYIEDMHWNSLAHRAKKTEISEKTGRYKRKKRFGKSIANKAPAMLVDMLKQKCKSLELDVVMVNTSLKASQYNHQTGKYEKKTLSQRWNHMPDGEQIQRDLYSAFLLQHVVPEKNAFDNEALCREYPKFVQYHHEVIERLRSLPKTISSMGIRRSVS

SEQ ID NO: 2100 - protein, 512 aa, Unknown
  Description of Unknown: uncultivated organism sequence
  Category: MG81 effectors
  Description: MG81-378 effector
MPTKQKEDSNRCVLTLPLLTEPWQEHIIEKRFKIIEHLKNQLISIELRKLKKLQRTKAYKNLIKQIESVPKSERTVLYKKRNKMLKDAGFSQYTFMDDMAGKKSLMQKHFESHINVQIAHKAAIDVWSSFEKFLFGSGQMIHYQKRGTLSSVASKSPKTGMFYYSDENIFKWSGGGTKPKGGIILCLRVASVKTNYEKEMVANNEIKYYRVVRKWMKTKYKYYLQITFAGKPADKHHEVSTDRVGIDIGTQTIAIASDKSVKLLELADKVNKNHIKKCELQRKLDRSRRYTNPDRFNPDGTVKRGTKGHKLKWNKSKHYIEIAGKIRELERKNADIRKYQHTCLANDILAMGNQIYIEPMNYKGLQKRAKETQVDEKGRYKKKKRFGKSLANKAPAMFVTILKTKAEQHGGEVYEVDIMSYRASQCDHTTGEYTKHGLNDRWRILGNGDKVQRDLYSAFLIKNSNKTHDEIDLDKCSKTYDNFKKLHDKEIENIRNEVILRKRRNISSYGIA

SEQ ID NO: 2101 - protein, 538 aa, Unknown
  Description of Unknown: uncultivated organism sequence
  Category: MG81 effectors
  Description: MG81-379 effector
MDNEEKEKDGATCCLTLPLKLEKWQSDHLEKRFEIARQLYNTLVHAELKKKCQVERMPEYQEIMKMIDAASNQKEKWALEKKRKAFLEENGFNRNAFKADMEKYYKHFNDNIGANVALHGITAQVWIAFDKVFVDNYKQKGKVHFKKPGELCSVQGYSQKKSGGKEIMFREDRIIWNQQGNRDRKKVKREFLLKLSPDNPYEAEMLKRHVKFVRILRKDGKTKTHWYAQLALEGKPAVKRDSISGAPKHPVGHGVVGIDIGTRTLAYSTDKEVNLLELADRVQNIEQEKRRLQRKMDRSRRAMNPGNYKPDGSIKQGVKLTWNNSKRYKRIQHQYAMIQHHQADIRKQQHNELANYLLTLGDCFFVENMSYCDLAHRANKTEISEKTGRYKRKKRFGKSIANKAPAMLITMLKQKCQSRGLEGVKEVDTHVCASQYNHQTDTCIKKALENRWNIMPDGERIQRDLYSAFLLQHCRRDLPEYNRKELQKEFGEELYRVFDREALQRDYPQFVAYHHMTIQRLSELPHTIPSMGIRRIIS

SEQ ID NO: 2102 - protein, 388 aa, Unknown
  Description of Unknown: uncultivated organism sequence
  Category: MG81 effectors
  Description: MG81-380 effector
MVHFKKKGELSSLRGYSQAGKSGGIEIIFRGSYVEWKGLKLPLQLSPNNEYETEMLSKRVKYVRILRKDGKTKTHWYAQLALEGKPAVKRDSISGAPKHPVGHGVVGIDIGTRTLAYSTDSEVNLLELADRVQNIEQEKRRLQRKMDRSRRAMNPGNYKPDGSIKQGVKLTWNNSKRYKRIQHQYAMIQHHQADIRKQQHNELANYLLTLGDCFFVENMSYCDLAHRANKTEISEKTGRYKRKKRFGKSIANKAPAMLITMLKQKCQSRGLEGVKEVDTHVCASQYNHQTDTCIKKALENRWNIMPDGERIQRDLYSAFLLQHCRRDLPEYNRKELQKEFGEELYRVFDREALQRDYPQFVAYHHMTIQRLSELPHTIPSMGIRRIIS

SEQ ID NO: 2103 - protein, 530 aa, Unknown
  Description of Unknown: uncultivated organism sequence
  Category: MG81 effectors
  Description: MG81-381 effector
MILLAKNNNNNNTDTCVLTLPLRVEKWQEDCLLKRFEAARRIYNSLLNFELKKLRQLERTVEYRQIQSVISSAYRSNTKDSPECKDAFKRREKLISANGISEYGFKSDVKFFYKHFDGLIGSSVAVHCIAVQLWAAFDKYLRGSGKEIHFKRLGEISSLKGYSVKGKSGGLEIIFRGQYVEWTRKKKKLLLPLKIDPDNEYEREMLSRRVKYVRIIKKPGKNRLRWYAQLTLEGKPALKYSAETGKPIHSVGKGDVGIDIGPQTVAYASDKEVALLELADRVTNIEHQKKKLQRKLDRSRRATNPDNYKPDGTIKRGVKLTRNKSKRYLKLQSKLAYIQHRQAEIRKLQHTCLANHMLTLGDRFFVEKMNWPGLAHRAKETSISEKTGRYKRKKRFGKSLANKAPAMFISILKRKCETLGLPGVVEVDTFRLKASQYNHLSDTYEKKSLSERWNYMPISDGSDSSKTKRIQRDLYSAFLLQHTIPQPCSFDKEALREDYPNFVTMHDAEIHRLEYLPKTITSMGVRRSHS

SEQ ID NO: 2104 - protein, 561 aa, Unknown
  Description of Unknown: uncultivated organism sequence
  Category: MG81 effectors
  Description: MG81-382 effector
MSNLLFLLENEEKEKDGATCCLTLPLKLEKWQSDHLEKRFEIARQLYNTLVHAELKRIHRIERMPEYREIERQIEATTDKKEKWALKNQKKQFLRKNGINRNTFTTDMKRLYKHFNDNIGSNVAQHGIVSQVLTAFEKVYIENQSGEVHFKKPGDLRSVQGYSQKESGGKEIMFRNGKIIWTQQENDDRKKSPKYQQRKKRQNYKGVKGIAREFPVVFSKNNPYEAEMLTKHVKFVRILRKDGKTKPHWYAQLVLEGTPVAKYDPISGAPKHPVGHGVVGIDIGTRTLAYSTDSEVNLLELADRVQNIEQEKRRLQRKMDRSRRAMNPENYNSDGTFKRGVKLTRNKSKRYRRIQHQLAMIQHHQADIRKQQHNELANYLLTLGDCFFVENMSYCDLVHRANKTEISEKTGRYKRKKRFGKSIANKAPAMLITMLKQKCQSRGLKGVKEVDTHVRASQYNHQTDTCIEKALENRWNVMPDGERIQRDLYSAFLLQHCKQGLPEYNRKELKKEFGEELYRVFDREALQRDYPQFVAYHHMTIQRLSELPHTIPSMGIRRIIS

SEQ ID NO: 2105 - protein, 522 aa, Unknown
  Description of Unknown: uncultivated organism sequence
  Category: MG81 effectors
  Description: MG81-383 effector
MKKSSTDTCCLTLPLKLEKWQSDRLEKRFEIGRQIYNTVVRAELKKLQQVERTPQYREIEQKLKGAKQEEAKELWKKRTQLLSKSGFSEYGFKSDMKYYYQHFKENIGSSVAVHGIASQVWTAFEKVLFSKDGKMVHFKKKGELSSLRGYSQAGKSGGVEIIFRGSYVEWKGLKLPLKLSPDNDYETEMLSKRVKYVRILRNEGKTKPHWYAQLVLEGKPAIKRDPASGAPKHPVGHGAVGIDIGTRTLAYSTDKEVNLLELADRVQNIEQEKRRLQRKMDRSRRATNPENYNPDGTFKRGVKLTRNKSKRYRRIQHQLAMIQHHQADIRKQQHNELANYLLTLGDCFFVENMSYCDLVHRANKTEISEKTGRYKRKKRFGKSIANKAPAMLITMLKQKCQSRGLEGVKEVDTHVRASQYNHQTDTCIEKALENRWNVMPDGERIQRDLYSAFLLQHCKQGLPEYNRKELKKEFGEELYRVFDREALQRDYPQFVAYHHMTIQRLSELPHTIPSMGIRRIIS

SEQ ID NO: 2106 - protein, 512 aa, Unknown
  Description of Unknown: uncultivated organism sequence
  Category: MG81 effectors
  Description: MG81-384 effector
MKKRSTDTCCLTLPLKLEKWQEDRLAKRFEIARQLYNTLVHAELKRLVQIKRTAEYLENEQKIRALDRNNPADRAKLQELYKEQRKSLKTAGFTDYSFTTDMGKYYKHFRDNIGSSVAVHGIAPQVWAAFDKLLFKKGGKKVHYKKPGEVNSVQGYSRTGKSGGTEIMFRGPYIERKGLKLPLKLSPDNAYETDMLQRRVKLVRLVRRPGKRRDRWYAQLVLEAKPAIKADPVTGKAVHPIGSGPIGLDIGPQTLAYSAAGAAGLVGLADRVQNIEQEKRRLQRKMDRSRRAANPDNYAEDGTIRRGVKLTHYKSKRYRRSQQELKYLQHRQAEIRKLQHIQFANHLLSLGDHFYVEKMEWSSLTHRAKETVISEKTGKPRSKRRFGKSIANKAPAMLIEILRQKCKSLGLSDVVEINPADIKASQYNHLTGKYVKKSLSRRWNDMQDGEHLQRDLYSAFLLQHYDSCSKTLDHDSIVRDYPAFVQYHHREIERLHALPKTPSSMGIRRSIA

SEQ ID NO: 2107 - protein, 524 aa, Unknown
  Description of Unknown: uncultivated organism sequence
  Category: MG81 effectors
  Description: MG81-385 effector
MAKNNNTDTCVLTLPLRVEKWQEDCLLKRFEAARRIYNSLLNFELKKLRQLERTVEYRQIQSVISSAYRSNTKDSLECKDAFKRREKLISANGISENGFKSDVKFFYKYFDGLIGSSVAVHCIAVQLWAAFDKYLSGSGKEIHFKRLGDISSLKGYSVKGKSGGLEIIFRGQYVEWTRKKKKLLLPLKIDPDNEYEREMLSRRVKYVRIIKKPGKNRLRWYAQLTLEGKPALKYSAETGKPIHSVGKGNVGIDIGPQTVAYASDKEVALLELADRVTNIEHQKKKLQRKLDRSRRATNPDNYKPDGTIKRGVKLTRNKSKRYLKLQSKLAYIQHRQAEIRKLQHTCLANHMLTLGDRFFVEKMNWPGLAHRAKETSISEKTGRYKRKKRFGKSLANKAPAMFISILKRKCETLGLPGVVEVDTYNLKASQYNHLSDTYEKKSLSERWNYMPISDGSDSSKTKRIQRDLYSAFLLQHTIPQPCSFDKEALRIDYPNFVTMHDAEIHRLESLPKTITSMGVRRSHS

SEQ ID NO: 2108 - protein, 511 aa, Unknown
  Description of Unknown: uncultivated organism sequence
  Category: MG81 effectors
  Description: MG81-386 effector
MAKCSTDTCCLTLPLRLEKWQEDRLAKRFEIARQIYNTMVRAELKKLRAMEQSEPYKANQEKIQALDWKTQADKQALKALYKERDKLLRDGGFSEYGFKSDIKNYYKHFNNNIGSSVAVHGIAPQVWAAFEKMLFKKEGKKVHFKKKGDIHSLRGYSVTGKSGGVEIIFRETYIEWKGLKLPLKLSPDNIYETQMLSYRVKYVRLLRKPGKRKDRWYAQLSLEGKPVIKYNPKTGEVRHPIGKGAVGLDIGPQTLAYSAATGADLVELANQVQNVEQEKRRLQRKLDRSRRATNPGNYADDGTIRRGIALTHNKSKRYLRTQQELKYLQHQQAEIRKRQHTELANHLLSLGDCFYVEKMVWTSLTHRAKETEISEKTGKIKRKKRFGKSVANKAPATLIEILQRKSAALGIPGVIEVPTSVKASQYNHQSGTYTPKPLSQRWNNMPDGERIQRDLYSAFLLQHYDPQTNTFDANSLHQDYPQFVQYHHDAVLRLYAMPKAPSSMGIKRSLR

SEQ ID NO: 2109 - protein, 511 aa, Unknown
  Description of Unknown: uncultivated organism sequence
  Category: MG81 effectors
  Description: MG81-387 effector
MREDSQNTCCLTLPLKIEKWQADRLIKRFEIARQIYNTLVHAELKKLQKMEASAEYRKIQDRIRELNPSDVRAKKEWKILKDKQEKLWKAWKITEYGFKSDIKAYYKYFNENIGSAVATHDIAPRVWAAFEKKLNDRTGKVKIQYKKAGDIRSLKGFSVSGKSGGTEIIFHKTYIAWKGLTLPLKLSPDNAYEKEMLMRRIKYVRILRKPGKHKDRWYAQLSLEGNPVVKLDPVSGLPRHPIGKGAVGIDIGPQTLAYSAEGGADLVELADQVQCIEQEKSRLQRKMDRSRRASNPDNYAQDGTIKRGVKLTHNKSRRYCKLQKELAYMLYRQAETRKRQHRELINRLLTMGDCFYIEDMHWNSLAHRAKKTEISEKTGRYKRKKRFGKSIANKAPAMLVDMLEQKCKSLELDVVMVNTSLKASQYNHQTGKYEKKTLSQRWNHMPDGEQIQRDLYSAFLLQHVVPEKNAFDNEALCRDYPKFVQYHHEVIERLRSLPKTISCMGIRRSVS

SEQ ID NO: 2110 - protein, 534 aa, Unknown
  Description of Unknown: uncultivated organism sequence
  Category: MG81 effectors
  Description: MG81-388 effector
MGWKSKGRGGTLVKRSSTDTCCLTLPLKLEKWQSDRLEKRFEIGRQIYNTIVHAELKKLRKLERTQQYQEIEQKLENAKQEETKELWKKKRQLLDQNGLSENHFKADMKYYYPHFKDNIASSVAVHGIASQAWTAFEKVLLSKDGKMVHFKKKGELSSLRGYSQAGKSGGIEIIFRGSYVEWKGLKLPLQLSPNNEYETEMLSKRVKYVRILRKDGKTKTHWYAQLALEGKPAVKRDSISGAPKHPVGHGVVGIDIGTRTLAYSTDSEVNLLELADRVQNIEQEKRRLQRKMDRSRRAMNPGNYKPDGSIKQGVKLTWNNSKRYKRIQHQYAMIQHHQADIRKQQHNELANYLLTLGDCFFVENMSYCDLAHRANKTEISEKTGRYKRKKRFGKSIANKAPAMLITMLKQKCQSRGLEGVKEVDTHVCASQYNHQTDTWIKKALENRWNIMPDGERIQRDLYSAFLLQHCRRDLPEYNRKELQKEFGEELYRVFDREALQRDYPQFVAYHHMTIQRLSELPHTIPSMGIRRIIS

SEQ ID NO: 2111 - protein, 538 aa, Unknown
  Description of Unknown: uncultivated organism sequence
  Category: MG81 effectors
  Description: MG81-389 effector
MDNEEKEKDGATCCLTLPLKLEKWQSDHLEKRFEIARQLYNTLVHAELKKKCQVERMPEYQEIMKMIDAASNQKEKWALEKKRKAFLEENGFSRNAFKADMEKYYKHFNDNIGANVALHGITAQVWIAFDKVFVDNYKQKGKVHFKKPGELCSVQGYSQKKSGGKEIMFREDRIIWNQQGNRDRKKVKREFLLKLSPDNPYEAEMLKRHVKFVRILRKDGKTKPHWYAQLVLEGKPAVKRDPASGAPKHPIGHGVVGIDIGTRTLAYSTDKEVNLLELADHVQNIEQEKRRLQRKMDRSRRATNPENYNPDGTFKRGVKLTRNKSKRYRRIQHQLAMIQHHQADIRKQQHNELANYLLTLGDCFFVENMSYCDLAHRANKTEISEKKGRYKRKKRFGKSIANKAPAMLITMLKQKCQSRGLEGVKEVDTHVCASQYNHQTDTCIKKALENRWNIMPDGERIQRDLYSAFLLQHCRRDLPEYNRKELQKEFGEELYRVFDREALQRDYPQFVAYHHMTIQRLSELPHTIPSMGIRRIIS

SEQ ID NO: 2112 - protein, 463 aa, Unknown
  Description of Unknown: uncultivated organism sequence
  Category: MG81 effectors
  Description: MG81-390 effector
MNNEEKEKDGATCCLTLPLKLEKWQSDHLEKRFEIARQLYNTLVHAELKRIHRIERMPEYREIERQIEATTDKKEKWALKNQKKQFLRKNGINRNTFTTDMKRLYKHFNDNIGSNVAQHGIVSQVLTAFEKVYIENQSGEVHFKKPGDLRSVQGYSQKKSGGVEIMFREGKIIWNQQGNNDRKGVAREFPLKLSPDNSYEAEMLKKHVKFVRILRKDGKTKPHWYAQLVLEGKPAIKRDPASGAPKHPIGHGVVGIDIGTRTLAYSADSKVDLIELADRVQNIEQEKLLLQRKLDRSRRATNPENYKPDGTIKKGVKLTWNNSKRYKRIQHQYAMIQHHQADIRKQQHNELANYLLTLGDCFFVEDMDYRALTRKAKKTEISEKTGRYKRKKRFGKSIANKAPSMLITLLDQKCKSLNLEGVKKVDTAVKASQYNHQTDECKAKELKERWNIMPDGERIQRDL

SEQ ID NO: 2113 - protein, 388 aa, Unknown
  Description of Unknown: uncultivated organism sequence
  Category: MG81 effectors
  Description: MG81-391 effector
MVHFKKKGELSSLRGYSQAGKSGGIEIIFRGSYVEWKGLKLPLKLSSNNDYETEMLSKRVKYVRILRQDGKTKPHWYAQLVLEGKPAVKRDPISGAPKHPIGHGAVGIDIGTRTLAYSADSKVDLIELADRVQNIEQEKLLLQRKLDRSRRATNPENYKPDGTIKKGVKLTRNKSKRYRKIQHQLAMLQHRQANIRKRQHNELANYLLTLGDCFFVEDMDYRALTRKAKKTEISEKTGRYKRKKRFGKSIANKAPSMLIALLDQKCKSLNLEGVKKVDTAVKASQYNHQTDECKAKELKERWNIMPDGERIQRDLYSAFLLQHCKRGLPEYNRKKLQEAFGNELYRVFDREALQRDYPKFVEYHRETIQRLSALPKTIASMGIRRIIS

SEQ ID NO: 2114 - protein, 508 aa, Unknown
  Description of Unknown: uncultivated organism sequence
  Category: MG81 effectors
  Description: MG81-392 effector
MADKECCVLTLPLQTEIWQEHIIEKRFAIMEHLKNQLIAKELRRLKNLERTKEYRNLIDEINNTPKEKRKALFSKRRKLLKDSGFSEYDFKDDIAGKNSLMQKHFIEHIATQIAHKLASDVWRSFDKFLFGNGRFIHFSKRGSLRSVASQKNGNGMTYKNGYFIWSGGQSKNKIILKIKVTPPKNEYEKEMLSKKIKYLRIVKKWVKTRYKYYLQFALEGKPVKKDRIVNKGNVGIDIGTQTVAISSADSVKILELADKIDKNHTKKKILQRKMDRSRRYTNPQNYNEDGTIKKPPKGQRFSWYKSKKYIQLAGKVRELERKNADIRKYQHTCLANWILSLGDTVYVEQMNFSGLQRRAKETKIDKNGKYAKKKRYGKSLANKAPSMFLTILESKLNQYGGQLNKINTYEFKASQYDHTDDTFTKHNRSERWHILSNGDKNQRDLYSAFLIMNSDISLKHCNREKCNETYSNFKVLQDKEIERLYSDIRKGNCKNISSFGFQRNAKAM

SEQ ID NO: 2115 - protein, 516 aa, Unknown
  Description of Unknown: uncultivated organism sequence
  Category: MG81 effectors
  Description: MG81-393 effector
MKKSNTDTCCLTLPLKLEKWQEDRLAKRFEIARQIYNTMVHAELKKLRNIENSQPYRQIQKQIEALNWKNQNDKARLKSLYNDRNKLLNTIGFSEYGFKADIKYYYKHFNDNIGSSVAVHGIAPQVWAAFEKMLFHKEGKKVHYKKKDDIHSLHGYSVTGKSGGVEIIFRKTYIEWKGLKLPLKRSPDNAYETEMLDRRVKYVRLLRKPGKRKDCWYAQLSLKGKPAIKRDPESGKRRHSIGRGAVGLDIGPQTLAYSACGAADLVELADQVQNIEQMKRRLQRKLDRSRRATNPDNYADNGTIRRGVKLTHNKSNRYRRTQRELRYLQHCQAEIRKRQHIELANHLLALGDCFYVEDMAWPSLTHRAKETAISEKTGRIKRKKRFGKSVANKAPATLIGILEQKCNSLGLPGVVKVPTSLRASQYNHQSGEYTSKPLSQRWNNMPDGERIQRDLYSAFLLQHYDPKAGNFDSVLLQQDYPQFVQYHHRAIQRLSTVPKHSPAWEFKEVFDSAKII

SEQ ID NO: 2116 - protein, 508 aa, Unknown
  Description of Unknown: uncultivated organism sequence
  Category: MG81 effectors
  Description: MG81-394 effector
MADKECCVLTLPLQTEIWQEHIIEKRFAIMEHLKNQLIAKELRRLKNLERTKEYRNLIDEINNTPKEKRKALFSKRRKLLKDSGFNRNKFKDDMAVMQKHFEEHIATQIAQEAASDVWRSFDKYLFNNGKYIHFTRKGSLSSINCQKINNGMKYIDGYFIWTCGICSGKRDRRIILKIKVTPPKNEYEKEMLSKKIKYLRIVKKWVKTRYKYYLQFALEGKPVKKDRIVNKGNVGIDIGTQTVAISSADSVKILELADKIDKNHTKKKILQRKMDRSRRYTNPQNYNEDGTIKKPPKGQRFSWYKSKKYIQLAGKVRELERKNADIRKYQHTCLANWILSLGDTVYVEQMNFSGLQRRAKETKIDKNGKYAKKKRYGKSLANKAPSMFLTILESKLNQYGGQLNKINTYEFKASQYDHTDDTFTKHNRSERWHILSNGDKNQRDLYSAFLIMNSDISLKHCNREKCNETYSNFKVLQDKEIERLYSDIRKGNCKNISSFGFQRNAKAM

SEQ ID NO: 2117 - protein, 524 aa, Unknown
  Description of Unknown: uncultivated organism sequence
  Category: MG81 effectors
  Description: MG81-395 effector
MAKNNNTDTCVLTLPLRVEKWQEDCLLKRFEAARRIYNSLLNFELKKLRQLERTVEYRQIQSVISSAYRSNTKDSPECKDAFKRREKLISANGISEYGFKSDVKFFYKHFDGLIGSSVAVHCIAVQLWAAFDKYLRGSGKEIHFKRLGEISSLKGYSVKGKSGGLEIIFRGQYVEWTRKKKKLLLPLKIDPDNEYEREMLSRRVKYVRIIKKPGKNRLRWYAQLTLEGKPALKYSAETGKPIHSVGKGDVGIDIGPQTVAYASDKEVALLELADRVTNIEHQKKKLQRKLDRSRRATNPDNYKPDGTIKRGVKLTRNKSKRYLKLQSKLAYIQHRQAEIRKLQHTCLANHMLTLGDRFFVEKMNWPGLAHRAKETSISEKTGRYKRKKRFGKSLANKAPAMFISILKRKCETLGLPGVVEVDTFRLKASQYNHLSDTYEKKSLSERWNYMPISDGSDSSKTKRIQRDLYSAFLLQHTIPQPCSFDKEALREDYPNFVTMHDAEIHRLEYLPKTITSMGVRRSHS

SEQ ID NO: 2118 - protein, 511 aa, Unknown
  Description of Unknown: uncultivated organism sequence
  Category: MG81 effectors
  Description: MG81-396 effector
MSKRNTTDTCCLTLPLKLEKWQEDRLSKRFEIARQIYNTLVHAELKKLRQVEQSAEYRQIQVQLREMYQNNTTKTKEFRDIANHRRKLLDAAGFREYDFKSAIKDYYKYFKENIGSNVAIHGIAPLVWTAFENKLYKNGKKVHYKRPGDIYSLRGYSVTGKSGGSEIMFRGTYVEWKGLKLPIKRLPDNDYETAMLEYRVKYVRILRKPGKHKNYWYAQLSLEGKPVIKMNPVSNEPVHPIGSGAVGIDIGPQTIAYASQSEAGLLELASQVQNIERQKGLLQRKMERSRRDMNPENYMPDGTFRRGVKLTKNKSKHYCKLQRELAYLQHRQAETRKRQHIELANHLLSLGDCFYVEDMKWLSLTHRAKETEISEKTGRIKRKKRFGKSIANKAPATLIGILDTKCKSLGIPGVVKVPTIIKASQYNHQSDTYEKKPLGQRWNDMPSGERIQRDLYSAFLLQHLEPDLTGYNKKMLAQDYPQFVEYHNHVINDLSMKPKTLASMGIRRRVS

SEQ ID NO: 2119 - protein, 1355 aa, Unknown
  Description of Unknown: uncultivated organism sequence
  Category: MG81 effectors
  Description: MG81-397 effector
MKISKIKNSRPGISVAENKNEEPLSRQSLLYYAPVKDGKIRLESKDLEQHVTECNEKAQKLYNVITPEINFYRDENRQKMVENLAKNFNAVINNALRSIRNPKEKKEQRVEKEVAFILNLSKKSIKMKKDVFVKSTDLIVKFPENNKYNKKNDKGTGSKEADIQRIISDLVLRKLKKTLRKEVKLENGYRMQMTEITISLMSAICLYGNAESFDPAILKAFFEKVDSDYTKYKYVEQIVKSIESQSAKLKVIEKDGRHLLISANADHRKKKYVFEFMRMYAAADEKEKRELTEHIQDLIGLYLCGKAGYENAENRFSDMIESHNCICGKIEEILNELEKPENLSQQKKENLKNTTVKVMALKYRAAVNYLADEVGKTVLGEIREKKVRSCADLYWIEYIDSTVEKLLLKSRNKKRYRYEIGFLSKHIWKEWTQYISGKYIEIGKGVYHFAIPDLSGALEGESVSICEVKPEYRNGVSGFDYERIRAEESLEREMEKYVLFAVNNFARAVTPEEEREKSGHEDVLLMKTLSEIEESQTKEERQKKHDNNVKNAITLYADADRRILQFFGGQSRFREKEDSLINLYSGEDLYKEIRKELYAIRNITFHYTTKAEKDQTQKHDLAEYLFEEEFSDITELFREKYYANNVWKYYDAEVINTIMENIYCGRKYRAAQVPAFKNIISRPELPQVMNGFVKGNSLRRLMNCPDRDVINKYWSALFFVLKELYYYDFLQEQKKPEDNVKERFFRAIKKLSGQEKDDEKQKAWESFGNRIDQIGRDRSFGAICQGLMIEYMLQNSDISMVQTETDNGKANNKKQIYKHYRTLLYNCISEAFIEYLREKWKELRTPVLTAKEWSKEEFCRVDGLKHLSLFDHLKETFNDAESGSSWYMAAHFINQKYLNHLLGSIRNYLQFTEDIEDRAISLGDCVDNKREEKNLRYRNTLEILEFVAQFCERTTNVMEDYFESNQEYAEYLSDFVDYNTTKKETDIEKALYSFCKQKFKVDGKEYMAGIYYDGENLIPNRNIIRANMYGNTSCLKPCMDRITLKEIRTMYADQNKLDLVLKEGVCHTEEEQKAYREYQNEKNRIELFDVCTYTQILNDMQARLIGWSYMRERDLMYYQLGYYYTKLFWTDSISEEDARRRLVGNLVNVEDGAILYQILAFNSYNLPIIANKNNTVTLLKDEGSIGGKAITAFFKNYENAEMIYKEALDLFENMDEHAAIINTRNYIEHFKYFIKSDRSMMDLYSEIYDRFFRHDHNRKKNVPDSLKNVLADNFMIVDIDMELGSKKVGEKKKGFREHKAARIEFTDSGIRSTDMTYTIKPDIKDNKKVLVPARSEVFLKQFRKILEYRIQDKTQ

SEQ ID NO: 2120 - protein, 529 aa, Unknown
  Description of Unknown: uncultivated organism sequence
  Category: MG81 effectors
  Description: MG81-398 effector
MILLANNNNNNTDTCVLTLPLRVEKWQEDCLLKRFEAARRIYNSLLNFELKKLRQLERTVEYRQIQSVISSAYRSNTKDSPECKDAFKRREKLISANGISEYGFKSDVKFFYKHFDGLIGSSVAVHCIAVQLWAAFDKYLSGSGKEIHFKRLGDISSLKGYSVKGKSGGREIIFRGQYIEWTRKKKKLLLPLKIDPDNEYEREMLSRRVKYVRIIKKPGKNRLRWYAQLTLEGKPALKYSAGTGKPIHSVGKGDVGIDIGPQTVAYASDKEVALLELADRVTNIEHQKKKLQRKLDRSRRATNPDNYKPDGTIKRGVKLTRNKSKRYLKLQSKLAYIQHRQAEIRKLQHTCLANHMLTLGDRFFVEKMNWPGLAHRAKETSISEKTGRYKRKKRFGKSLANKAPAMFISILKRKCETLGLPGVVEVDTYSLKASQYNHLSDTYEKKSLSERWNYMPISDGSDSSKTKRIQRDLYSAFLLQHTIPQPCSFDKEALRIDYPNFVTMHDAEIHRLESLPKTVTSMGVRRSHS

SEQ ID NO: 2121 - protein, 508 aa, Unknown
  Description of Unknown: uncultivated organism sequence
  Category: MG81 effectors
  Description: MG81-399 effector
MADKECCVLTLPLQTEIWQEHIIEKRFAIMEHLKNQLIAKELRRLKNLERTKEYRNLIDEINNTPKEKRKALFSKRRKLLKDSGFSEYDFKDDIAGKNSLMQKHFIEHIATQIAHKLASDVWRSFDKFLFGNGRFIHFSKRGSLRSVASQKNGNGMTYKNGYFIWNGGQSKNKIILKIKVTPPKNEYEKEMLSKKIKYLRIVKKWVKTRYKYYLQFALEGKPVKKDRIVNKGNVGIDIGTQTVAISSADSVKILELADKIDKNHTKKKILQRKMDRSRRYTNPQNYNEDGTIKKPPKGQRFSWYKSKKYIQLAGKVRELERKNADIRKYQHTCLANWILSLGDTVYVEQMNFSGLQRRAKETKIDKNGKYAKKKRYGKSLANKAPSMFLTILGSKLNQYGGQLNKINTYEFKASQYDHTDDTFTKHNRSERWHILSNGDKNQRDLYSAFLIMNSDISLKHCNREKCNETYSNFKVLQDKEIERLYSDIRKGNCKNISSFGFQRNAKAM

SEQ ID NO: 2122 - protein, 511 aa, Unknown
  Description of Unknown: uncultivated organism sequence
  Category: MG81 effectors
  Description: MG81-400 effector
MGKSSTDTCCLTLPLKLEKWQEDRLAKRFEIARQIYNTMVRAELKKLDRVKQLPEYRKNQKEIQALDWKNSADKQRLKELYGNQRKILQKQGFTEYGFKADSKDYYKHFIENIGSSVATHGIAPQVWNAFDKMLFQKDGKVVHFKRYGDVHSLKGGSVAHKSGGAEIMFRKTYIEWKGLKLPLKLSPDNAYEAEMLSYHVKYVRILRTRGKTKDRWYAQLSLEGKPAVKYDSNTGKPVHPVGKGAVGLDIGPQTLAYVAANEANLVELADQVQNIEQEKRRLQRKLDRSRRATNPDNYNENGTIRRGVKLTHNKSKRYCKLQKELSWIQHCQAETRKRQHIALANHLLSLGDCFYVEPMAWPSLTHRAKKTEVSEETGRIKRKKRFGKSVANKAPASLIGILKLKCISLGLTGVVEVPMLLRASQYNHQSKDYAKKSLSQRWNDMPDGNRIQRDLYSAFLLQHYDSQSESFDQETLERDYPQFVRLHNQTIQRLSALPKTPSSMGIRRSVS

SEQ ID NO: 2123 - protein, 522 aa, Unknown
  Description of Unknown: uncultivated organism sequence
  Category: MG81 effectors
  Description: MG81-401 effector
MKRSSTDTCCLTLPLKLEKWQSDRLEKRFEIGRQIYNTIVHAELKKLRKLERTQQYQEIEQKLENAKQEETKELWKKKRQLLDQNGLSENHFKADMKYYYPHFKDNIASSVAVHGIASQAWTAFEKVLLSKDGKMVHFKKKGELSSLRGYSQAGKSGGIEIIFRGSYVEWKGLKLPLQLSPNNEYETEMLSKRVKYVRILRKDGKTKTHWYAQLALEGKPAVKRDSISGAPKHPVGHGVVGIDIGTRTLAYSTDSEVNLLELADRVQNIEQEKRRLQRKMDRSRRAMNPGNYKPDGSIKQGVKLTWNNSKRYKRIQHQYAMIQHHQADIRKQQHNELANYLLTLGDCFFVENMSYCDLAHRANKTEISEKTGRYKRKKRFGKSIANKAPAMLITMLKQKCQSRGLEGVKEVDTHVCASQYNHQTDTCIKKALENRWNVMPDGERIQRDLYSAFLLQHCRRDLPEYNRKELQKEFGEELYRVFDREALQRDYPRFVAYHHMTIQRLSELPHTIPSMGIRRIIS

SEQ ID NO: 2124 - protein, 546 aa, Unknown
  Description of Unknown: uncultivated organism sequence
  Category: MG81 effectors
  Description: MG81-402 effector
MGWKSTGRGGKRVKRSSTDTCCLTLPLKLEKWQSDHLEKRFEIARQLYNTLVHAELKKKCQVERMPEYQEIMKMIDAASNQKEKWALEKKRKAFLEENGFSRNAFKADMEKYYKHFNDNIGANVALHGITAQVWIAFDKVFVDNYKQKGKVHFKKPGELCSVQGYSQKKSGGKEIMFREDRIIWNQQGNRDRKKVKREFLLKLSPDNPYEAEMLKRHVKFVRILRKDGKTKPHWYAQLVLEGKPAVKRDPASGAPKHPIGHGVVGIDIGTRTLAYSTDSEVNLLELADRVQNIEQEKRRLQRKMDRSRRAMNPGNYKPDGSIKQGVKLTWNNSKRYKRIQHQYAMIQHHQADIRKQQHNELANYLLTLGDCFFVENMSYCDLAHRANKTEISEKTGRYKRKKRFGKSIANKAPAMLITMLKQKCQSRGLEGVKEVDTHVCASQYNHQTDTCIKKALENRWNIMPDGERIQRDLYSAFLLQHCRRDLPEYNRKELQKEFGEELYRVFDREALQRDYPQFVAYHHMTIQRLSELPHTIASMGIRRSIS

SEQ ID NO: 2125 - protein, 566 aa, Unknown
  Description of Unknown: uncultivated organism sequence
  Category: MG81 effectors
  Description: MG81-403 effector
MGWKSKGRGGKRVDNEEKEKDGATCCLTLPLKLEKWQSDHLEKRFEIARQLYNTLVHAELKRIHRIERMPEYREIERQIEATTDKKEKWALKNQKKQFLRKNGINRNTFTTDMKRFYKHFNDNIGSNVAQHGIVSQVLTAFEKVYIENQSGEVHFKKPGDLRSVQGYSQKESGGKEIMFRNGKIIWTQQENDDRKKSPKYQQRKKRQNYKGVKGIAREFPVVFSKNNPYEAEMLTKHVKFVRILRKDGKTKPHWYAQLVLEGKPAVKRDPISSAPKHPVGHGVVGIDIGTRTLAYSTDKEVNLLELADRVQNIEQEKRRLQRKMDRSRRAMNPENYNSDGTFKRGVKLTRNKSKRYRRIQHQLAMIQHHQADIRKQQHNELANYLLTLGDCFFVENMSYCDLVHRANKTEISEKTGRYKRKKRFGKSIANKAPAMLITMLKQKCQSRGLKGVKEVDTHVRASQYNHQTDTCIEKALENRWNIMPDGERIQRDLYSAFLLQHCKQGLPEYNRKELKKEFGEELYRVFDREALQRDYPQFVAYHHMTIQRLSELPHTIPSMGIRRIIS

SEQ ID NO: 2126 - protein, 534 aa, Unknown
  Description of Unknown: uncultivated organism sequence
  Category: MG81 effectors
  Description: MG81-404 effector
MGWKSKGRGGKRVKKSSTDTCCLTLPLKLEKWQSDRLEKRFEIGRQIYNTVVRAELKKLHQVERTPQYREIEQKLKEAKQEEAKELWKKRTQLLSKSGFSEYGFKSDMKYYYQHFKENIGSSVAVHGIASQVWTAFEKVLFSKDGKMVHFKKKGELSSLRGYSQAGKSGGIEIIFRGSYVEWKGLKLPLKLSSNNDYETEMLSRRVKYVRILRQDGKTKPHWYAQLVLEGKPAVKRDPISGASKHPIGHGAVGIDIGTRTLAYSADSKVDLIELADRVQNIEQEKLLLQRKLDRSRRATNPENYKPDGTIKKGVKLTRNKSKRYRKIQHQLAMLQHRQANIRKRQHNELANYLLTLGDCFFVEDMDYRALTRKAKKTEISEKTGRYKRKKRFGKSIANKAPSMLIALLDQKCKSLNLEGVKKVDTAVKASQYNHQTDECKAKELKERWNIMPDGERIQRDLYSAFLLQHCKRGLPEYNRKKLQEAFGNELYRVFDREALQRDYPKFVEYHRETIQRLSALPKTIASMGIRRIIS

SEQ ID NO: 2127 - protein, 511 aa, Unknown
  Description of Unknown: uncultivated organism sequence
  Category: MG81 effectors
  Description: MG81-405 effector
MKKSNTDTCCLTLPLKLEKWQEDRLAKRFEIARQIYNTMVHAELKKLRNVENSQPYRQIQKQIEALNWKNQNDKARLKSLYNDRNKLLNTIGFSEYGFKADIKYYYKHFNDNIGSSVAVHGIAPQVWAAFEKMLFHKEGKKVHYKKKDDIHSLHGYSVTGKSGGVEIIFRKTYIEWKGLKLPLKRSPNNAYETEMLGRRVKYVRLLRKPGKRKDCWYAQLSLEGKPAIKRDPESGKRRHSIGRGAVGLDIGPQTLAYSACGAADLVELADQVQNIEQMKRRLQRKLDRSRRATNPDNYADNGTIRRGVKLTHNKSNRYRRTQRELRYLQHCQAEIRKRQHIELANHLLALGDCFYVEDMAWPSLTHRAKETAISEKTGRIKRKKRFGKSVANKAPATLIGILEQKCNSLGLPGVMKVPTSLRASQYNHQSGEYTSKPLSQRWNNMPDGERIQRDLYSAFLLQHYDPKAGNFDSALLQQDYPQFVQYHHRAIQRLSTVPKTLSSMGIQRSLR

SEQ ID NO: 2128 - protein, 538 aa, Unknown
  Description of Unknown: uncultivated organism sequence
  Category: MG81 effectors
  Description: MG81-406 effector
MNNEEKEKEGATCCLTLPLKLEKWQSDHLEKRFEIARQLYNTLVHAELKKKCQVERMPEYQEIMKMIDTASNQKEKWALEKKRKAFLEENGFSRNAFKADMEKYYKHFNDNIGANVALHGITAQVWIAFDKVFVDNYKQKGKVHFKKPGELCSVQGYSQKKSGGKEIMFREDRIIWNQQGNRDRKKVKREFLLKLSPDNPYEAEMLKRHVKFVRILRKDGKTKPHWYAQLVLEGKPAVKRDPASGAPKHPIGHGVVGIDIGTRTLAYSTDKEVNLLELADRVQNIEQEKRRLQRKMDRSRRAMNPENYNSDGTFKRGVKLTRNKSKRYRRIQHQLAMIQHHQADIRKQQHNELANYLLTLGDCFFVENMSYCDLVHRANKTEISEKTGRYKRKKRFGKSIANKAPAMLITMLKQKCQSRGLEGVKEVDTHVRASQYNHQTDTCIEKALENRWNVMPDGERIQRDLYSAFLLQHCKQGLPEYNRKELKKEFGEELYRVFDREALQRDYPQFVAYHHMTIQRLSELPHTIASMGIRRSIS

SEQ ID NO: 2129 - protein, 336 aa, Unknown
  Description of Unknown: uncultivated organism sequence
  Category: MG81 effectors
  Description: MG81-407 effector
MAKCSTDTCCLTLPLRLEKWQEDRLAKRFEIARQIYNTMVRAELKKLRAMEQSEPYKANQEKIQALDWKTQTDKQALKALYKERDKLLRDGGFSEYGFKSDIKNYYKHFNNNIGSNVAFHGIAPQVWAAFEKMLFKKEGKKVHFKKKGDIHSLRGYSAAGKSGGVEIIFRETYIEWKGLKLPLKLSPDNIYETQMLSYRVKYVRLLRKPGKRKDRWYAQLSLEGKPVIKYNPKTGEVRHPIGKGAVGLDIGPQTLAYSAATGADLVELANQVQNVEQEKRRLQRKLDRSRRATNPGNYADDGTIRRGIALTHNKSKRYLRTQQELKYLQHQPASAS

SEQ ID NO: 2130 - protein, 522 aa, Unknown
  Description of Unknown: uncultivated organism sequence
  Category: MG81 effectors
  Description: MG81-408 effector
MKKSSTDTCCLTLPLKLEKWQSDRLEKRFEIGRQIYNTVVRAELKKLHQLERTPQYREIEQKLKEAKQEEAKELWKKRTQLLSQSGFSEYGFKSDMKYYYQHFKENIGSSVAVHGIASQVWTAFEKVLFSKDGKMVHFKKKGELSSLRGYSQAGKSGGVEIIFRGSYVEWKGLKLPLKLSPNNDYETEMLSKRVKYVRILRQEGKTKPHWYAQLVLEGKPAIKRDPASGAPKHPVGHGVVGLDIGTRTLAYSADDKVDLLELADRVQNIEQEKMLLQRKLDRSRRATNPENYKPDGTIKKGVKLTRNKSKRYRKIQHQLAMLQHRQADIRKRQHNELANYLLTLGDCFFVEDMDYRALTRKAKKTEISEKTGRYKRKKRFGKSIANKAPSMLIALLDQKCKSLNLEGVKKVDTAVKASQYNHQTDECKAKELKERWNIMPDGERIQRDLYSAFLLQHCKRGLPEYNRKELQKEFGEELYRVFDREALQRDYPQFVVYHHMTIQRLSALPKTIASMGIRRIIS

SEQ ID NO: 2131 - protein, 538 aa, Unknown
  Description of Unknown: uncultivated organism sequence
  Category: MG81 effectors
  Description: MG81-409 effector
MDNEGKEKDGATCCLTLPLKLEKWQSDHLEKRFEIARQLYNTLVHAELKKKCQVERMPEYQEIMKMIDAASNQKEKWALEKKRKAFLEENGFSRNAFKADMEKYYKHFNDNIGANVALHGITAQVWIAFDKVFVDNYKQKGKVHFKKPGELCSVQGYSQKKSGGKEIMFREDRIIWNQQGNRDRKKVKREFLLKLSPDNPYEAEMLKRHVKFVRILRKDGKTKPHWYAQLVLEGKPAVKRDPISGAPKHPVGHGVVGIDIGTRTLAYSTDKEVNLLELADRVQNIEQEKRRLQRKMDRSRRATNPENYNSDGTFKRGVKLTRNKSKRYRRIQHQLAMIQHHQADIRKQQHNELANYLLTLGDCFFVENMSYCDLVHRANKTEISEKTGRYKRKKRFGKSIANKAPAMLITMLKQKCQSRGLEGVKEVDTHVRASQYNHQTDTCIEKALENRWNIMPDGERIQRDLYSAFLLQHCKQGLLEYNRKELKKEFGEELYRVFDREALQRDYPQFVAYHHMTIQRLSELPHTIPSMGIRRIIS

SEQ ID NO: 2132 - protein, 554 aa, Unknown
  Description of Unknown: uncultivated organism sequence
  Category: MG81 effectors
  Description: MG81-410 effector
MNNEEKEKDGATCCLTLPLKLEKWQSDHLEKRFEIARQLYNTLVHAELKRIHRIERMPEYREIERLIEATTDKKEKWALKNQKKQFLRKNGINRNTFTTDMKRLYKHFNDNIGSNVAQHGIVSQVLTAFEKVYIENQSGEVHFKKPGDLRSVQGYSQKKSGGKEIMFRNGKIIWTQQENDDRKKSPKYQQRKKRQNYKGVKGIAREFPVVFSKNNPYEAEMLTKHVKFVRILRKDGKTKPHWYAQLVLEGTPVAKYDPISGAPKHPVGHGAVGIDIGTRTLAYSADSKVDLIELADRVQNIEQEKLLLQRKLDRSRRATNPGNYNPDGTIKCGVKLTRNKSKRYRKIQHQLAMLQHRQADIRKRQHNELANYLLTLGDCFFVEDMDYRALTRKAKKTEISEKTGRYKRKKRFGKSIANKAPSMLIALLDQKCKSLNLEGVKKVDTAVKASQYNHQTDECKAKELKERWNIMPDGERIQRDLYSAFLLQHCKRGLPEYNRKKLQETFGNELYRVFDREALQRDYPKFVEYHRKTIQRLSALPKTIASMGIRRIIS

SEQ ID NO: 2133 - protein, 522 aa, Unknown
  Description of Unknown: uncultivated organism sequence
  Category: MG81 effectors
  Description: MG81-411 effector
MKRSSTDTCCLTLPLKLEKWQSDRLEKRFEIGRQIYNTVVRAELKKLQQVERTPQYREIEQKLKGAKQEEAKELWKKRTQLLSKSGFSEYGFKSDMKYYYQHFKENIGSSVAVHGIASQVWTAFEKVLFSKDGKMVHFKKKGELSSLRGYSQAGKSGGVEIIFRGSYVEWKGLKLPLKLSPDNDYETEMLSKRVKYVRILRQDGKTKPHWYAQLVLEGKPAIKRDPASGAPKHPVGHGVVGIDIGTRTLAYSADSKVDLIELADRVQNIEQEKLLLQRKLDRSRRATNPENYKPDGTIKKGVKLTWNNSKRYKRIQHQYAMIQHHQADIRKQQHNELANYLLTLGDCFFVEDMDYRALTRKAKKTEISEKTGRYKRKKRFGKSIANKAPSMLIALLDQKCKSLNLEGVKKVDTAVKASQYNHQTDECKAKELKERWNIMPDGERIQRDLYSAFLLQHCRRDLPEYNRKKLQETFGNELYRIFDREALQRDYPKFVEYHRETIQRLSALPKTIASMGIRRSIS

SEQ ID NO: 2134 - protein, 511 aa, Unknown
  Description of Unknown: uncultivated organism sequence
  Category: MG81 effectors
  Description: MG81-412 effector
MGKSKTETCCLTLPLKLEKWQEDRLAKRFEIARQIYNTLVHAELKKLNQIERSSEYQTIQDQITNLDRNDPERIKELPSLYKKRTKLLRDAGFTEYGFKSDVKHYYKYFHKNIGSSVAVHGIAPQVWAAFEKKLFKKQGKIVHYKRKGTLRSVKGGSATGKSGGTEIIFRGTYIQWKDLNLPLKRSPDNAYESEMLGYRVKYVRILRKPGKSKNRWYAQLVLEGKPVIKRNPMTGAALHPVGHGAVGLDIGPQTLAYSAADGVGLLELADQVQNIERQKALLQRKLDRSRRASNPDNYNEDGTIKRGVKLTRNQSKRYCKTQRDLAYLQHCQAETRKRQHIALANHLLTLGDRFYVEQMSWVALARRSKKTEVSEKTGKIKRKKRFGKSIANKAPAMLIEILRQKCISLGLPGVVDVPTSIKASQYNHQSKDYIKKNLSERWNDMPDGEKIQRDLYSAFLLQHCTPELNAFDQESLQQDYPRFVQYHHQVMQQLSEMPKTPSSMGIRRRTS

SEQ ID NO: 2135 - protein, 534 aa, Unknown
  Description of Unknown: uncultivated organism sequence
  Category: MG81 effectors
  Description: MG81-413 effector
MGWKSKGRGGTLVKKSSTDTCCLTLPLKLEKWQSDRLEKRFEIGRQIYNTVVRAELKKLQQVERTPQYREIEQKLKEAKQEEAKELWKTRTQLLSKSGFSEYGFKSDMKYYYQHFKENIGSSVAVHGIASQVWTAFEKVLFSKDGKMVHFKKKGELSSLRGYSQAGKSGGIEIIFRGSYVEWKGLKLPLKLSPDNDYETEMLSKRVKYVRILRKEGKTKPHWYAQLVLEGKPAIKRDPASGAPKHPVGHGVVGIDIGTRTLAYSADSKVDLIELADRVQNIEQEKMLLQRKLDRSRRATNPENYKPDGTIKKGVKLTRNKSKRYRKIQHQLAMLQHRQADIRKRQHNELANYLLTLGDCFFVEDMDYRALTRKAKKTEISEKTGRYKRKKRFGKSIANKAPSMLIALLDQKCKSLNLEGVKKVDTAVKASQYNHQTDECKAKELKERWNIMPDGERIQRDLYSAFLLQHCRRDLPEYNRKKLQEAFGNELYRVFDREALQRDYPKFVEYHRKTIQRLSALPKTIASMGIRRSIS

SEQ ID NO: 2136 - protein, 508 aa, Unknown
  Description of Unknown: uncultivated organism sequence
  Category: MG81 effectors
  Description: MG81-414 effector
MADKECCVLTLPLQTENWQEHIIEKRFAIMEHLKNQLIAKELRRLKNLERTKEYRILIDEINNTPKEKRKALFSKRRKLLKDSGFNRNKFKDDMAVMQKHFEEHIATQIAQEAASDVWRSFDKYLFNNGKYIHFTRKGSLSSINCQKINNGMKYIDGYFIWTCGICSGKRDRRIILKIKVTPPKNEYEKEMLSKKIKYLRIVKKWVKTRYKYYLQFALEGKPVKKDRIVNKGNAGIDIGTQTVAISSADSVKLLELADKIDKNHTKKKILQRKMDRSRRYTNPQNYNEDGTIKKPPKGQRYCWYKSKKYIQLAGKVRELERKNADIRKYQHTCLANWILSLGDTVYVEQMNFSGLQRRAKETKIDKNGKYAKKKRYGKSLANKAPSMFLTILESKLNQYGGQLNKINTYEFKASQYDHTDDTFTKHNRSERWHILSNGDKNQRDLYSAFLIMNSDISLEHCNREKCNETYSNFKVLQDKEIERLYSDIRKGNCKNISSFGFQRNAKAM

SEQ ID NO: 2137 - protein, 508 aa, Unknown
  Description of Unknown: uncultivated organism sequence
  Category: MG81 effectors
  Description: MG81-415 effector
MADKECCVLTLPLQTEIWQEHIIEKRFAIMEHLKNQLIAKELRRLKNLERTKEYRNLIDEINNTPKEKRKALFSKRRKLLKDNGFNRNKFKDDMAVMQKHFEEHIATQIAQEAASDVWRSFDKYLFNNGKYIHFTRKGSLSSINCQKINNGMKYIDGYFIWTCGICSGKRDRRIILKIKVTPPKNEYEKEMLSKKIKYLRIVKKWVKTRYKYYLQFALEGKPVKKDRIVNKGNVGIDIGTQTVAISSADSVKILELADKIDKNHTKKKILQRKMDRSRRYTNPQNYNEDGTIKKPPKGQRFSWYKSKKYIQLAGKVRELERKNADIRKYQHTCLANWILSLGDTVYVEQMNFSGLQRRAKETKIDKNGKYAKKKRYGKSLANKAPSMFLNILESKLNQYGGQLNKINTYEFKASQYDHTDDTFTKHNRSERWHILSNGDKNQRDLYSAFLIMNSDISLKHCNREKCNETYSNFKVLQDKEIERLYSDIRKGNCKNISSFGFQRNAKAM

SEQ ID NO: 2138 - protein, 511 aa, Unknown
  Description of Unknown: uncultivated organism sequence
  Category: MG81 effectors
  Description: MG81-416 effector
MLVSKRSTTDTCCLTLPLRLEKWQADRLAKRFEIARQIYNTLVRAELKKLVRLERISAYKDIQQQLYSLYRDGHQNSREYKVLFQKRRSLLTEAGIREYGFKSDIAKYYKHFHENIGSSVAVHCIASQVWCAFDKYLFHNGKQVHFKRAGDIRSLKGYSVSGKSGGTEIIYRGTFIEWKGLRLPLKLDPDNRYEAEMLTKRVKYVRLLRTRGNHQDRWYAQLVLEGTPAVKHDAKTNALRHPIGHGAVGIDIGPQTIAYVAQDEAALMELANRVQNIEREKLLIQRKMDRSRRATNPDNYAVDGTIKRGVKLTRNKSKRYCTLQHRLAFIQSRQALIRKVQHTELANHLLSLGDRFYVENMEWSSLTHRASETAISEKTGRYKRKKRFGKSISNKAPATLIGILEQKCKSLGLPGVIKVPTKLCASQYNHMTDTREKKPLSQRWNDMPDGHRIQRDLYSAFLLQHVTPQEDGFDRPSLQRDYEKFVSLHDEVIRQLTLAPKTLSSMGIRRT

SEQ ID NO: 2139 - protein, 1358 aa, Unknown
  Description of Unknown: uncultivated organism sequence
  Category: MG81 effectors
  Description: MG81-417 effector
MKISKIKNSRPGISVAENKNEESLSRQSLLYYAPVKDGKIRLESKDLEQHVTECNEKAQKLYNVITPEINFYRDENRQKMVENLARNFNAVINNALRSIRNPKEKKEQRVEKEVAFILNLSKKSIKMKKDVFVKSTDLIVKFPENNKYNKKNDKGTGSKEAYIQKMISDLVLRKLKNTLRKEVKLENGYRMQMTEIIISLMSAICLYGNAESFDPAILKAFFEKVDSDYTKYKYVEQIVKSIESQSAKLKVVEKDGRHLLISANADHRKKKYVFEFMRMYAAADEKEKRELTEHIQDLIGLYLCGKAGYENAENRFSDMTESHNCICGKIEEILNELEKPENLSQKKKENLKNTTVKVMALKYRAAVNYLADEVGKTVLGEIREKKVRSCADLYWIEYIDSTVEKLLLKSRNKDGYRYEIGFLSKHIWKEWTQYISGKYIEMGKGVYHFAIPDLSGNLEGEPISICEVKPEYRNGVSGFDYERIRAEESLEREMEKYVLFAVNNFARAVTPEEEREKSGHEDVLLMKTLSEIEESQTKEERQKKHDNNVKNAITLYADADRRILQFFGGQSRFREKEDSLINLYSGEDLYKEIRKELYAIRNITFHYTTKADKDQTQKHDLAEYLFEEEFSDITELFREKYYANNVWKYYDVEVINTIMENIYCGRKYRAAQVPAFKNIISRPELPQVMNGFVKGNSLRRLMNCPDRDVINKYWSALFFVLKELYYYDFLQEQKKPEDNVKERFFRAIEKLSGQENDDKKQKAWESFGNRIDQIGRDRSFGAICQGLMIEYMLQNSDISMVQTETDNGKANNKKQIYKHYRTLLYNCIREAFIEYLREKWEELRTPVLTVKEWSKEEFCRADGLKHLSLFDHLKKTFNDAESGSSWYMAAHFINQKYLNHLLGSIRNYLQFTEDIEDRAISLGDCVDNKREEKNLRYRNTLEILEFVAQFCERTTNVMEDYFESNQEYAEYLSGFVDYNTTKKETDIEKALYSFCKQKFKVDGKEYMAGIYYDGENLIPNRNIIRANMYGNTSCLKPCMDRITLKEIRTMYADQNKLDLVLKEGVCHTEEEQKAYREYQNEKNRIELFDVCTYTQILNDMQARLIGWSYMRERDLMYYQLGYYYTKLFWTDSISEEDARRRLVGNLVNVEDGAILYQILAFNSYNLPIIANKNNTVTLLKDEGSIGGKAITAFFKNYENAEMIYEEALDLFENMDEHAAIINTRNYIEHFKYFIKSDRSMMDLYSEIYDRFFRHDHNRKKNVPDSLKNVLADNFMIVDIDMELGSKKVGEKKKGFREHKAARIEFTDSGIRSTDMTYTIKPDIKDNKKDKKVLVPARSEVFLKQFRKILEYRIQDKIQ

SEQ ID NO: 2140 - protein, 530 aa, Unknown
  Description of Unknown: uncultivated organism sequence
  Category: MG81 effectors
  Description: MG81-418 effector
MILLAKNNNNNNTDTCVLTLPLRVEKWQEDCLLKRFEAARRIYNSLLNFELKKLRQLERTVEYRQIQSVISSAYRSNTKDSPECKDAFKRREKLISANGISENGFKSDVKFFYKHFDGLIGSNVAVHCIAVQLWAAFDKYLSGSGKEIHFKRLGDISSLKGYSVKGKSGGCEIIFRGQYVEWTRKKKKLLLPLKIDPDNEYEREMLSRRVKYVRIIKKPGKNRLRWYAQLTLEGKPALKYSAGTGKPIHSVGKGNVGIDIGPQTVAYASDKEVALLELADRVTNIEHQKKKLQRKLDRSRRATNPDNYKPDGTIKRGVKLTRNKSKRYLKLQSKLAYIQHRQAEIRKLQHTCLANHMLTLGDRFFVEKMNWPGLAHRAKETSISEKTGRYKRKKRFGKSLANKAPAMFISILKRKCETLGLPGVVEVDTYSLRASQYNHLSDTYEKKSLSERWNYMPISDGSDSSKTKRIQRDLYSAFLLQHTIPQPCSFDKKALRIDYPNFVTMHDAEIHRLESLPKTITSMGVRRSHS

SEQ ID NO: 2141 - protein, 322 aa, Unknown
  Description of Unknown: uncultivated organism sequence
  Category: MG81 effectors
  Description: MG81-419 effector
MCNEINMISWQKFQRPMSGFDLGYSAKGMSKMMAIPQRSIGCICTEYATRTKQFKKRKLNWRSYKKNTGWIPFATQQMKCFSDGIFFNGQKFKLWDYKPFDEKTIKSGSFQQDARGRWYVSITVEIEASSEIPKTGKAVGIDLGLKSLVTLSDGTVYDRVNLTEMYAKKLATAQLAGNLMQVRNIHAKIKNTRKNFYHEISLAIVKNYDEIYIGNISSSKLIKTKMAKSVSDAAWYDFKFMLKYKAERAGKKFVEVNESFSTVTCSSCLERTGPSGLSALGVRSWICSHCGAAHDRDVNAAKNILRSGQCADLRVKGSSLKN

SEQ ID NO: 2142 - protein, 384 aa, Unknown
  Description of Unknown: uncultivated organism sequence
  Category: MG81 effectors
  Description: MG81-420 effector
MVHFKKKGELSSLRGYSQTGKSGGIEIIFRGSYVEWKGLKLPLKLSPDNDYETEMLSKRVKYVRILRQDGKTKPHWYAQLVLEGKPAVKRDPISGAPKHPIGRGVVGIDIGTRTLAYSADSKVDLIELADRVQNIEQEKLLLQRKLDRSRRATNPENYKPDGTIKKGVKLTRNKSKRYRRIQHQLAMIQHHQADIRKQQHNELANYLLTLGDCFFVEDMDYRALTRKAKKTEISEKTGRYKRKKRFGKSIANKAPSMLIALLDQKCKSLNLEGVKKVDTAVKASQYNHQTDECKAKELKERWNIMPDGERIQRDLYSAFLLQHCRRDLPEYNRKKLQETFGNELYRVFDREALQRDYPKFVEYHRETIQRLSALPKTIASMGIS

SEQ ID NO: 2143 - protein, 538 aa, Unknown
  Description of Unknown: uncultivated organism sequence
  Category: MG81 effectors
  Description: MG81-421 effector
MDNEEKEKDGATCCLTLPLKLEKWQSDHLEKRFEIARQLYNTLVHAELKKKCQVERMPEYQEIMKMIDAASNQKEKWALEKKRKAFLEENGFSRNAFKADMEKYYKHFNDNIGANVALHGITAQVWIAFDKVFVDNYKQKGKVHFKKPGELCSVQGYSQKKSGGKEIMFREDRIIWNQQGNRDRKKVKREFLLKLSPDNPYEAEMLKRHVKFVRILRKDGKTKPHWYAQLVLEGKPAVKRDPASGAPKHPIGHGVVGIDIGTRTLAYSTDKEVNLLELADRVQNIEQEKRRLQRKMDRSRRAMNPGNYKPDGSIKQGVKLTWNNSKRYKRIQHQYAMIQHHQADIRKQQHNELANYLLTLGDCFFVENMSYCDLAHRANKTEISEKTGRYKRKKRFGKSIANKAPAMLITMLKQKCQSRGLEGVKEVDTHVCASQYNHQTDTCIKKALENRWNIMPDGERIQRDLYSAFLLQHCRRDLPEYNRKELQKEFGEELYRVFDREALQRDYPQFVAYHHMTIQRLSELPHTIPSMGIRRIIS

SEQ ID NO: 2144 - protein, 495 aa, Unknown
  Description of Unknown: uncultivated organism sequence
  Category: MG81 effectors
  Description: MG81-422 effector
MPNTDSNRCILTLPLMTEPWQEHLIETRFDIMEHLKNSLIALELRKLKNLQRTRAYKELEKKIFEKPKEERKPLYKERSAMLRTAGFSEFDFINDMTPMQKHFADHIAAQISHRSASDVWRAFESYLFSSGREVHFQKRGTLDSVACKKAGNGMNYRNDTFEWSGGRTPNAKRLCIRVENPQTEYEKHMLEKEVKNMRIIRKWMKTRYKYYLQLTLVGDPYQKPRKIGEGRVGIDIGTRTIAIASETTVRLLELADRIDGNHKRKCELQRKMDASKRATNPDNFNSDGTIRRRSKGKKMTWHFSKHYLRMRDQVRELERKNADIRTYQHNCLANEVLTLGTDVFVEPMSYKGLQHRAKETKVDEKGRYLKKKRFGKSLANKAPSKFLMILENKLACKGKALNYVDINRFRASQFDHTNGTYRKKQLSERFATLSTGEHVQRDMYSAFLLMNSNDSLNAPDIERCGQTFERFKELHAIEVERIRQSPYRRIQSFGI

SEQ ID NO: 2145 - protein, 508 aa, Unknown
  Description of Unknown: uncultivated organism sequence
  Category: MG81 effectors
  Description: MG81-423 effector
MADKECCVLTLPLQTEIWQEHIIEKRFAIMEHLKNQLIAKELRRLKNLERTKEYRNLIDEINNTPKEKRKALFSKRRKLLKDSGFSEYDFKDDIAGKNSLMQKHFIEHIATQIAHKLASDVWRSFDKFLFGNGRFIHFSKRGSLRSVASQKNGNGMTYKNGYFIWSGGQSKNKIILKIKVTPPKNEYEKEMLSKKIKYLRIVKKWVKTRYKYYLQFALEGKPVKKDRIVNKGNVGIDIGTQTVAISSADSVKLLELADKIDKNHTKKKILQRKMDRSRRYTNPQNYNEDGTIKKPPKGQRFSWYKSKKYIQLAGKVRELERKNADIRKYQHTCLANWILSLGDTVYVEQMNFSGLQRRAKETKIDKNGKYAKKKRYGKSLANKAPSMFLTILESKLNQYGGQLNKINTYEFKASQYDHTDDTFTKHNRSERWHILSNGDKNQRDLYSAFLIMNSDISLEHCNREKCNETYSNFKVLQDKEIERLYSDIRKGNCKNISSFGFQRNAKAM

SEQ ID NO: 2146 - protein, 528 aa, Unknown
  Description of Unknown: uncultivated organism sequence
  Category: MG81 effectors
  Description: MG81-424 effector
MILLTKNNNNTDTCVLTLPLRVEKWQEDCLLKRFEAARRIYNSLLNFELKKLRQLERTVEYRQIQSVISSAYRSNTKDSPECKDAFKRREKLISANGISENGFKSDVKFFYKHFDGLIGSNVAVHCIAVQLWAAFDKYLSGSGKEIHFKRLGDISSLKGYSVKGKSGGCEIIFRGQYVEWTRKKKKLLLPLKIDPDNEYEREMLSRRVKYVRIIKKPGKNRLRWYAQLTLEGKPALKYSAETGKPIHSVGKGNVGIDIGPQTVAYASDKEVALLELADRVTNIEHQKKKLQRKLDRSRRATNPDNYKPDGTIKRGVKLTRNKSKRYLKLQSKLAYIQHRQAEIRKLQHTCLANHMLTLGDRFFVEKMNWPGLAHRAKETSISEKTGRYKRKKRFGKSLANKAPAMFISILKRKCETLGLPGVVEVDTYSLKASQYNHLSDTYEKKSLSERWNYMPISDGSDSSKTKRIQRDLYSAFLLQHTIPQPCSFDKEALRIDYPNFVTMHDAEIHRLESLPKTVTSMGVRRSHS

SEQ ID NO: 2147 - protein, 317 aa, Unknown
  Description of Unknown: uncultivated organism sequence
  Category: MG81 effectors
  Description: MG81-425 effector
MLSYRVKYVRLLRKPGKRKDRWYAQLSLEGKPVIKYNPKTGEVRHPIGKGAVGLDIGPQTLAYSAATGADLVELANQVQNVEQEKRRLQRKLDRSRRATNPGNYADDGTIRRGIALTHNKSKRYLRTQQELKYLQHQQAEIRKRQHTELANHLLSLGDCFYVEKMVWTSLTHRAKETEISEKTGKIKRKKRFGKSVANKAPATLIGILQRKSAALGIPGVIEVPTSVKASQYNHQSGTYTPKPLSQRWNNMPDGERIQRDLYSAFLLQHYDPQTNTFDANSLHQDYPQFVQYHHDAVLRLYAMPKTPSSMGIKRSLR

SEQ ID NO: 2148 - protein, 475 aa, Unknown
  Description of Unknown: uncultivated organism sequence
  Category: MG81 effectors
  Description: MG81-426 effector
MKMIDAASNQKEKWALEKKRKAFLEENGFSRNAFKADMEKYYKHFNDNIGANVALHGITAQVWIAFDKVFVDNYKQKGKVHFKKPGELCSVQGYSQKKSGGKEIMFREDRIIWNQQGNRDRKKVKREFLLKLSPDNPYEAEMLKRHVKFVRILRKDGKTKPHWYAQLVLEGKPAVKRDPASGAPKHPVGHGVVGIDIGTRTLAYSTDSEVNLLELADRVQNIEQEKRRLQRKMDRSRRAMNPGNYKPDGSIKQGVKLTWNNSKRYKRIQHQYAMIQHHQADIRKQQHNELANYLLTLGDCFFVENMSYCDLVHRANKTEISEKTGRYKRKKRFGKSIANKAPAMLITMLKQKCQSRGLKGVKEVDTHVRASQYNHQTDTCIEKALENRWNVMPDGERIQRDLYSAFLLQHCKQGLPEYNRKELKKEFGEELYRVFDREALQRDYPQFVAYHHMTIQRLSELPHTIPSMGIRRSIS

SEQ ID NO: 2149 - protein, 526 aa, Unknown
  Description of Unknown: uncultivated organism sequence
  Category: MG81 effectors
  Description: MG81-427 effector
MAKNNNNNTDTCVLTLPLRVEKWQEDCLLKRFEAARRIYNSLLNFELKKLRQLERTVEYRQIQSVISSAYRSNTKDSPECKDAFKRREKLISANGISEYGFKSDVKFFYKHFDGLIGSSVAVHCIAVQLWAAFDKYLRGSGKEIHFKRLGEISSLKGYSVKGKSGGLEIIFRGQYVEWTRKKKKLLLPLKIDPDNEYEREMLSRRVKYVRIIKKPGKNRLRWYAQLTLEGKPALKYSAETGKPIHSVGKGNVGIDIGPQTVAYASDKEVALLELADRVTNIEHQKKKLQRKLDRSRRATSPDNYKPDGTIKRGVKLTRNKSKRYLKLQSKLAYIQHRQAEIRKLQHTCLANHMLTLGDRFFVEKMNWPGLAHRAKETSISEKTGRYKRKKRFGKSLANKAPAMFISILKRKCETLGLLGVVEVDTFRLRASQYNHLSDTYEKKSLSERWNYMPISDGSDRSKTKRIQRDLYSAFLLQHTIPQSCSFDKEALRIDYPNFVTMHDAEIHRLESLPKTITSMGVRRSHS

SEQ ID NO: 2150 - protein, 386 aa, Unknown
  Description of Unknown: uncultivated organism sequence
  Category: MG81 effectors
  Description: MG81-428 effector
MALRRRSGPFKKEGKKVHFKKTGDIRSLRGYSVTGKSGGVEIIFRGSYIEWKGLNLPLKLSPDNAYETEMLSYRVKYVRILRKPGKTRDRWYAQLSLEGKPAIKRNPASGNPVHPVGQGAVGLDIGPQTLAYAAEKEANLVELADRVQNIEREKHLLQRKMDRSRRAANPDNYAENGTIRRGVKLTHNKSKRYLRLQRELCYLQHCQAETRKRQHTELANHLLSLGSCFYVEDMAWPSLTHRAKKTEISDKTGRIKRKKRFGKSIANKAPAALINILRTKCVSLGIPGVVEVPTSLKASQYNHQSKEYTPKPLSQRWNDMPDGSRIQRDLYSAFLLQHYDPQSGNFDQASLEADYPQFVQLHNQSIQRLLTVPKTPSSMGIRRSVS

SEQ ID NO: 2151 - protein, 542 aa, Unknown
  Description of Unknown: uncultivated organism sequence
  Category: MG81 effectors
  Description: MG81-429 effector
MATTDKKDKDKEKLRAYKFRLDPNQAQTIALYQAAGAARYTYNMLTAYNLEVNRLRDDYWKKRHDEGISDADIKKELNALTKEDKRYKQLKYGAFGTQYLTPEKKRHEQAEHRIENGEDPSVVWNQETERSANPWLHTANQRVLVSGLKNASDAWDNFWASRTGKRAGRLVGTPRFKKKGVSRDSFTVPAPEKMGAYGTAYLRGEPAYKQGRRKITDYRHVRLSYLGTIRTFNSTKPLVKAVAAGAKIRRYTVSRNADRWYVSFLVKFSEPIRRSATKRARAAGSVGVDLGVKYLASLSDSEAPQRFPNLKFVEGLPSLENPRWSEASSRRLHKLQRALARSQKGSNRRSRLVKQIARLHHMTALRRESNLHQLTKKLATEYTLVGFEDLNVSGMTASAKGTVENPGKNVAQKSGLNRVVLDAAFGVFRNQLEYKAVWYGSAFEKVDRYFASSQTCSECGRKAKTKLTLRDRVFDCAYCGNMMDRDLNAAVNICREAQRLFDEKLASEDGESLNGRGSRGALRGAETVEASRPPASHRRGSP

SEQ ID NO: 2152 - protein, 527 aa, Unknown
  Description of Unknown: uncultivated organism sequence
  Category: MG81 effectors
  Description: MG81-430 effector
MAKNNNNNDTDTCVLTLPLRVEKWQEDCLLKRFEAARRIYNSLLNFELKKLRQLERTVEYRQIQSVISSAYRSNTKDSPECKDAFKRREKLISANGISENGFKSDVKFFYKHFDGLIGSSVAVHCIAVQLWAAFDKYLSGSGKEIHFKRLGDISSLKGYSVKGKSGGREIIFRGQYIEWTRKKKKLLLPLKIDPDNEYEREMLSRRVKYVRIIKKPGKNRLRWYAQLTLEGKPALKYSAGTGKPIHSVGKGNVGIDIGPQTVAYASDKEVALLELADRVTNIEHQKKKLQRKLDRSRRATNPDNYKPDGTIKRGVKLTRNKSKRYLKLQSKLAYIQHRQAEIRKLQHTCLANHMLTLGDRFFVEKMNWPGLAHRAKETSISEKTGRYKRKKRFGKSLANKAPAMFISILKRKCETLGLPGVVEVDTFRLKASQYNHLSDTYEKKSLSERWNYMPISDGSDSSKTKRIQRDLYSAFLLQHTIPQPCSFDKEALRIDYPNFVTMHDAEIHRLESLPKTITSMGVRRSHS

SEQ ID NO: 2153 - protein, 527 aa, Unknown
  Description of Unknown: uncultivated organism sequence
  Category: MG81 effectors
  Description: MG81-431 effector
MKALAVYNHHIERRDSYEKSNTDTCCLTLPLKLEKWQEDRLAKRFEIARQIYNTMVHAELKKLRNIENSQPYRQIQKQIEALNWKNQNDKARLKSLYNDRNKLLNTIGFSEYGFKADIKYYYKHFNDNIGSSVAVHGIAPQVWAAFEKMLFHKEGKKVHYKKKDDIHSLHGYSVTGKSGGVEIIFRKTYIEWKGLKLPLKRSPDNAYETEMLGRRVKYVRLLRKPGKRKDCWYAQLSLEGKPAIKRDPESGKRRHSIGRGAVGLDIGPQTLAYSACGAADLVELADQVQNIEQMKRRLQRKLDRSRRATNPDNYADNGTIRRGVKLTHNKSNRYRRTQRELRYLQHCQAEIRKRQHIELANHLLALGDCFYVEDMAWPSLTHRAKETAISEKTGRIKRKKRFGKSVANKAPATLIGILEQKCNSLGLPGVVKVPTSLRASQYNHQSGEYTSKPLSQRWNNMPDGERIQRDLYSAFLLQHYDPKAGNFDSALLQQDYPQFVQYHHRAIQRLSTVPKTLSSMGIQRSLR

SEQ ID NO: 2154 - protein, 536 aa, Unknown
  Description of Unknown: uncultivated organism sequence
  Category: MG81 effectors
  Description: MG81-432 effector
MDNEEKEKDGATCCLTLPLKLEKWQSDHLEKRFEIARQLYNTLVHAELKRIHRIERMPEYREIERLIEATTDKKEKWALKNQKKQFLRKNGINRNTFTTDMKRLYKHFNDNIGSNVAQHGIVSQVLTAFEKVYIENQSGEVHFKKPGDLRSVQGYSQKKSGGVEIMFREGKIIWNQQGNNDRKGVAREFPLKLSPDNSYEAEMLKKHVKFVRILRKEGKTKSHWYAQLVLEGKPTVKRDPISGAPKHPVGHGVVGIDIGTRTLAYSTDSEVNLLELADRVQNIEQEKRRLQRKMDRSRRAMNPENYNSDGTFKRGVKLTRNKSKRYRRIQHQLAMIQHHQADIRKQQHNELANYLLTLGDCFFVENMSYCDLVHRANKTEISEKTGRYKRKKRFGKSIANKAPAMLITMLKQKCQSRGLEGVKEVDTHVRASQYNHQTDTCIEKALENRWNVMPDGERIQRDLYSAFLLQHCKQGLPEYDRKELKKEFGEELYRVFDREALQRDYPQFVAYHHMTIQRLSELPHTIPSMGIRRIIS

SEQ ID NO: 2155 - protein, 526 aa, Unknown
  Description of Unknown: uncultivated organism sequence
  Category: MG81 effectors
  Description: MG81-433 effector
MNNEEKEKDGATCCLTLPLKLEKWQSDRLEKRFEIGRQIYNTIVHAELKKLRKLERTQQYQEIEQKLENAKQEETKELWKKKRQLLDQNGLSENHFKADMKHYYPHFKDNIASSVAVHGIASQAWTAFEKVLLSKDGKMVHFKKKGELSSLRGYSQAGKSGGIEIIFRGSYVEWKGLKLPLKLSPDNDYETEMLSKRVKYVRILRKDGKTKTHWYAQLALEGKPAVKRDSISGAPKHPVGHGVVGIDIGTRTLAYSTDKEVNLLELADRVQNIEQEKRRLQRKMDRSRRAMNPGNYKPDGSIKQGVKLTWNNSKRYKRIQHQYAMIQHHQADIRKQQHNELANYLLTLGDCFFVENMSYCDLAHRANKTEISEKTGRYKRKKRFGKSIANKAPAMLITMLKQKCQSRGLEGVKEVDTHVCASQYNHQTDTCIKKALENRWNIMPDGERIQRDLYSAFLLQHCRRDLPEYNRKELQKEFGEELYRVFDREALQRDYPQFVAYHHMTIQRLSELPHTIPSMGIRRIIS

SEQ ID NO: 2156 - protein, 538 aa, Unknown
  Description of Unknown: uncultivated organism sequence
  Category: MG81 effectors
  Description: MG81-434 effector
MNNEEKEKDGATCCLTLPLKLEKWQSDHLEKRFEIARQLYNTLVHAELKKKCQVERMPEYQEIMKMIDAASNQKEKWALEKKRKAFLEENGFSRNAFKADMEKYYKHFNDNIGANVALHGITAQVWIAFDKVFVDNYKQKGKVHFKKPGELCSVQGYSQKKSGGKEIMFREDRIIWNQQGNRDRKKVKREFLLKLSPDNPYEAEMLKRHVKFVRILRKDGKTKPHWYAQLVLEGKPAVKRDPASGAPKHPIGHGVVGIDIGTRTLAYSTDKEVNLLELADRVQNIEQEKRRLQRKMDRSRRAMNPGNYKPDGSIKQGVKLTWNNSKRYKRIQHQYAMIQHHQADIRKQQHNELANYLLTLGDCFFVENMSYCDLAHRANKTEISEKTGRYKRKKRFGKSIANKAPAMLITMLKQKCQSRGLEGVKEVDTHVCASQYNHQTDTCIKKALENRWNIMPDGERIQRDLYSAFLLQHCRRDLPEYNRKELQKEFGEELYRVFDREALQRDYPQFVAYHHMTIQRLSELPHTIPSMGIRRIIS

SEQ ID NO: 2157 - protein, 548 aa, Unknown
  Description of Unknown: uncultivated organism sequence
  Category: MG81 effectors
  Description: MG81-435 effector
MEWKSTGRGGTLVDNEEKKEDGATCCLTLPLKLEKWQSDHLEKRFEIARQLYNTLVHAELKRIHRIERMPEYREIERQIEATTDKKEKWALKNQKKQFLRKNGINRNTFTTDMKRLYKHFNDNIGSNVAQHGIVSQVLTAFEKVYIENQSGEVHFKKPGDLRSVQGYSQKKSGGVEIMFREGKIIWNQQGNNDRKGVAREFPLKLSPDNSYEAEMLKKHVKFVRILRNEGKTKPHWYAQLVLEGKPAIKRDPASGAPKHPVGHGVVGIDIGTRTLAYSTDSEVNLLELADRVQNIEQEKRRLQRKMDRSRRAMNPENYNSDGTFKRGVKLTRNKSKRYRRIQHQLAMIQHHQADIRKQQHNELANYLLTLGDCFFVENMSYCDLVHRANKTEISEKTGRYKRKKRFGKSIANKAPAMLITMLKQKCQSRGLEGVKEVDTHVRASQYNHQTDTCIEKALENRWNVMPDGERIQRDLYSAFLLQHCKQGLPEYDRKELKKEFGEELYRVFDREALQRDYPQFVAYHHMTIQRLSELPHTIPSMGIRRIIS

SEQ ID NO: 2158 - protein, 341 aa, Unknown
  Description of Unknown: uncultivated organism sequence
  Category: MG81 effectors
  Description: MG81-436 effector
MLPLKIDPDNEYEREMLSRRVKYVRIIKKPGKNRLRWYAQLTLEGKPALKYSAETGKPIHSVGKGNVGIDIGPQTVAYASDKEVALLELADRVTNIEHQKKKLQRKLDRSRRATNPDNYKPDGTIKRGVKLTRNKSKRYLKLQSKLAYIQHRQAEIRKLQHTCLANHMLTLGDRFFVEKMNWPGLAHRAKETSISEKTGRYKRKKRFGKSLANKAPAMFISILKRKCETLGLPGVVEVDTYSLKASQYNHLSDTYEKKSLSERWNYMPISDGSDSSKTKRIQRDLYSAFLLQHTIPQPCSFDKEALRIDYPNFVTMHDAEIHRLESLPKTVTSMGVRRSHS

SEQ ID NO: 2159 - protein, 538 aa, Unknown
  Description of Unknown: uncultivated organism sequence
  Category: MG81 effectors
  Description: MG81-437 effector
MDNEEKKEDGATCCLTLPLKLEKWQSDHLEKRFEIARQLYNTLVHAELKKKCQVERMSEYQEIMKMIDAASNQKEKWALEKKRKAFLEENGFSRNAFKADMEKYYKHFNDNIGANVALHGITAQVWIAFDKVFVDNYKQKGKVHFKKPGELCSVQGYSQKKSGGKEIMFREDRIIWNQQGNRDRKKVKREFLLKLSPNNPYEAEMLKRHVKFVRILRKDGKTKPHWYAQLVLEGKPAVKRDPISSAPKHPVGHGVVGIDIGTRTLAYSTDKEVNLLELADRVQNIEQEKRRLQRKMDRSRRAMNPENYNSDGTFKRGVKLTRNKSKRYRRIQHQLAMIQHHQADIRKQQHNELANYLLTLGDCFFVENMSYCDLVHRANKTEISEKTGRYKRKKRFGKSIANKAPAMLITMLKQKCQSRGLEGVKEVDTHVRASQYNHQTDTCIEKALENRWNVMPDGERIQRDLYSAFLLQHCKQGLPEYNRKELKKEFGEELYRVFDREALQRDYPQFVAYHHMTIQRLSELPHTIPSMGIRRIIS

SEQ ID NO: 2160 - protein, 522 aa, Unknown
  Description of Unknown: uncultivated organism sequence
  Category: MG81 effectors
  Description: MG81-438 effector
MKRSSTDTCCLTLPLKLEKWQSDRLEKRFEIGRQIYNTIVHAELKKLRKLERMQQYQEIEQKLENAKQEETKELWKKKRQLLDQNGLSEDHFKADMKYYYPHFKDNIASNVAVHGIASQAWTAFEKVLFSKDGKMVHFKKKGELSSLRGYSRAGKSGGVEIIFRGSYVEWKGLKLPLKLSPDNDYETEMLSKRVKYVRILRKDGKTKTHWYAQLVLEGKPTVKRDPISGAPKHPVEHGVVGIDIGTRTLAYSTDSEVNLLELADRVQNIEQEKRRLQRKMDRSRRAMNPENYNSDGPFKRGVKLTRNKSKRYRRIQHQLAMIQHHQADIRKQQHNELANYLLTLGDCFFVENMSYCDLVHRANKTEISEKTGRYKRKKRFGKSIANKAPAMLITMLKQKCQSRGLKGVKEVDTHVRASQYNHQTDTCIEKALENRWNVMPDGERIQRDLYSAFLLQHCKQGLPEYNRKELKKEFGEELYRVFDREALQRDYPQFVAYHHMTIQRLSELPHTIPSMGIRRIIS

SEQ ID NO: 2161 - protein, 524 aa, Unknown
  Description of Unknown: uncultivated organism sequence
  Category: MG81 effectors
  Description: MG81-439 effector
MAKNNNTDTCVLTLPLRVEKWQEDCLLKRFEAARRIYNSLLNFELKKLRQLERTVEYRQIQSVISSAYRSNTKDSPECKDAFKRREKLISANGISEYGFKSDVKFFYKHFDGLIGSSVAVHCIAVQLWAAFDKYLRGSGKEIHFKRLGEISSLKGYSVKGKSGGLEIIFRGQYVEWTRKKKKLLLPLKIDPDNEYEREMLSRRVKYVRIIKKPGKNRLRWYAQLTLEGKPALKYSAETGKPIHSVGKGDVGIDIGPQTVAYASDKEVALLELADRVTNIEHQKKKLQRKLDRSRRATNPDNYKPDGTIKRGVKLTRNKSKRYLKLQSKLAYIQHRQAEIRKLQHTCLANHMLTLGDRFFVEKMNWPGLAHRAKETSISEKTGRYKRKKRFGKSLANKAPAMFISILKRKCETLGLPGVVEVDTFRLKASQYNHLSDTYEKKSLSERWNYMPISDGSDSSKTKRIQRDLYSAFLLQHTIPQPCSFDKEALREDYPNFVTMHDAEIHRLESLPKTITSMGVRRSHS

SEQ ID NO: 2162 - protein, 511 aa, Unknown
  Description of Unknown: uncultivated organism sequence
  Category: MG81 effectors
  Description: MG81-441 effector
MKKSNTDTCCLTLPLKLEKWQEDRLAKRFEIARQLYNTLVHAELKRLAQVKQTAEYRENERKIRTLDRNNPADRAELSELYQKQKTMLDAKFRKSYFKKHMENYYKHFRDNIGSSVAVHGIAPQVWAAFDKVLFKKGGKKVHYKKPGEVNSVQGYSRTGKSGGREIMFRGAYIEWKGLKLPLKLSPDNAYETDMLQRRVKLVRLVRRPGKRRDRWYAQLVLEGKPAIKADPVTGKAVHPIGSGPIGLDIGPQTLAYSAAGAAGLVELADRVQNIEQEKRRLQRKMDRSRRATNPDNYAEDGTIRRGVKLTHYKSKRYRRRQQELKYLQHRQAEIRKLQHIQLANHLLSLGDHFYVEKMEWSSLTHRAKETVISEKTGKPRSKRRFGKSIANKAPAMLIEILRQKCKSLGLSDVVEITPADIKASQYNHLTGKYVKKSLSRRWNDMQDGEHLQRDLYSAFLLQHYDSCSKTLDLDSLARDYPAFVQYHHREIERLHALPKTPSSMGIRRSIA

SEQ ID NO: 2163 - protein, 508 aa, Unknown
  Description of Unknown: uncultivated organism sequence
  Category: MG81 effectors
  Description: MG81-442 effector
MADKECCVLTLPLQTEIWQEHIIEKRFAIMEHLKNQLIAKELRRLKNLERTKEYRNLIDEINNTPKEKRKALFSKRRKLLKDNGFNRNKFKDDMAVMQKHFEEHIATQIAQEAASDVWRSFDKYLFNNGKYIHFTRKGSLSSINCQKINNGMKYIDGYFIWTCGICSGKRDRRIILKIKVTPPKNEYEKEMLSKKIKYLRIVKKWVKTRYKYYLQFALEGKPVKKDRIVNKCNVGIDIGTQTVAISSADSVKILELADKIDKNHTKKKILQRKMDRSRRYTNPQNYNEDGTIKKPPKGQRFSWYKSKKYIQLAGKVRELERKNADIRKYQHTCLANWILSLGDTVYVEQMNFSGLQRRAKETKIDKNGKYAKKKRYGKSLANKAPSMFLTILESKLNQYGGQLNKINTYEFKASQYDHTDDTFTKHNRSERWHILSNGDKNQRDLYSAFLIMNSDISLKHCNREKCNETYSNFKVLQDKEIERLYSDIRKGNCKNISSFGFQRNAKAM

SEQ ID NO: 2164 - protein, 578 aa, Unknown
  Description of Unknown: uncultivated organism sequence
  Category: MG81 effectors
  Description: MG81-443 effector
MAFGSKNSTPSFVLTLPMVIGLNEQDYLNKEFKKCGIIYNQLVNATTKMWHQLRKTRKYRELMAAIAKAAPDSDEQKALFKQREKMLKEYRFSEDAFHAMVVPYAKHYAINSHVAQSIATAVWTAWSSFFFDKGKGVHYKKLEYVSSISGKNNATGIMLRPANHTTSVINSAKTKAKNSIEKKYFAAYRKPDAKEGEEVVLPDEVKAQMEKEIAAATAKVKTSIGKGKLHITYGDYTFPVTLRNPDTQTGWYQQEALKCGVKYCRIIRKWVSTKWKYYAQIVLEGYPPIKCDNNGVAKHPVKQGRVGIDIGTQTIAFSGKDVCDLRVLAPAARAQAKSLVNEIASTLRAMDRSRRATNPKYYNPDGTIKRLKRQHGQKQKRKWKYSKRYYRLRAKLRNLYRKLADIRKMEHNILANELLANGNEFVVEDMNYKALQKRSKETKINPKTGRAYTKKRFGKSLSRCAPAMFISILGKKANRYGGSVIKVSTFETKASQFDHTDESYTKKKLSERMARLRSGDIVQRDLYSAFLLEHIDTESLQYNMETLNSVFPAFLEMHENTKRRLQAVGSSLPASIGF

SEQ ID NO: 2165 - protein, 508 aa, Unknown
  Description of Unknown: uncultivated organism sequence
  Category: MG81 effectors
  Description: MG81-444 effector
MADKECCVLTLPLQTEIWQEHIIEKRFAIMEHLKNQLIAKELRRLKNLERTKEYRNLIDEINNTPKEKRKALFSKRRKLLKDNGFNRNKFKDDMAVMQKHFEEHIATQIAQEAASDVWRSFDKYLFNNGKYIHFTRKGSLSSINCQKINNGMKYIDGYFIWTCGICSGKRDRRIILKIKVTPPKNEYEKEMLSKKIKYLRIVKKWVKTRYKYYLQFALEGKPVKKDRIVNKGNVGIDIGTQTVAISSADSVKILELADKIDKNHTKKKILQRKMDRSRRYTNPQNYNEDGTIKKPPKGQRFSWYKSKKYIQLAGKVRELERKNADIRKYQHTCLANWILSLGDTVYVEQMNFSGLQRRAKETKIDKNGKYAKKKRYGKSLANKAPSMFLTILESKLNQYGGQLNKINTYEFKASQYDHTDDTFTKHNRSERWHILSNGDKNQRDLYSAFLIMNSDISLKHCNREKCNETYSNFKVLQDKEIERLYSDIRKGNCKNISSFGFQRNAKAM

SEQ ID NO: 2166 - protein, 508 aa, Unknown
  Description of Unknown: uncultivated organism sequence
  Category: MG81 effectors
  Description: MG81-445 effector
MADKECCVLTLPLQTEIWQEHIIEKRFAIMEHLKNQLIAKELRRLKNLERTKEYRNLIDEINNTPKEKRKALFSKRRKLLKDNGFNRNKFKDDMAVMQKHFEEHIATQIAQEAASDVWRSFDKYLFNNGKYIHFTRKGSLSSINCQKINNGMKYIDGYFIWTCGICSGKRDRRIILKIKVTPPKNEYEKEMLSKKIKYLRIVKKWVKTRYKYYLQFALEGKPVKKDRIVNKGNVGIDIGTQTVAISSADSVKILELADKIDKNHTKKKILQRKMDRSRRYTNPQNYNEDGTIKKPPKGQRFSWYKSKKYIQLAGKVRELERKNADIRKYQHTCLANWILSLGDTVYVEQMNFSGLQRRAKETKIDKNGKYAKKKRYGKSLANKAPSMFLTILESKLNQYGGQLNKINTYEFKASQYDHTDDTFTKHNRSERWHILSNGDKNQRDLYLAFLIMNSDISLKHCNREKCNETYSNFKVLQDKEIERLYSDIRKGNCKNISSFGFQRNAKAM

SEQ ID NO: 2167 - protein, 508 aa, Unknown
  Description of Unknown: uncultivated organism sequence
  Category: MG81 effectors
  Description: MG81-446 effector
MADKECCVLTLPLQTEIWQEHIIEKRFAIMEHLKNQLIAKELRRLKNLERTKEYRNLIDEINNTPKEKRKALFSKRRKLLKDNGFNRNKFKDDMAVMQKHFEEHIATQIAQEAASDVWRSFDKYLFNNGKYIHFTRKGSLSSINCQKINNGMKYIDGYFIWTCGICSGKRDRRIILKIKVTPPKNEYEKEMLSKKIKYLRIVKKWVKTRYKYYLQFALEGKPVKKDRIVNKGNVGIDIGTQTVAISSADSVKILELADKIDKNHTKKKILQRKMDRSRRYTNPQNYNEDGTIKKPPKGQRFSWYKSKKYIQLAGKVRELERKNADIRKYQHTCLANWILSLGDTVYVEQMNFSGLQRRAKETKIDKNGKYAKKKRYGKSLANKAPSMFLTILGSKLNQYGGQLNKINTYEFKASQYDHTDDTFTKHNRSERWHILSNGDKNQRDLYSAFLIMNSDISLKHCNRKKCNETYSTFKVLQDKEIERLYSDIRKGNCKNISSFGFQRNAKAM

SEQ ID NO: 2168 - protein, 551 aa, Unknown
  Description of Unknown: uncultivated organism sequence
  Category: MG81 effectors
  Description: MG81-447 effector
MSNLLFLLENEEKMRYNGVEKQREGEGTRVKRSSTDTCCLTLPLKLEKWQSDRLEKRFEIGRQIYNTIVHAELKKLRKLERTQQYQEIEQKLENAKQEETKELWKKKRQLLDQNGLSENHFKADMKYYYPHFKDNIASSVAVHGIASQAWTAFEKVLLSKDGKMVHFKKKGELSSLRGYSQAGKSGGIEIIFRGSYVEWKGLKLPLQLSPNNEYETEMLSKRVKYVRILRKDGKTKTHWYAQLALEGKPAVKRDSISGAPKHPVGHGVVGIDIGTRTLAYSTDSEVNLLELADRVQNIEQEKRRLQRKMDRSRRAMNPENYNSDGTFKRGVKLTRNKSKRYRRIQHQLAMIQHHQADIRKQQHNELANYLLTLGDCFFVENMSYCDLVHRANKTEISEKTGRYKRKKRFGKSIANKAPAMLITMLKQKCQSRGLKGVKEVDTHVRASQYNHQTDTCIEKALENRWNVMPDGERIQRDLYSAFLLQHCKQGLSEYNRKELKKEFGEELYRVFDREALQRDYPQFVAYHHMTIQRLSELPHTIPSMGIRRIIS

SEQ ID NO: 2169 - protein, 512 aa, Unknown
  Description of Unknown: uncultivated organism sequence
  Category: MG81 effectors
  Description: MG81-448 effector
MKKSSTDTCCLTLPLKLEKWQEDRLAKRFEIARQLYNTLVHAELKRLAQVKQTAEYRENERKIRTLDWNNPAHRTELEKLYEERRKSLKKAGFTDNSFTTDMGKYYKHFRDNIGSSVAVHGIAPQVWAAFDKLLFKKGGKKVHCKRPGEVNSVQGYSRTGKSGGREIMFRGAYIEWKGLKLPLKLSPDNAYETDMLQRRVKLVRLVRRPGKRRDRWYAQLVLEGKPAIKADPVTGKAVHPIGSGPVGLDIGPQTLAYSAAGVAGLVELADRVQNIEQEKRCLQRKMDRSRRATNPDNYAEDGTIRRGVKLTHNKSKRYRRNQQELKYLQHHQAEIRKLQHIQLANHLLSLGDHFYVEKMEWSSLTRRAKKTVISEKTGKPRSKKRFGKSIANKAPAMLIEILRQKCKSLGLPNVVEINPADIKASQYNHLTGEYVKKSLSRRWNDMQDGEHLQRDLYSAFLLQHYDSMSKALDLDSLARDYPAFVQYHHREIERLHALPKTPASMGIRRSIA

SEQ ID NO: 2170 - protein, 511 aa, Unknown
  Description of Unknown: uncultivated organism sequence
  Category: MG81 effectors
  Description: MG81-449 effector
MGKSSTDTCCLTLPLKLEKWQEDRLAKRFEIARQIYNTMVRAELKKLDRVKQLPEYRKNQKEIQALDGKNSADRARLKELRANQNRILQKQGFTKYGFKSDSKDYYKHFIENIGSSVATHGIAPQVWNAFDKMLFQKDGKVVHFKRYGDVHSLKGGSVAHKSGGAEIMFRKTYIEWKGLKLPLKLSPNNAYEAEMLSYRVKYVRILRTRGKTKDRWYAQLSLEGKPAVKYDSSTGKPVHPVGRGAVGLDIGPQTLAYVAANEANLVELADQVQNIEQEKRRLQRKLDRSRRATNPDNYNENGTIRRGVKLTHNKSKRYCKLQKELSWIQHCQAETRKRQHIALANHLLSLGDCFYVEPMAWPSLTHRAKKTEVSEETGRIKRKKRFGKSVANKAPASLIGILKLKCISLGLTGVVEVPMLLRASQYNHQSKDYAKKSLSQRWNDMPDGNRIQRDLYSAFLLQHYNSQSESFDQETLERDYPQFVRLHNQTIQRLSALPKTPSSMGIRRSVS

SEQ ID NO: 2171 - protein, 496 aa, Unknown
  Description of Unknown: uncultivated organism sequence
  Category: MG81 effectors
  Description: MG81-450 effector
MSEKKLGNTVLTLPLYPEKWQIDIIEKRFRIMELLKNALIAKELRRLRNLQRTRVWRRLEDEIRSTDKTERKKLYARRTELLRTAGFSKYGFYEDMEPMQKRYIVHIGAQVAQRASSDVWQAFEKMLYGNGDMVHFHKAGSLYSIANKKSGNCMIFRNGCLEWNGGQSRDAVKLILPSKARLTDYERQMLEKPIKYYRVIRKWMKTRWKYYVQITLAGETVHKDRPVGAGRVGIDIGTRTIAVAAEKAVFLRELADGVDENHRRKCALQRKMDNSRRSTNPENYNPDGTVRRPGKGHRPHWVKSRRYLKMQAMVRNLERKNADIRKYQHICLANEIIRLGTDVYVEQMSYSGLQRRAKETTYDDKGRAKKKKRFGKSLANKAPASFLLILNQKLSYLEPTGLKHVDTKAFRASQLDHTDQSYHSKKLGERWTVLSDGTKVQRDMYSAFLLMNSNAEMNGVDLEQCNQTFEHFKYMHDRAIETIRNDGKRHPASFGV

SEQ ID NO: 2172 - protein, 511 aa, Unknown
  Description of Unknown: uncultivated organism sequence
  Category: MG81 effectors
  Description: MG81-451 effector
MKKSNTDTCCLTLPLKLEKWQEDRLAKRFEIARQIYNTMVHAELKKLRNIENSQPYRQIQKQIEALNWKNQNDKARLKSLYNDRNKLLNTIGFSEYGFKADIKYYYKHFNDNIGSSVAVHGIAPQVWAAFEKMLFHKEGKKVHYKKKDDIHSLHGYSVTGKSGGVEIIFRKTYIEWKGLKLPLKRSPDNAYETEMLGRRVKYVRLLRKPGKRKDCWYAQLSLKGKPAIKRDPESGKRRHSIGRGAVGLDIGPQTLAYSACGAADLVELADQVQNIEQMKRRLQRKLDRSRRATNPDNYADNGTIRRGVKLTHNKSNRYRRTQRELRYLQHCQAEIRKRQHIELANHLLALGDCFYVEDMAWPSLTHRAKETAISEKTGRIKRKKRFGKSVANKAPATLIGILEQKCNSLGLPGVVKVPTSLRASQYNHQSGEYTSKPLSQRWNNMPDGERIQRDLYSAFLLQHYDPKAGNFDSVLLQQDYPQFVQYHHRAIQRLSTVPKTLSSMGIQRSLR

SEQ ID NO: 2173 - protein, 530 aa, Unknown
  Description of Unknown: uncultivated organism sequence
  Category: MG81 effectors
  Description: MG81-452 effector
MILLANNNNNNNTDTCVLTLPLRVEKWQEDCLLKRFEAARRIYNSLLNFELKKLRQLERTVEYRQIQSVISNAYRSNTKDSPECKAALKRREKLIDENGLTKNGFKNDVKFFYKHFDGLIGSSVAVHCIAVQLWAAFNKYLCGNGKEIHFKRLGDISSLKGYSVKGKSGGCEIIFRGQYVEWTRKKKKLLLPLKIDPDNEYEREMLSRRVKYVRIIKKPGKNRLRWYAQLTLEGKPALKYSAETGKPIHSVGKGDVGIDIGPQTVAYASDKEVALLELADRVTNIEHQKKKLQRKLDRSRRATNPDNYKPDGTIKRGVKLTRNKSKRYLKLQSKLAYIQHRQAEIRKLQHTCLANHMLTLGDRFFVEKMNWPGLAHRAKETSISEKTGRYKRKKRFGKSLANKAPAMFISILKQKCETLGLPGVVEVDTFRLKASQYNHLSDTCEKKSLSERWNYMPISDGSDSSKTKRIQRDLYSAFLLQHTIPQSCSFDKEALRIDYPNFVTMHDAEIHRLESLPKTITSMGVRRSHS

SEQ ID NO: 2174 - protein, 488 aa, Unknown
  Description of Unknown: uncultivated organism sequence
  Category: MG81 effectors
  Description: MG81-453 effector
MTNQEYNKLLKQYHKLSDRHILVAETDMPYSDVQKVVALSDKIRKAGNELVGLMRKNHDQLMRTKKYRKLLNLYGNTENKVHRKSLAKQLNEMQKAYNVTWDFCRTSMIPIGKKYGIDAVFALTKAEDVWRGMEKCLYGNGEMLHFSKYGELPCIRAKQINRGIPISIKDNKVQFKLGKIMFGLQIKDRFQTDEINSVMSYLANPEIMDTKAVDTFIEGARCIDTYRPCYATLVPKFIRGKYRVYLHLTIEGKAKPKYDKFGNPRHKYGKGIIGADIGTQTVAYTSDTEVGIKNLSERGNSIQDSERLERLYYRAMDRSRRATNPQNYNDNGTVKRGKKSWKYSNHYKKLRAKHSELCRINAVNRQLAINEDANHLRSLGDTIITEPKNASKLMLRVKKTTKNAKGKFNKKKRFGKSIKSRCPGGFQTTVKNKFKVSGGTYIEVPNNYRASQYDHTADEYIKKKLSDRLYKLRDGTLVQRDWYSSFLL

SEQ ID NO: 2175 - protein, 511 aa, Unknown
  Description of Unknown: uncultivated organism sequence
  Category: MG81 effectors
  Description: MG81-454 effector
MAKCSTDTCCLTLPLRLEKWQEDRLAKRFEIARQIYNTMVRAELKKLRAMEQSEPYKANQEKIQALDWKTQTDKQALKALYKERDKLLRDGGFSEYGFKSDIKNYYKHFNNNIGSNVAFHGIVPQVWAAFEKMLFKKEGKKVHFKKKGDIHSLRGYSAAGKSGGVEIIFRETYIEWKGLKLPLKLSPDNIYETQMLSYRVKYVRLLRKPGKRKDRWYAQLSLEGKPVIKYNPKTGEVRHPIGKGAVGLDIGPQTLAYSAATGADLVELANQVQNVEQEKRRLQRKLDRSRRATNPGNYADDGTIRRGIALTHNKSKRYLRTQQELKYLQHQQAEIRKRQHTELANHLLSLGDCFYVEKMVWTSLTHRAKETEISEKTGKIKRKKRFGKSVANKAPATLIGILQRKSAALGIPGVIEVPTSVKASQYNHQSGTYTPKPLSQRWNNMPDGERIQRDLYSAFLLQHYDPQTNTFDANSLHQDYPQFVQYHHDAVLRLYAMPKTPSSMGIKRSLR

SEQ ID NO: 2176 - protein, 338 aa, Unknown
  Description of Unknown: uncultivated organism sequence
  Category: MG81 effectors
  Description: MG81-455 effector
MGKSSTDTCCLTLPLKLEKWQEDRLAKRFEIARQIYNTMVRAELKRLRQVEQSPQYRSNKKAIQALDWKNTADKPKLKTLYRERDKLLKGGGFTEYGFKSDIKNFYKHFAENIGSSVAVHGIAPQVWAAFERVLFKKEGKKVHFKKTGDIRSLRGYSVTGKSGGVEIIFRGSYIEWKGLNLPLKLSPDNAYETEMLSYRVKYVRILRKPGKTRDRWYAQLSLEGKPAIKRNPASGNPVHPVGQGAVGLDIGPQTLAYAAEKEANLVELADRVQNIEREKHLLQRKMDRSRRAANPDNYAENGTIRRGVKLTHNKSKRYLRLQRELCYLQHCQAETRKR

SEQ ID NO: 2177 - protein, 511 aa, Unknown
  Description of Unknown: uncultivated organism sequence
  Category: MG81 effectors
  Description: MG81-456 effector
MAKCSTDTCCLTLPLRLEKWQEDRLAKRFEIARQIYNTMVRAELKKLRAMEQSEPYKANQEKIQALDRKTQTDKQALKALYKERDKLLRDGGFSEYGFKSDIKNYYKHFNNNIGSSVAVHGIAPQVWAAFEKMLFKKEGKKVHFKKKGDIHSLRGYSATGKSGGVEIIFRETYIEWKGLKLPLKLSPDNIYETQMLSYRVKYVRLLRKPGKRKDRWYAQLSLEGKPVIKYNPKTGEVRHPIGKGAVGLDIGPQTLAYSAATGADLVELANQVQNVEQEKRRLQRKLDRSRRATNPGNYADDGTIRRGIALTHNKSKRYLRTQQELKYLQHQQAEIRKRQHTELANHLLSLGDCFYVEKMVWTSLTHRAKETEISEKTGKIKRKKRFGKSVANKAPATLIGILQRKSAALGIPGVIEVPTSVKASQYNHQSGTYTPKPLSQRWNNMPDGERIQRDLYSAFLLQHYDPQTNTFDANSLHQDYPQFVQYHHDAVLRLYAMPKTPSSMGIKRSLR

SEQ ID NO: 2178 - protein, 519 aa, Unknown
  Description of Unknown: uncultivated organism sequence
  Category: MG81 effectors
  Description: MG81-457 effector
MPTKQKEGGNRCVLTLPLLTEPWQEHIIEKRFKIIEHLKNQLISIELRKLKNLQRTKAYKNLIKQIESVPKSERTALYKERNKMLEGKGFSRNVFQDDLGVMQNQFAEHINVQISHRAAWDVWSSFEKFLFGSGQMIHYQKRGTLKSIASKSPKNGMHYFPESNTFKWSGGRQKKIGQKGEQKKVSIKPISLCLRVSPLKTDYEKEMVANNEIKYYRVVRKWMKTKYKYYLQITFAGKPADKHREISTGRVGIDIGTQTIAIASDKSVKLLELADKVNKNHIKKCELQRKLDRSRRYTNPDNFNPDGTVKRGTKGHKLKWNKSKHYLEIAGKIRELERKNADIRKYQHTCLANDILAMGNQIYIEPMNYKGLQKRAKETQVDEKGRYKKKKRFGKSLANKAPAMFVTILKTKAEQHGGEVYEVDIMLYRASQCDHTTGEYTKHGLNDRWRILGNGDKVQRDLYSAFLIKNSNKTHDEIDLDKCSKTYDSFKKLHDKEIENIRNEVILRKRRNISSYGIA

SEQ ID NO: 2179 - protein, 511 aa, Unknown
  Description of Unknown: uncultivated organism sequence
  Category: MG81 effectors
  Description: MG81-458 effector
MAQRHSTPTCCLTLPLQLEKWQEDRLIKRFEIAGKIYNALLNAELKKLHRLEQLPEYKEIQSQLKAYYQNNLPKTAAFKELNNRRSKLLSEHGFSEYAFKGDMKKFYKHFSSNIGSSVATHCIASQVWSAFEKRLFGGGKFVHFKKSGDIRSLKGFSSSRKSGGVEIMFRGDHIEWKGLLLRLKLDPDNQYESEMLSRRIKYVRIIRKPGKAKWRWYAQLSVEGLPAIKRNDETGEPVHPIGRGAVGIDIGPQTIAYVSQTEVALKELADRVQNIEHEKRLIQRKLDRSRRATNPANYADNGTIKRGVKLTRNKSKRYLKLQMELSFLQHKQAEIRKQQHINLANHLLSLGDCFYVEDMAWSSLARKAKETAVSEKTGKYKRKKRFGKSIANKAPASLISILDQKCTSLGLLGVIKVPTSVRASQYNHITKSYEKKTLSQRWNIMPDGRRIQRDIYSAFLLQHVTPQRDGFSDEALQQDYENFVSLHDSVIQQLRLMPKTIASMGIRRTYS

SEQ ID NO: 2180 - protein, 1358 aa, Unknown
  Description of Unknown: uncultivated organism sequence
  Category: MG81 effectors
  Description: MG81-459 effector
MKISKIKNSRPGISVAENKNEESLSRQSLLYYAPVKDGKIRLESKDLEQHVTECNEKAQKLYNVITPEINFYRDENRQKMVENLARNFNAVINNALRSIRNPKEKKEQRVEKEVAFILNLSKKSIKMKKDVFVKSTDLIVKFPENNKYNKKNDKGTGSKEAYIQKMISDLVLRKLKNTLRKEVKLENGYRMQMTEIIISLMSAICLYGNAESFDPAILKAFFEKVDSDYTKYKYVEQIVKSIESQSAKLKVVEKDGRHLLISANADHRKKKYVFEFMRMYAAADEKEKRELTEHIQDLIGLYLCGKAGYENAENRFSDMTESHNCICGKIEEILNELEKPENLSQKKKENLKNTTVKVMALKYRAAVNYLADEVGKTVLGEIREKKVRSCADLYWIEYIDSTVEKLLLKSRNKDGYRYEIGFLSKHIWKEWTQYISGKYIEMGKGVYHFAIPDLSGNLEGEPISICEVKPEYRNGVSGFDYERIRAEESLEREMEKYVLFAVNNFARAVTPEEEREKSGHEDVLLMKTLSEIEESQTKEERQKKHDNNVKNAITLYADADRRILQFFGGQSRFREKEDSLINLYSGEDLYKEIRKELYAIRNITFHYTTKADKDQTQKHDLAEYLFEEEFSDITELFREKYYANNVWKYYDVEVINTIMENIYCGRKYRAAQVPAFKNIISRPELPQVMNGFVKGNSLRRLMNCPDRDVINKYWSALFFVLKELYYYDFLQEQKKPEDNVKERFFRAIEKLSGQENDDKKQKAWESFGNRIDQIGRDRSFGAICQGLMIEYMLQNSDISMVQTETDNGKANNKKQIYKHYRTLLYNCIREAFIEYLREKWEGLRTPVLTVKEWSKEEFCRADGLKHLSLFDHLKKTFNDAESGSSWYMAAHFINQKYLNHLLGSIRNYLQFTEDIEDRAISLGDCVDNKREEKNLRYRNTLEILEFVAQFCERTTNVMEDYFESNQEYAEYLSGFVDYNTTKKETDIEKALYSFCKQKFKVDGKEYMAGIYYDGENLIPNRNIIRANMYGNTSCLKPCMDRITLKEIRTMYADQNKLDLVLKEGVCHTEEEQKAYREYQNEKNRIELFDVCTYTQILNDMQARLIGWSYMRERDLMYYQLGYYYTKLFWTDSISEEDARRRLVGNLVNVEDGAILYQILAFNSYNLPIIANKNNTVTLLKDEGSIGGKAITAFFKNYENAEMIYEEALDLFENMDEHAAIINTRNYIEHFKYFIKSDRSMMDLYSEIYDRFFRHDHNRKKNVPDSLKNVLADNFMIVDIDMELGSKKVGEKKKGFREHKAARIEFTDSGIRSTDMTYTIKPDIKDNKKDKKVLVPARSEVFLKQFRKILEYRIQDKIQ

SEQ ID NO: 2181 - protein, 511 aa, Unknown
  Description of Unknown: uncultivated organism sequence
  Category: MG81 effectors
  Description: MG81-460 effector
MGKSSTDTCCLTLPLKLEKWQEDRLAKRFEIARQIYNTMVRAELKKLDRVKQLPEYRKNQKEIQALDWKNSADKQRLKELYGNQRKILQKQGFTEYSFKADSKDYYKHFIENIGSSVATHGIAPQVWNAFDKMLFQKDGKVVHFKRYGDVHSLKGGSVAHKSGGAEIMFRKTYIEWKGLKLPLKLSPNNAYEAEMLSYRVKYVRILRTRGKTKDRWYAQLSLEGKPAVKYDSNTGKPVHPVGRGAVGLDIGPQTLAYAAANEANLVELADQVQNIEQEKRRLQRKLDRSRRATNPDNYNENGTIRRGVKLTHNKSKRYCKLQKELSWIQHCQAETRKRQHIALANHLLSLGDCFYVEPMAWPSLTHRAKKTEVSEKTGRIKRKKRFGKSVANKAPASLIGILKLKCISLGLTGVVEVPMLLKASQYNHQSKGYAPKSLSQRWNDMPDGNRIQRDLYSAFLLQHYNSQLENFNQETLERDYPQFVRLHNQTIQRLSALPKTPSSMGIRRSVS

SEQ ID NO: 2182 - protein, 512 aa, Unknown
  Description of Unknown: uncultivated organism sequence
  Category: MG81 effectors
  Description: MG81-461 effector
MGKSSTDTCCLSLPLKLEKWQEDRLAKRFEIARQIYNTLVHAELKRLSQVKRSQQYREIENKIRALDRNDQEDKKELSLLHKLRDDLLRKSGVNDYGFKADIKYFYKHFGENIGANVAVHGIAPQVWSAFDSVLFKKRGKKVHYKKPGDICSLRGYSVTGKSGGSEIMFRGTYIEWKGLKMPLKLSPDNIYESEMLDHRVKYVRIVRKPGKRKDRWYAQLSLECKPVIKCDPVSGEMRHPVGKGPVGLDIGPQTLAYCALSEAGLVELADQVQDIEREKQRLQRRLDRSRRAANPNNYAADGTIKRGVKLTHNKSKRYCILQRELRYLQQQQAETRKRQHTELANYLLSLGDRFYVEDMNWSSLARRAKKTEISEKTGRYKRKKRFGKSIANKAPGSLIDILKQKCESLGIPGVEKLPTSLLKASQYNHQTGEYTPKPRSQRWNDMPDGERIQRDLYSAFLLQHYDPVSKGYDQAALQRDYPQFLQHHHHSIQRLTAKPKTPSSMGIHQRLR

SEQ ID NO: 2183 - protein, 353 aa, Unknown
  Description of Unknown: uncultivated organism sequence
  Category: MG81 effectors
  Description: MG81-462 effector
MSGKSGGTEIIFHKTYIAWKGLTLPLKLSPDNAYEKEMLMRRIKYVRILRKPGKHKDRWYAQLSLEGNPVVKLDPVSGLPRHPIGKGAVGIDIGPQTLAYSAEGGADLVELADQVQCIEQEKSRLQRKMDRSRRASNPDNYAQDGTIKRGVKLTYNKSRRYCKLQKELAYMLYRQAETRKRQHRELINRLLTMGDCFYIEDMHWNSLAHRAKKTEISEKTGRYKRKKRFGKSIANKAPAMLVDMLEQKCKSLELDVVMVNTSLKASQYNHQTGKYEKKTLSQRWNYMPDGEQIQRDLYSAFLLQHVVPEKNAFDNEALCRDYPKFVQYHHEVIERLRSLPKTISSMGIRQSVS

SEQ ID NO: 2184 - protein, 529 aa, Unknown
  Description of Unknown: uncultivated organism sequence
  Category: MG81 effectors
  Description: MG81-463 effector
MAKNNNNNNNDTDTCVLTLPLRVEKWQEDCLLKRFEAARRIYNSLLNFELKKLRQLERTVEYRQIQSVISSAYRSNTKDSPECKDAFKRREKLISANGLAEYGFKSDVKFFYKHFDGLIGSNVAVHCIAVQLWAAFNKYLSGSGKEIHFKRLGEISSLKGYSVKGKSGGREIIFRGQYIEWTRKKKKLLLPLKIDPDNEYEREMLSRRVKYVRIIKKPGKNRLRWYAQLTLEGKPALKYSAETGKPIHSVGKGNVGIDIGPQTIAYASDKEVALLELADRVTNIEHQKKKLQRKLDRSRRATNPDNYKPDGTIKRGVKLTRNKSKRYLKLQSKLAYIQHRQAEIRKLQHTCLANHMLTLGDRFFVEKMNWSGLAHRAKETSISEKTGRYKRKKRFGKSLANKAPAMFISILKRKCKTLGLPGVVEVDTYSLKASQYNHLSDTYEKKSLSERWNYMPISDGSDSSKTKRIQRDLYSAFLLQHTIPQPCSFDKEALRIDYPNFVTMHDAEIHRLESLPKTVTSMGVRRSHS

SEQ ID NO: 2185 - protein, 525 aa, Unknown
  Description of Unknown: uncultivated organism sequence
  Category: MG81 effectors
  Description: MG81-464 effector
MANNNNNTDTCVLTLPLRVEKWQEDCLLKRFEAARRIYNSLLNFELKKLRQLERTVEYRQIQSVISSAYRSNTKDSPECKAALKRREKLIDANDLTEYGFKSDVKFFYKHFDGLIGSSVAVHCIAVQLWAAFNKYLCGNGKEIHFKRLGDISSLKGYSVKGKSGGCEIIFRGQYVEWTRKKKKLLLPLKIDPDNEYEREMLSRRVKYVRIIKKPGKNRLRWYAQLTLEGKPALKYSAETGKPIHSVGKGDVGIDIGPQTVAYASDKEVALLELADRVTNIEHQKKKLQRKLDRSRRATNPDNYKPDGTIKRGVKLTRNKSKRYLKLQSKLAYIQHRQAEIRKLQHTCLANHMLTLGDRFFVEKMNWPGLAHRAKETSISEKTGRYKRKKRFGKSLANKAPAMFISILKQKCETLGLPGVVEVDTFRLKASQYNHLSDTCEKKNLSERWNYMPISDGSDSSKTKRIQRDLYSAFLLQHTIPQSCSFDKEALRIDYPNFVTMHDAEIHRLESLPKTITSMGVRRSHS

SEQ ID NO: 2186 - protein, 534 aa, Unknown
  Description of Unknown: uncultivated organism sequence
  Category: MG81 effectors
  Description: MG81-465 effector
MGWKSKGRGGKRVKKSSTDTCCLTLPLKLEKWQSDRLEKRFEIGRQIYNTVVRAELKKLHQVERTPQYREIEQKLKEAKQEEAKELWKKRTQLLSKSGFSEYGFKSDMKYYYQHFKENIGSSVAVHGIASQVWTAFEKVLFSKDGKMVHFKKKGELSSLRGYSQAGKSGGIEIIFRGSYVEWKGLKLPLKLSSNNDYETEMLSKRVKYVRILRKEGKTKPHWYAQLVLEGKPAIKRDPASGAPKHPVGHGVVGIDIGTRTLAYSADSKVDLIELADRVQNIELEKMLLQRKLDRSRRATNPENYKPDGTIKKGVKLTRNKSKRYRKIQHQLAMLQHRQADIRKRQHNELANYLLTLGDCFFVEDMDYRALTRKAKKTEISEKTGRYKRKKRFGKSIANKAPSMLIALLDQKCKSLNLEGVKKVDTAVKASQYNHQTDECKAKELKERWNIMPDGERIQRDLYSAFLLQHCKRGLPEYNRKKLQEAFGNELYRVFDREALQRDYPKFVEYHRETIQRLSALPKTIPSMGIRRIIS

SEQ ID NO: 2187 - protein, 512 aa, Unknown
  Description of Unknown: uncultivated organism sequence
  Category: MG81 effectors
  Description: MG81-466 effector
MKKCTTDTCCLTLPLKLEKWQEDRLAKRFEIARQIYNTLVRAEFKKLNELERTPEYKKILEQIHSLDWKDSGNRQRLNDLYRERNQILENAKFTEYGFKSDMKFYYKHFSDNIGSCVAVHGIAPQVWAAFEKYLFKPEGKKVHFKRFGDVHSLRGYSKAGESGGAEITFCGTHIRWKNLELPIKLSPDNAYETEMLSRRVKYVRILRKPGKSKDRWYVQLSLEGKPAIKYDRNAGEIKHPVAHGAVGLDIGPQTLAYSAETTADLVELADQVQNIEQEKRRLQRKMDRSRRSTNPGNYNTDGTIRRGVKLTRNKSKAYCKLQRQLAYLQHTQAETRKRQHTELANYLLSLGDCFYVEEMKWSSLAHRAKETAVSEKTGRFKQKKRFGKSIANKAPSTLIGILQQKCESLGLPGIIYVPLSAKASQYNHLTGEYTPKPLSQRWNTMPDAQRVQRDLYSAFLLQHFDSQAGTYNLQSLQRDYPQFLQYHDQSIRRLSEMPKTLSSMGIRKSIRA

SEQ ID NO: 2188 - protein, 538 aa, Unknown
  Description of Unknown: uncultivated organism sequence
  Category: MG81 effectors
  Description: MG81-467 effector
MDNEEKEKDGATCCLTLPLKLEKWQSDHLEKRFEIARQLYNTLVHAELKKKCQVVRMPEYQEIMKMIDAASNQKEKWALEKKRKAFLEENGFSRNAFKADMEKYYKHFNDNIGANVALHGITAQVWIAFDKVFVDNYKQKGKVHFKKPGELCSVQGYSQKKSGGKEIMFREDRIIWNQQGNRDRKKVKREFLLKLSPDNPYEAEMLKRHVKFVRILRKDGKTKPHWYAQLVLEGKPAVKRDPASGAPKHPIGHGVVGIDIGTRTLAYSTDSEVNLLELADRVQNIEQEKRRLQRKMDRSRRAMNPGNYKPDGSIKQGVKLTWNNSKRYKRIQHQYAMIQHHQADIRKQQHNELANYLLTLGDCFFVENMSYCDLAHRANKTEISEKTGRYKRKKRFGKSIANKAPAMLITMLKQKCQSRGLEGVKEVDTHVCASQYNHQTDTCIKKALENRWNIMPDGERIQRDLYSAFLLQHCRRDLPEYNRKELQKEFGEELYRVFDREALQRDYPQFVAYHHMTIQRLSELPHTIPSMGIRRIIS

SEQ ID NO: 2189 - protein, 505 aa, Unknown
  Description of Unknown: uncultivated organism sequence
  Category: MG81 effectors
  Description: MG81-468 effector
MAKATTETCCLTLPLKLEKWQADRLDKRLEIARQIYNTLLRFELKKLRILINSEEYKDIENKRSETTDTNEKKKLNKKLDDLRKKAGFTEYSFKTDIKDFYKHFKDNIGSSVAVHGIAPQVWQAFDRLLYGNGREVHFKKRGSINSLRGYSVAGKSGGVEIMFRGDHIEWKGLHLPIKLDPNNVYECEMLQKRIKYCRIVKKQGRSKDHWYVQLMLEGKPAVKCDRHTGELLHPIGSGAVGIDIGPQTIAYVADKEVALKELADKVNNIEHKKQILQRKLDRSRRAANPDNYAPDGTIKRGVKLTHNKSKRYISTQRELADLMRKQAETRKRQHNELANHLLSLGDRFYVEDMQWPSLTHRAKKTEISEKTGRYKRKKRFGKSVGNKAPAMLISILDQKLRSRGKPGVTKVPTSVRASQYNHISDDYHKKELGERWNDMQDGRRIQRDLYSAFLLQHIDTDNNNFDKPTLFRDYENFVLLHDQYIEELKKLPKTLASMGIVRKAS

SEQ ID NO: 2190 - protein, 540 aa, Unknown
  Description of Unknown: uncultivated organism sequence
  Category: MG81 effectors
  Description: MG81-469 effector
MATTDKKDEENLRAYKFRLDPNQAQTTALYQAVGAARYTYNMLTAYNLEVNRLRDDYWKRRHDEGISDADIKKELNALAKEDKRYKQLNYGAFGTQYLTPEKKRHEQAEHRIENGEDPSVVWNQETERSANPWLHTANQRVLVSGLQNASDAWDNFWASRTGKRAGRLVGTPRFKKKGVSRDSFTVPAPEKMGAYGTAYLRGEPAYKQGRRKITDYRHVRLSYLGTIRTFNSTKPLVKAVAAGAKIRRYTVSRNADRWYVSFLVKFSEPIRRSATKRARAAGSVGVDLGVKYLASLSDSEAPQRFPNLKFVEGLPSLENPRWSEASSRRLHKLQRALARSQKGSNRRSRLVKQIARLHHMTALRRESNLHQLTKKLATEYTLVGFEDLNVSGMTASAKGTVENPGKNVAQKSGLNRVVLDAAFGVFRNQLEYKAVWYGSAFEKVDRYFASSQTCSECGRKAKTKLTLRDRVFDCAYCGNMMDRDLNAAVNICREAQRLFDEKLASEDRESLNGRGSRGALRGAETVEASRPPASHRRGSP

SEQ ID NO: 2191 - protein, 529 aa, Unknown
  Description of Unknown: uncultivated organism sequence
  Category: MG81 effectors
  Description: MG81-470 effector
MILLAKKNNNDTDTCVLTLPLRVEKWQEDCLLKRFEAARRIYNSLLNFELKKLRQLERTVEYRQIQSVISSAYRSNTKDSPECKAALKRREKLIDENGLTKNGFKNDVKFFYKHFDGLIGSSVAVHCIAVQLWAAFDKYLRGSGKEIHFKRLGDISSLKGYSVKGKSGGCEIIFRGQYVEWTRKKKKLLLPLKIDPDNEYEREMLSRRVKYVRIIKKPGKNRLRWYAQLTLEGKPALKYSAETGKPIHSVGKGDVGIDIGPQTVAYASDKEVALLELADRVTNIEHQKKKLQRKLDRSRRATNPDNYKPDGTIKRGVKLTRNKSKRYLKLQSKLAYIQHRQAEIRKLQHTCLANHMLTLGDRFFVEKMNWPGLAHRAKETSISEKTGRYKRKKRFGKSLANKAPAMFISILKQKCETLGLPGVVEVDTFRLKASQYNHLSDTCEKKSLSERWNYMPISDGSDSSKTKRIQRDLYSAFLLQHTIPQSCSFDKEALRIDYPNFVTMHDAEIHRLESLPKTITSMGVRRSHS

SEQ ID NO: 2192 - protein, 522 aa, Unknown
  Description of Unknown: uncultivated organism sequence
  Category: MG81 effectors
  Description: MG81-471 effector
MKRSSTDTCCLTLPLKLEKWQSDRLEKRFEIGRQIYNTIVHAELKKLRKLERTQQYQEIEQKLENAKQEETKELWKKKRQLLDQNGLSENHFKADMKHYYPHFKDNIASSVAVHGIASQAWTAFEKVLLSKDGKMVHFKKKGELSSLRGYSQAGKSGGIEIIFRGSYVEWKGLKLPLKLSPDNDYETEMLSKRVKYVRILRKDGKTKTHWYAQLALEGKPAVKRDSISGAPKHPVGHGVVGIDIGTRTLAYSTDKEVNLLELADRVQNIEQEKRRLQRKMDRSRRAMNPGNYKPDGSIKQGVKLTWNNSKRYKRIQHQYAMIQHHQADIRKQQHNELANYLLTLGDCFFVENMSYCDLAHRANKTEISEKTGRYKRKKRFGKSIANKAPAMLITMLKQKCQSRGLEGVKEVDTHVCASQYNHQTDTCIKKALENRWNIMPDGERIQRDLYSAFLLQHCRRDLPEYNRKELQKEFGEELYRVFDREALQRDYPQFVAYHHMTIQRLSELPHTIPSMGIRRIIS

SEQ ID NO: 2193 - protein, 473 aa, Unknown
  Description of Unknown: uncultivated organism sequence
  Category: MG81 effectors
  Description: MG81-472 effector
MVHAELKKLRNIENSQPYRQIQKQIEALDWKNQTDKARLKSLYNERNQLLKASGFTEYGFKADIKYYYKHFNDNIGSSVAVHGIAPQVWAAFEKMLFHKEGKKVHYKKKDDIHSLRGYSVTGKSGGVEIIFRETYIEWKGLKLPLKRSPDNAYETEMLSRRVKYVRLLRKPGKRKNRWYVQLSLEGKPAIKRDPESGELRHAIGRGAVGLDIGPQTLAYSACGAVDLVELADQVQNIEQMKRRLQRKLDRSRRATNPNNYADNGTIRRGVKLTHNKSNRYRRTQRELRYLQHCQAEIRKRQHIELANHLLALGDCFYVEDMAWPSLTHRAKETAISEKTGRIKRKKRFGKSVANKAPATLIGILEQKCNSLGLPGVMKVPTSLRASQYNHQSGEYTSKPLSQRWNDIPDGERIQRDLYSAFLLQHYDPQAGNFNSALLQQDYPQFVQYHHRAIQRLSTAPKTLSSMGIQRSLR

SEQ ID NO: 2194 - protein, 511 aa, Unknown
  Description of Unknown: uncultivated organism sequence
  Category: MG81 effectors
  Description: MG81-473 effector
MREDSQNTCCLTLPLKIEKWQADRLIKRFEIARQIYNTLVHAELKKLQKMEASAEYRQIQDRIRELNPSDAGAKKEWKILKDKQEKLWKAWKITEYGFKSDIKAYYKYFNENIGAAGATHDIAPRVWAAFEKKLNDRTGKVKIQYKKAGDIRSLKGFSVSGKSGGTEIIFHKTYIAWKGLTLPLKLSPDNAYEKEMLMRRIKYVRILRKPGKHKDRWYAQLSLEGNPVVKLDPVSRLPRQPIGKGAVGIDIGPQTLAYSAEGGADLVELADQVQCIEQEKSRLQRKMDRSRRASNPDNYAQDGTIKRGVKLTHNKSRRYCKLQKELAYMLYRQAETRKRQHRELINRLLTMGDCFYIEDMHWNSLAHRAKKTEISEKTGRYKRKKRFGKSIANKAPAMLVDMLEQKCKSLELDVVTVNTSLKASQYNHQTGKYEKKTLSQRWNRMPDGEQIQRDLYSAFLLQHVVPEKNAFDNEALCRDYPKFVQYHHEVIERLRSLPKTISSMGIRQSVS

SEQ ID NO: 2195 - protein, 523 aa, Unknown
  Description of Unknown: uncultivated organism sequence
  Category: MG81 effectors
  Description: MG81-474 effector
MPTKQKEDSNRCVLTLPLLTEPWQEHIIEKRFKIIEHLKNQLISIELRKLKNLQRTKAYKNLIKQIESVPKSERTVLYKERNKMLKDAGFSQYTFMDDMAGKKSLMQKHFESHINVQIAHKAAIDVWSSFEKFLFGSGQMIHYQKRGTLKSIASKSPKNGMHYFPESNTFKWSGGRQKKIGQKGEQKKVSIKPISLCLRVSPLKTDYEKEMVANNEIKYYRVVRKWMKTKYKYYLQITFAGKPADKHREISTGRVGIDIGTQTIAIASDKSVKLLELADKVNKNHIKKCELQRKLDRSRRYTNPDNFNPDGTVKRGTKGHKLKWIKSKHYLEIAGKIRELERKNADIRKYQHTCLANDILAMGNQIYIEPMNYKGLQKRAKETQVDEKGRYKKKKRFGKSLANKAPAMFVTILKTKAEQHGGEVYEVDIMSYRASQCDHTTGEYTKHGLNDRWRILGNGDKVQRDLYSAFLIKNSNKTHDEIDLDKCSKTYDNFKKLHDKEIENIRNEVKLRERKNISSYGIA

SEQ ID NO: 2196 - protein, 512 aa, Unknown
  Description of Unknown: uncultivated organism sequence
  Category: MG81 effectors
  Description: MG81-475 effector
MPTKQKEDSNRCVLTLPLLTEPWQEHIIEKRFKIIEHLKYQLISIELRKLKKLQRTKAYKNLIKQIESVPKSERTALYKERNKMLKDAGFSQYTFMDDMAGKKSLMQKHFESHINVQIAHKAAIDVWSSFEKFLFGTGQMIHYQKRGTLSSVASKSPKTGMFYYSDENIFKWSGGGTKPKGGIILCLRVASVKTNYEKEMVANNEIKYYRVVRKWMKTKYKYYLQITFAGKPADKHREISTGRVGIDIGTQTIAIASDKSVKLLELADKINKNHIKKCELQRKLDRSRRYTNPDNFNPDGTVKRGTKGHKLKWNKSKHYIEIAGKIRELERKNADIRKYQHTCLANDILAMGNQIYIEPMNYKGLQKRAKETQVDEKGRYKKKKRFGKSLANKAPAMFVTILKTKAEQHGGEVYEVDIMSYRASQCDHTTGEYTKHGLNDRWRILGNGDKVQRDLYSAFLIKNSNKTHDEIDLDKCSKTYDSFKKLHDKEIENIRNEVKLRERKNISSYGIA

SEQ ID NO: 2197 - protein, 522 aa, Unknown
  Description of Unknown: uncultivated organism sequence
  Category: MG81 effectors
  Description: MG81-476 effector
MKKSSTDTCCLTLPLKLEKWQSDRLEKRFEIGRQIYNTVVRAELKKLHQVERTPQYREIEQKLKEAKQEEAKELWKKRTQLLSKSGFSEYGFKSDMKYYYQHFKENIGSSVAVHGIASQVWTAFEKVLFSKDGKMVHFKKKGELSSLRGYSQAGKSGGIEIIFRGSYVEWKGLKLPLKLSSNNDYETEMLSKRVKYVRILRKEGKTKPHWYAQLVLEGKPAIKRDPASGAPKHPVGHGVVGIDIGTRTLAYSADSKVDLIELADRVQNIELEKMLLQRKLDRSRRATNPENYKPDGTIKKGVKLTRNKSKRYRKIQHQLAMLQHRQADIRKRQHNELANYLLTLGDCFFVEDMDYRALTRKAKKTEISEKTGRYKRKKRFGKSIANKAPSMLIALLDQKCKSLNLEGVKKVDTAVKASQYNHQTDECKAKELKERWNIMPDGERIQRDLYSAFLLQHCKRGLPEYNRKKLQEAFGNELYRVFDREALQRDYPKFVEYHRETIQRLSALPKTIPSMGIRRIIS

SEQ ID NO: 2198 - protein, 538 aa, Unknown
  Description of Unknown: uncultivated organism sequence
  Category: MG81 effectors
  Description: MG81-477 effector
MNNEEKEKEGATCCLTLPLKLEKWQSDHLEKRFEIARQLYNTLVHAELKKKCQVERMPEYQEIMKMIDAASNQKEKWALEKKRKAFLEENGFSRNAFKADMEKYYKHFNDNIGANVALHGITAQVWIAFDKVFVDNYKQKGKVHFKKPGELCSVQGYSQKKSGGKEIMFREDRIIWNQQGNRDRKKVKREFLLKLSPDNPYEAEMLKRHVKFVRILRKDGKTKPHWYAQLVLEGKPAVKRDPASGAPKHPIGHGVVGIDIGTRTLAYSTDSEVNLLELADRVQNIEQEKRRLQRKMDRSRRAMNPGNYKPDGSIKQGVKLTWNNSKRYKRIQHQYAMIQHHQADIRKQQHNELANYLLTLGDCFFVENMSYCDLAHRANKTEISEKTGRYKRKKRFGKSIANKAPAMLITMLKQKCQSRGLEGVKEVDTHVCASQYNHQTDTCIKKALENRWNIMPDGERIQRDLYSAFLLQHCRRDLPEYNRKELQKEFGEELYRVFDREALQRDYPQFVAYHHMTIQRLSELPHTIPSMGIRRIIS

SEQ ID NO: 2199 - protein, 528 aa, Unknown
  Description of Unknown: uncultivated organism sequence
  Category: MG81 effectors
  Description: MG81-478 effector
MAKKNNNNNDTDTCVLTLPLRVEKWQEDCLLKRFEAARRIYNSLLNFELKKLRQLERTVEYRQIQSVISSAYRSNTKDSLECKDAFKHREKLISANGISKNGFKSDVKFFYKHFDGLIGSSVAVHCIAVQLWAAFDKYLSGSGKEIHFKRLGDISSLKGYSVKGKSGGREIIFRGQYIEWTRKKKKLLLPLKIDPDNEYEREMLSRRVKYVRIIKKPGKNRLRWYAQLTLEGKPALKYSAGTGKPIHSVGKGDVGIDIGPQTVAYASDKEVALLELADRVTNIEHQKKKLQRKLDRSRRATNPDNYKPDGTIKRGVKLTRNKSKRYLKLQSKLAYIQHRQAEIRKLQHTCLANHMLTLGDRFFVEKMNWPGLAHRAKETSISEKTGRYKRKKRFGKSLANKAPAMFISILKRKCETLGLPGVVEVDTYSLKASQYNHLSDTYEKKSLSERWNYMPISDGSDSSKTKRIQRDLYSAFLLQHTIPQPCSFDKEALRIDYPNFVTMHDAEIHRLESLPKTVTSMGVRRSHS

SEQ ID NO: 2200 - protein, 1355 aa, Unknown
  Description of Unknown: uncultivated organism sequence
  Category: MG81 effectors
  Description: MG81-479 effector
MKISKIKNSRPGISVAENKNEEPLSRQSLLYYAPVKDGKIRLESKDLEQHVTECNEKAQKLYNVITPEINFYRDENRQKMVENLAKNFNAVINNALRSIRNPKEKKEQRVEKEVAFILNLSKKSIKMKKDVFVKSTDLIVKFPENNKYNKKNDKGTGSKEADIQRIISDLVLRKLKKTLRKEVKLENGYRMQMTEITISLMSAICLYGNAESFDPAILKAFFEKVDSDYTKYKYVEQIVKSIESQSAKLKVIEKDGRHLLISANADHRKKKYVFEFMRMYAAADEKEKRELTEHIQDLIGLYLCGKAGYENAENRFSDMIESHNCICGKIEEILNELEKPENLSQQKKENLKNTTVKVMALKYRAAVNYLADEVGKTVLGEIREKKVRSCADLYWIEYIDSTVEKLLLKSRNKKRYRYEIGFLSKHIWKEWTQYISGKYIEIGKGVYHFAIPDLSGALEGESVSICEVKPEYRNGVSGFDYERIRAEESLEREMEKYVLFAVNNFARAVTPEEEREKSGHEDVLLMKTLSEIEESQTKEERQKKHDNNVKNAITLYADADRRILQFFGGQSRFREKEDSLINLYSGEDLYKEIRKELYAIRNITFHYTTKAEKDQTQKHDLAEYLFEEEFSDITELFREKYYANNVWKYYDAEVINTIMENIYCGRKYRAAQVPAFKNIISRPELPQVMNGFVKGNSLRRLMNCPDRDVINKYWSALFFVLKELYYYDFLQEQKKPEDNVKERFFRAIKKLSGQEKDDEKQKAWESFGNRIDQIGRDRSFGAICQGLMIEYMLQNSDISMVQTETDNGKANNKKQIYKHYRTLLYNCISEAFIEYLREKWKELRTPVLTAKEWSKEEFCRVDGLKHLSLFDHLKETFNDAESGSSWYMAAHFINQKYLNHLLGSIRNYLQFTEDIEDRAISLGDCVDNKREEKNLRYRNTLEILEFVAQFCERTTNVMEDYFESNQEYAEYLSDFVDYNTTKKETDIEKALYSFCKQKFKVDGKEYMAGIYYDGENLIPNRNIIRANMYGNTSCLKPCMDRITLKEIRTMYADQNKLDLVLKEGVCHTEEEQKAYREYQNEKNRIELFDVCTYTQILNDMQARLIGWSYMRERDLMYYQLGYYYTKLFWTDSISEEDARRRLVGNLVNVEDGAILYQILAFNSYNLPIIANKNNTVTLLKDEGSIGGKAITAFLKNYENAEMIYKEALDLFENMDEHAAIINTRNYIEHFKYFIKSDRSMMDLYSEIYDRFFRHDHNRKKNVPDSLKNVLADNFMIVDIDMELGSKKVGEKKKGFREHKAARIEFTDSGIRSTDMTYTIKPDIKDNKKVLVPARSEVFLKQFRKILEYRIQDKTQ

SEQ ID NO: 2201 - protein, 528 aa, Unknown
  Description of Unknown: uncultivated organism sequence
  Category: MG81 effectors
  Description: MG81-480 effector
MILLAKNNNNTDTCVLTLPLRVEKWQEDCLLKRFEAARRIYNSLLNFELKKLRQLERTVEYRQIQSVISSAYRSNTKDSPECKDAFKRREKLISANGISEYGFKSDVKFFYKHFDGLIGSNVAVHCIAVQLWAAFDKYLRGSGKEIHFKRLGDISSLKGYSVKGKSGGCEIIFRGQYVEWTRKKKKLLLPLKIDPDNEYEREMLSRRVKYVRIIKKPGKNRLRWYAQLTLEGKPALKYSAETGKPIHSVGKGNVGIDIGPQTVAYASDKEVALLELADRVTNIEHQKKKLQRKLDRSRRATNPDNYKPDGTIKRGVKLTRNKSKRYLKLQSKLAYIQHRQAEIRKLQHTCLANHMLTLGDRFFVEKMNWPGLAHRAKETSISEKTGRYKRKKRFGKSLANKAPAMFISILKRKCETLGLPGVVEVDTYSLKASQYNHLSDTYEKKSLSERWNYMPISDGSDSSKTKRIQRDLYSAFLLQHTIPQPCSFDKKALRIDYPNFVTMHDAEIHRLESLPKTITSMGVRRSHS

SEQ ID NO: 2202 - protein, 529 aa, Unknown
  Description of Unknown: uncultivated organism sequence
  Category: MG81 effectors
  Description: MG81-481 effector
MILLANNNNNNTDTCVLTLPLRVEKWQEDCLLKRFEAARRIYNSLLNFELKKLRQLERTVEYRQIQSVISNAYRSNTKDSPECKAALKRREKLIDENGLTKNGFKNDVKFFYKHFDGLIGSSVAVHCIAVQLWAAFNKYLCGNGKEIHFKRLGDISSLKGYSVKGKSGGCEIIFRGQYVEWTRKKKKLLLPLKIDPDNEYEREMLSRRVKYVRIIKKPGKNRLRWYAQLTLEGKPALKYSAETGKPIHSVGKGDVGIDIGPQTVAYASDKEVALLELADRVTNIEHQKKKLQRKLDRSRRATNPDNYKPDGTIKRGVKLTRNKSKRYLKLQSKLAYIQHRQAEIRKLQHTCLANHMLTLGDRFFVEKMNWPGLAHRAKETSISEKTGRYKRKKRFGKSLANKAPAMFISILKQKCETLGLPGVVEVDTFRLKASQYNHLSDTCEKKSLSERWNYMPISDGSDSSKTKRIQRDLYSAFLLQHTIPQSCSFDKEALRIDYPNFVTMHDAEIHRLESLPKTITSMGVRRSHS

SEQ ID NO: 2203 - protein, 318 aa, Unknown
  Description of Unknown: uncultivated organism sequence
  Category: MG81 effectors
  Description: MG81-482 effector
MLSKKIKYLRIVKKWVKTRYKYYLQFALEGKPVKKDRIVNKGNVGIDIGTQTVAISSADSVKILELADKIDKNHTKKKILQRKMDRSRRYTNPQNYNEDGTIKKPPKGQRFSWYKSKKYIQLAGKVRELERKNADIRKYQHTCLANWILSLGDTVYVEQMNFSGLQRRAKETKIDKNGKYAKKKRYGKSLANKAPSMFLTILGSKLNQYGGQLNKINTYEFKASQYDHTDDTFTKHNRSERWHILSNGDKNQRDLYSAFLIMNSDISLKHCNRKKCNETYSNFKVLQDKEIERLYSDIRKGNCKNISSFGFQRNAKAM

SEQ ID NO: 2204 - protein, 535 aa, Unknown
  Description of Unknown: uncultivated organism sequence
  Category: MG81 effectors
  Description: MG81-483 effector
MILLANNNNNNNNNNNNTDTCVLTLPLRVEKWQEDCLLKRFEAARRIYNSLLNFELKKLRQLERTVEYRQIQSVISSAYRSNTKDSPECKDAFKRREKLISANGISEYGFKSDVKFFYKHFDGLIGSNVAVHCIAVQLWAAFDKYLRGSGKEIHFKRLGDISSLKGYSVKGKSGGCEIIFRGQYIEWTRKKKKLLLPLKIDPDNEYEREMLSRRVKYVRIIKKPGKNRLRWYAQLTLEGKPALKYSAETGKPIHSVGKGNVGIDIGPQTVAYASDKEVALLELADRVTNIEHQKKKLQRKLDRSRRATNPDNYKPDGTIKRGVKLTRNKSKRYLKLQSKLAYIQHRQAEIRKLQHTCLANHMLTLGDRFFVEKMNWPGLAHRAKETSISEKTGRYKRKKRFGKSLANKAPAMFISILKRKCETLGLPGVVEVDTYSLKASQYNHLSDTYEKKSLSERWNYMPISDGSDSSKTKRIQRDLYSAFLLQHTIPQPCSFDKKALRIDYPNFVTMHDAEIHRLESLPKTITSMGVRRSHS

SEQ ID NO: 2205 - protein, 508 aa, Unknown
  Description of Unknown: uncultivated organism sequence
  Category: MG81 effectors
  Description: MG81-484 effector
MADKECCVLTLPLQTEIWQEHIIEKRFAIMEHLKNQLIAKELRRLKNLERTKEYRNLIDEINNTPKEKRKALFSKRRKLLKDSGFSEYDFKDDIAGKNSLMQKHFIEHIATQIAHKLASDVWRSFDKFLFGNGRFIHFSKRGSLRSVASQKNGNGMTYKNGYFIWNGGQSKNKIILKIKVTPPKNEYEKEMLSKKIKYLRIVKKWVKTRYKYYLQFALEGKPVKKDRIVNKGNVGIDIGTQTVAISSANSVKILELADKIDKNHTKKKILQRKMDRSRRYTNPQNYNEDGTIKKPPKGQRFSWYKSKKYIQLAGKVRELERKNADIRKYQHTCLANWILSLGDTVYVEQMNFSGLQRRAKETKIDKNGKYAKKKRYGKSLANKAPSMFLTILESKLNQYGGQLNKINTYEFKASQYDHTDDTFTKHNRSERWHILSNGDKNQRDLYSAFLIMNSDISLKHCNREKCNETYSNFKVLQDKEIERLYSDIRKGNCKNISSFGFQRNAKAM

SEQ ID NO: 2206 - protein, 496 aa, Unknown
  Description of Unknown: uncultivated organism sequence
  Category: MG81 effectors
  Description: MG81-485 effector
MAKNEQNCCVLTLPLLTEPWQEHIIETRFRIMEQLKNALIAKELGKLNNLKRTREWKRLMKSIQDAKDEKEKKQLFKKRTELLRNVGFSDFSFSNDVTNLKIHKHFAEHINSGIAQRAGKDVWRAFEKYLFSNGKTVHFHRRGTLDSVANRYAREGMMIDGDILTWKGGQSDHQIVLKIRIRRLKNAYEREMLQKTVRNLRIVRKWMKTRYKYYLQITLQGDPASKYRSVGKGRIGIDIGTQTIAWSSPTEVRLAELAAGIKRNHAEKTALQRKMDRSRRTANPQNYNPDGTIRRGVKLRWVKTKHYLRMEGRVRELERKNADIRQYEHICMANHILSLGNEVYIEDMSFKGLQGRAKETKLDKNGRFARKKRFGKSLANRAPSMFVTILENKLKASGGSLHKVNTRTFRASQYDHTADEFKKKTLGQRWNHLKNGDKIQRDLYSAFLLMNAAPSLEEPDKKLCGKTYPQFNRLHDAEMERLRAEEKPHLSSMGIH

SEQ ID NO: 2207 - protein, 527 aa, Unknown
  Description of Unknown: uncultivated organism sequence
  Category: MG81 effectors
  Description: MG81-486 effector
MAKNNNNNDTDTCVLTLPLRVEKWQEDCLLKRFEAARRIYNSLLNFELKKLRQLERTVEYRQIQSVISSAYRSNTKDSPECKDAFKRREKLISANGISENGFKSDVKFFYKHFDGLIGSSVAVHCIAVQLWAAFDKYLSGSGKEIHFKRLGDISSLKGYSVKGKSGGGEIIFRGQYVEWTRKKKKLLLPLKIDPDNEYEREMLSRRVKYVRIIKKPGKNRLRWYAQLTLEGKPALKYSAETGKPIHSVGKGNVGIDIGPQTVAYASDKEVALLELADRVTNIEHQKKKLQRKLDRSRRATNPDNYKPDGTIKRGVKLTRNKSKRYLKLQSKLAYIQHRQAEIRKLQHTCLANHMLTLGDCFFVEKMNWPGLAHRAKETSISEKTGRYKRKKRFGKSLANKAPAMFISILKRKCETLGLPGVVEVDTFRLRASQYNHLSDTYEKKSLSERWNYMPISDGSDSSKTKRIQRDLYSAFLLQHTIPQPCSFDKEALRIDYPNFVIMHDAEIHRLESLPKTITSMGVRRSHS

SEQ ID NO: 2208 - protein, 511 aa, Unknown
  Description of Unknown: uncultivated organism sequence
  Category: MG81 effectors
  Description: MG81-487 effector
MAARSKTDTCCLTLPLRLEKWQADRLAKRFHIAEQIYNAMLLSWIKKLRVVEQMPEYRAIQSQLQKLYEEDKQKTDAAKELFSRRKEILKKNGFPEYSFKTGIRKYYAHFKENIASNVATHCIASQVWDAFSKKLFGNGGRLHFKRAGDIHSLRGYSKSGESGGVEIIFRGTYIEWNGLRLPLKLDPQNPYEAEMLAKRVKYVRILRTPGKSIDHWYAQLALEGKPTVKRNAATGEPVHPSGRGAVGIDIGPRTIAYVSENEVGLRELADQVENIERDKRRLQRKLDRSRRATNPDNYAPDGTIKRGIKHTHNKSSRYRRMQKELSLLQHRQALIRKRQHTELANHLLSLGDCFYVEDMPWKGLARRTKETTVSPTTGRYRRKKRFGKSISNKAPGTLILILEQKCKSRGVSGVIRVPTNIKASQYNHMTDTYKPKPLSQRWNDMPDGKRIQRDLYSAFLLQHVTPELDGFERTKLIEDYDGFIHLHDKEIHELTLAPKTIASMGISRTRS

SEQ ID NO: 2209 - protein, 511 aa, Unknown
  Description of Unknown: uncultivated organism sequence
  Category: MG81 effectors
  Description: MG81-488 effector
MAKCSTDTCCLTLPLRLEKWQEDRLAKRFEIARQIYNTMVRAELKKLRAIEQSEPYKANQEKIQALDWKTQTDKQALKALYKERDKLLQDGGFSERGFKSDIKNYYKHFNNNIGSNVAVHGIAPQVWAAFEKMLFKKEGKKVHFKKKGDIRSLRGYSITRKSGGVEIIFRETYIEWKGLKLPLKLSPDNSYETQMLSYRVKYVRLLRKPGKRKDRWYAQLSLEGKPVIKYNPKTGEVRHPIGKGAVGLDIGPQTLAYSAATGADLVELANQVQNVEQEKRRLQRKLDRSRRATNPGNYADDGTIRRGIALTHNKSKRYLRTQQELKYLQHQQAEIRKRQHTELANHLLSLGDCFYVEKMVWTSLTHRAKETEISEKTGKIKRKKRFGKSVANKAPATLIGILQRKSAALGIPGVIEVPTSVKASQYNHQSGTYTPKPLSQRWNNMPDGERIQRDLYSAFLLQHYDPQTNTFDANSLHQDYPQFVQYHHDAVLRLYAMPKTPSSMGIKRSLR

SEQ ID NO: 2210 - protein, 511 aa, Unknown
  Description of Unknown: uncultivated organism sequence
  Category: MG81 effectors
  Description: MG81-489 effector
MARCTTPTCVLTLPSHLEKWQEDRLAKRFEIAQKIYNALLGAELKKLRRLEQTPKYRAIKKDLAALYGDKEKNADRIRALYKKRNKLLKDNSFTEYGFTVDAKLYYKPFRTNIGSCVAVHCIAPQVWSAFEKYLFGNGKRIHFKRPGEIYSLRGYSSKTSSGVEIIYRGDHIEWNKLRLPLKLDLGNQYEEEMLTNRVKYVRILRRPGKNRDHWYAQLTLEGLPAIKRDDETGDPVHSIGNGPVGIDIGPQTIAYSSSKEAGLLELADRVQNIENKKCRIQRKMDRSRRAANPGNYNPDGTIKRGVPLTRNKSKRYLRLQNELAWIQHQQAAIRKEQHVALANYLLTLGDCFYIEDMNWQGLARRAKETAIPEPEKERKCRRKKRFGKSIANKAPATLVTILKNKCTSLGLPGVIPISTKVRASQYNHLTDSYQKKELSQRWNEMPDGRKIQRDLYSAFLLQHMNSQLDGFDRASLLRDYESFVSLHDQAILRAAAVPKLISSMGIKRTAN

SEQ ID NO: 2211 - protein, 426 aa, Unknown
  Description of Unknown: uncultivated organism sequence
  Category: MG81 effectors
  Description: MG81-490 effector
MIHISAKYGVDSIFALSKAEDIWRAVEQCLYGDGRTLHFTKYGKLPGIRAKQINRGIRFTVKDNHLCFKLRKIAFGIKINDRFQHDEITAVLSYLNDPEAADRRAVDVFINDGSCIDTYRPCYATLVPKMIRGKYRVYLYLTIEGKAKLKYDRFGNHRHQYGTGMIGADIGIQTVAYTSDTEVGLKNLSERGNSIQHSERKERLLNRAMFRSRQATNPQNFNCNGSVKKGAKNWKYSKHYKKLKYKYSELCRINAINRRLAINEDANHLRSLGDIFVTEPQNVRKLMRRAKKTTRDKNGRFNKKKRFGKSIRCRCPAGFQRTVAKKFVNTGGTYIEVPYNYRASQYDHTADDYIKKKLSARMYKLQDGTKVQRDWYSSFLLYCYNPHTNAIDKTKCAAAFTTQYHKEKTLIEQIKKRKIKVLNSGI

SEQ ID NO: 2212 - protein, 540 aa, Unknown
  Description of Unknown: uncultivated organism sequence
  Category: MG81 effectors
  Description: MG81-491 effector
MATTDKKDEENLRAYKFRLDPNQAQTTALYQAVGAARYTYNMLTAYNLEVNRLRDDYWKRRHDEGISDADIKKELNALAKEDKRYKQLNYGAFGTQYLTPEKKRHEQAEHRIENGEDPSVVWNQETERSANPWLHTANQRVLVSGLQNASDAWDNFWASRTGKRAGRLVGTPRFKKKGISRDSFTVPAPEKMGAYGTAYLRGEPAYKQGRRKITDYRHVRLSYLGTIRTFNSTKPLVKAVAAGAKIRRYTVSRNADRWYVSFLVKFSEPIRRSATKRARAAGSVGVDLGVKYLASLSDSEAPQRFPNLKFVEGLPSLENPRWSEASSRRLHKLQRALARSQKGSNRRSRLVKQIARLHHMTALRRESNLHQLTKKLATEYTLVGFEDLNVSGMTASAKGTVENPGKNVAQKSGLNRVVLDAAFGVFRNQLEYKAVWYGSAFEKVDRYFASSQTCSECGRKAKTKLTLRDRVFDCAYCGNMMDRDLNAAVNICREAQRLFDEKLASEDRESLNGRGSRGALRGAETVEASRPPASHRRGSP

SEQ ID NO: 2213 - protein, 511 aa, Unknown
  Description of Unknown: uncultivated organism sequence
  Category: MG81 effectors
  Description: MG81-492 effector
MAKCSTDTCCLTLPLRLEKWQEDRLAKRFEIARQIYNTMVRAELKKLRAMEQSKPYKANQEKIQALDWKTQADKQALKALYKERDKLLRDGGFSEYGFKSDIKNYYKHFNNNIGSSVAVHGIAPQVWAAFEKMLFKKEGKKVHFKKKGDIHSLRGYSAAGKSGGVEIIFRETYIEWKGLKLPLKLSPDNIYETQMLSYRVKYVRLLRKPGKRKDRWYAQLSLEGKPVIKYNPKTGEVRHPIGKGAVGLDIGPQTLAYSAATGADLVELANQVQNVEQEKRRLQRKLDRSRRATNPGNYADDGTIRRGIALTHNKSKRYLRTQQELKYLQHQQAEIRKRQHTELANHLLSLGDCFYVEKMVWTSLTHRAKETEISEKTGKIKRKKRFGKSVANKAPATLIGILQRKSAALGIPGVIEVPTSVKASQYNHQSGTYTPKPLSQRWNNMPDGERIQRDLYSAFLLQHYDPQTNTFDANSLHQDYPQFVQYHHDAVLRLYAMPKTPSSMGIKRSLR

SEQ ID NO: 2214 - protein, 511 aa, Unknown
  Description of Unknown: uncultivated organism sequence
  Category: MG81 effectors
  Description: MG81-493 effector
MAKCSTDTCCLTLPLRLEKWQEDRLAKRFEIARQIYNTMVRAELKKLRAMEQSEPYKANQEKIQALDWKTQTDKQALKALYKERDKLLRDGGFSEYGFKSDIKNYYKHFNNNIGSNVAFHGIAPQVWAAFEKMLFKKEGQKVHFKKKGDIHSLRGYSAAGKSGGVEIIFRETYIEWKGLKLPLKLSPDNIYETQMLSYRVKYVRLLRKPGKRKDRWYAQLSLEGKPVIKYNPKTGEVRHPIGKGAVGLDIGPQTLAYSAATGADLVELANQVQNVEQEKRRLQRKLDRSRRATNPGNYADDGTIRRGIALTHNKSKRYLRTQQELKYLQHQQAEIRKRQHTELANHLLSLGDCFYVEKMVWTSLTHRAKETEISEKTGKIKRKKRFGKSVANKAPATLIGILQRKSAALGIPGVIEVPTSVKASQYNHQSGTYTPKPLSQRWNNMPDGERIQRDLYSAFLLQHYDPQTNTFDANSLHQDHPQFVQYHHDAVLRLYAMPKTPSSMGIKRSLR

SEQ ID NO: 2215 - protein, 511 aa, Unknown
  Description of Unknown: uncultivated organism sequence
  Category: MG81 effectors
  Description: MG81-494 effector
MREDSQNTCCLTLPLKIEKWQADRLIKRFEIARQIYNTLVHAELKKLQKMEASAEYRKIQDRIRELNPSDVRAKKEWKILKDKQEKLWKAWKITEYGFKSDIKAYYKYFNENIGSAVATHDIAPRVWAAFEKKLNDRTGKVKIQYKKAGDIRSLKGFSVSGKSGGTEIIFHKTYIAWKGLTLPLKLSPDNAYEKEMLMRRIKYVRILRKPGKHKDRWYAQLSLEGNPVVKLDPVSGLPRHPIGKGAVGIDIGPQTLAYSAEGGADLVELADQVQCIEQEKSRLQRKMDRSRRASNPDNYAQDGTIKRGVKLTHNKSRRYCKLQKELAYMLYRQAETRKRQHRELINRLLTMGDCFYIEDMHWNSLAHRAKKTEISEKTGRYKRKKRFGKSIANKAPAMLVDMLKQKCKSLELDVVMVNTSLKASQYNHQTGKYEKKTLSQRWNRMPDGEQIQRDLYSAFLLQHVVPEKNAFDNEALCRDYPKFVQYHHEVIERLRSLPKTISSMGIRRSVS

SEQ ID NO: 2216 - protein, 511 aa, Unknown
  Description of Unknown: uncultivated organism sequence
  Category: MG81 effectors
  Description: MG81-495 effector
MAKCSTDTCCLTLPLRLEKWQEDRLAKRFEIARQIYNTMVRAELKKLRAMEQSEPYKANQEKIQALDWKTQADKQTLKALYKERDKLLQDGGFSERGFKSDIKNYYKHFNNNIGSNVAVHGIAPQVWAAFEKMLFKKEGKKVHFKKKGDIRSLRGYSVTGRSGGVEIIFRETYIEWKGLKLPLKLSPDNIYETQMLSYRVKYVRLLRKPGKRKDRWHAQLSLEGKPVIKYNPKTGEVRHPIGKGAVGLDIGPQTLAYSAATGADLVELANQVQNVEQEKRRLQRKLDRSRRATNPGNYADDGTIRRGIALTHNQSKRYLRTQQELKYLQHQQAEIRKRQHTELANHLLSLGDCFYVEKMVWTSLTHRAKETEISEKTGKIKRKKRFGKSVANKAPATLIGILQRKSAALGIPGVIEVPTSVKASQYNHQSGTYTPKPLSQRWNNMPDGERIQRDLYSAFLLQHYDPQTNTFDANSLHQDYPQFVQYHHDAVLRLYAMPKTPSSMGIKKSLR

SEQ ID NO: 2217 - protein, 540 aa, Unknown
  Description of Unknown: uncultivated organism sequence
  Category: MG81 effectors
  Description: MG81-496 effector
MMYNTKYQAKRGDPVGEKNSNDTDTCVLTLPLRVEKWQEDCLLKRFEAARRIYNSLLNFELKKLRQLERTVEYRQIQSVISSAYLSNTKDSLECKNAFKRREKLISANGISENGFKSDVKFFYKHFDGLIGSSVAVHCIAVQLWAAFDKYLSGSGKEIHFKRLGDISSLKGYSVKGKSGGLEIIFRGQYVEWTRKKKKLLLPLKIDPDNEYEREMLSRRVKYVRIIKKPGKNRLRWYAQLTLEGKPALKYSAGTGKPIHSVGKGNVGIDIGPQTVAYASDKEVALLELADRVTNIEHQKKKLQRKLDRSRRATNPDNYKPDGTIKRGVKLTRNKSKRYLKLQSKLAYIQHRQAEIRKLQHTCLANHMLTLGDRFFVEKMNWPGLAHRAKETSISEKTGRYKRKKRFGKSLANKAPAMFISILKRKCETLGLPGVVEVDTYNLKASQYNHLSDTYEKKSLSERWNYMPISDGSDSSKTKRIQRDLYSAFLLQHTIPQPCSFDKEALRIDYPNFVTMHDAEIHRLESLPKTITSMGVRRSHS

SEQ ID NO: 2218 - protein, 529 aa, Unknown
  Description of Unknown: uncultivated organism sequence
  Category: MG81 effectors
  Description: MG81-497 effector
MILLAKKNNNDTDTCVLTLPLRVEKWQEDCLLKRFEAARRIYNSLLNFELKKLRQLERTVEYRQIQSVISSAYRSNTKDSPECKDAFKRRKKLTDENGISEYGFKSDVKFFYKHFDGLIGSSVAVHCIAVQLWAAFDKYLRGNGKEIHFKRLGDISSLKGYSVRGKSGGCEIIFRGQYVEWTRKKKKLLLPLKIDPDNEYEREMLSRRVKYVRIIKKPGKNRLRWYAQLTLEGKPALKYSAETGKPIHSVGKGDVGIDIGPQTVAYASDKEVALLELADRVTNIEHQKKKLQRKLDRSRRATNPDNYKPDGTIKRGVKLTRNKSKRYLKLQSKLAYIQHRQAEIRKLQHTCLANHMLTLGDRFFVEKMNWPGLAHRAKETSISEKTGRYKRKKRFGKSLANKAPAMFISILKRKCETLGLPGVVEVDTYNLKASQYNHLSDTYEKKSLSERWNYMPISDGSDSSKTKRIQRDLYSAFLLQHTIPQPCSFDKEALRIDYPNFVTMHDAEIHRLESLPKTVTSMGVRRSHS

SEQ ID NO: 2219 - protein, 528 aa, Unknown
  Description of Unknown: uncultivated organism sequence
  Category: MG81 effectors
  Description: MG81-498 effector
MAKNNNNNNNTDTCVLTLPLRVEKWQEDCLLKRFEAARRIYNSLLNFELKKLRQLERTVEYRQIQSVISSAYRSNTKDSPECKDAFKRREKLISANGISENGFKSDVKFFYKHFDGLIGSNVAVHCIAVQLWAAFDKYLSGSGKEIHFKRLGDISSLKGYSVKGKSGGGEIIFRGQYVEWTRKKKKLLLPLKIDPDNEYEREMLSRRVKYVRIIKKPGKNRLRWYAQLTLEGKPALKYSAETGKPIHSVGKGNVGIDIGPQTVAYASDKEVALLELADRVTNIEHQKKKLQRKLDRSRRATNPDNYKPDGTIKCGVKLTRNKSKRYLKLQSKLAYIQHRQAEIRKLQHTCLANHMLTLGDRFFVEKMNWPGLAHRAKETSISEKTGRYKRKKRFGKSLANKAPAMFISILKRKCETLGLPGVVEVDTFRLRASQYNHLSDTYEKKSLSERWNYMPISDGSDSSKTKRIQRDLYSAFLLQHTIPQPCSFDKEALRIDYPNFVIMHDAEIHRLESLPKTITSMGVRRSHS

SEQ ID NO: 2220 - protein, 511 aa, Unknown
  Description of Unknown: uncultivated organism sequence
  Category: MG81 effectors
  Description: MG81-499 effector
MAKCSTDTCCLTLPLRLEKWQEDRLAKRFEIARQIYNTMVRAELKKLRAMEQSEPYKANQEKIQALDWKTQTDKQALKALYKERDKLLRDGGFSEYGFKSDIKNYYKHFNNNIGSNVAFHGIAPQVWAAFEKMLFKKEGKKVHFKKKGDIHSLRGYSAAGKSSGVEIIFRETYIEWKGLKLPLKLSPDNIYETQMLSYRVKYVRLLRKPGKRKDRWYAQLSLEGKPVIKYNPKTGEVRHPIGKGAVGLDIGPQTLAYSAATGADLVELANQVQNVEQEKRRLQRKLDRSRRATNPGNYADDGTIRRGIALTHNKSKRYLRTQQELKYLQHQQAEIRKRQHTELANHLLSLGDCFYVEKMVWTSLTHRAKETEISEKTGKIKRKKRFGKSVANKAPATLIGILQRKSAALGIPGVIEVPTSVKASQYNHQSGTYTPKPLSQRWNNMPDGERIQRDLYSAFLLQHYDPQTNTFDANSLHQDYPQFVQYHHDAVLRLYAMPKTPSSMGIKRSLR

SEQ ID NO: 2221 - protein, 525 aa, Unknown
  Description of Unknown: uncultivated organism sequence
  Category: MG81 effectors
  Description: MG81-500 effector
MANNNNNTDTCVLTLPLRVEKWQEDCLLKRFEAARRIYNSLLNFELKKLRQLERTVEYRQIQSVISSAYRSNTKDSPECKAALKRREKLIDENGLTKNGFKNDVKFFYKHFDGLIGSSVAVHCIAVQLWAAFNKYLCGNGKEIHFKRLGDISSLKGYSVKGKSGGCEIIFRGQYVEWTRKKKKLLLPLKIDPDNEYEREMLSRRVKYVRIIKKPGKNRLRWYAQLTLEGKPALKYSAETGKPIHSVGKGDVGIDIGPQTVAYASDKEVALLELADRVTNIEHQKKKLQRKLDRSRRATNPDNYKPDGTIKRGVKLTRNKSKRYLKLQSKLAYIQHRQAEIRKLQHTCLANHMLTLGDRFFVEKMNWPGLAHRAKETSISEKTGRYKRKKRFGKSLANKAPAMFISILKQKCETLGLPGVVEVDTFRLKASQYNHLSDTCEKKSLSERWNYMPISDGSDSSKTKRIQRDLYSAFLLQHTIPQSCSFDKEALRIDYPNFVTMHDAEIHRLESLPKTVTSMGVRRSHS

SEQ ID NO: 2222 - protein, 511 aa, Unknown
  Description of Unknown: uncultivated organism sequence
  Category: MG81 effectors
  Description: MG81-501 effector
MREDSQNTCCLTLPLKIEKWQADRLIKRFEIARQIYNTLVHAELKKLQKMEASAEYRQIQDRIRELNPSDVRAKKEWKILKDKQEKLWKAWKITEYGFKSDIKAYYKYFNENIGSAVATHDIAPRVWAAFEKKLNDRTGKVKIQYKKAGDIRSLKGFSVSGKSGGTEIIFHKTYIAWKGLTLPLKLSPDNAYEKEMLMRRIKYVRILRKPGKHKDRWYAQLSLEGNPVVKLDPVSGLPRHPIGKGAVGIDIGPRTLAYSAEGGADLVELADQVQCIEQEKSRLQRKMDRSRRASNPDNYAQDGTIKRGVKLTHNKSRRYCKLQKELAYMLYRQAETRKRQHRELINRFLTMGDCFYIEDMHWNSLAHRAKKTEISEKTGRYKRKKRFGKSIANKAPAMLVDMLKQKCKSLELDVVMVNTSLKASQYNHQTGKYEKKTLSQRWNHMPDGEQIQRDLYSAFLLQHVVPEKNAFDNEALCRDYPKFVQYHHEVIERLRPLPKTISSMGIRRSVS

SEQ ID NO: 2223 - protein, 543 aa, Unknown
  Description of Unknown: uncultivated organism sequence
  Category: MG81 effectors
  Description: MG81-502 effector
MATTDKKDEENLRAYKFRLDPNQAQTTALYQAVGAARYTYNMLTAYNSEVNRLRDDYWKKRHDEGISDADIKKELKALAKEDKRYKQLKYGAFSTQYLTPERDRHKDAALRIKNGEDPSVVWNQETERSANPWLHTVNRRVLVSGLQNASDAWDNFWDSRMGKRAGRLVGTPRFKKKGVSRDSFTVPAAEKAEKMGAYGTAYLRGEPAYKQGRRKITDYRHVRLSYLGTIRTFNSTKPLVKAVAAGAEIRSYTVSRNADRWYVSFLVKFSEPIRRSVTKRARAAGAVGVDLGVKYLASLSDSEAPQRFPNLKFAEGLPSLENPRWSEASSRRLHKLQRALVRSQKGSNRRSRLVKQIARLHHMTALRRESNLHQLTKKLATGYTLVGFEDLNVSGMTASAKGTVENPGKNVAQKSGLNRVVLDAAFGVFRNQLEYKAVWYGSAFEKVNRYFASSQMCSECGRKVKTKLTLRDRVFDCVYCGNMMDRDFNAAVNICREAQRLFDEKLASEDGESLNGRGSRGALRGAKTVEASRPPASHRRGSP

SEQ ID NO: 2224 - protein, 511 aa, Unknown
  Description of Unknown: uncultivated organism sequence
  Category: MG81 effectors
  Description: MG81-503 effector
MAKCSTDTCCLKLPLRLEKWQEDRLAKRFEIARQIYNTMVRAELKKLRAMEQSEPYKANQEKIQALDWKTQADKQALKALYKERDKLLRDGGFSEYGFKSDIKNYYKHFNNNIGSSVAVHGIAPQVWAAFEKMLFKKEGKKVHFKKKGDIRSLRGYSATGKSGGVEIIFRETYIEWKGLKLPLKLSPDNIYETQMLSYRVKYVRLLRKPGKRKDRWYAQLSLEGKPVIKYNPKTGEVRHPIGKGAVGLDIGPQTLAYSAATGADLVELANQVQNVEQEKRRLQRKLDRSRRATNPGNYADDGTIRRGIALTHNKSKRYLRTQQELKYLQHQQAEIRKRQHTELANHLLSLGDCFYVEKMVWTSLTHRAKETEISEKTGKIKRKKRFGKSVANKAPATLIGILQRKSAALGIPGVIEVPTSVKASQYNHQSGTYTPKPLSQRWNNMPDGERVQRDLYSAFLLQHYDPQTNTFDANSLHQDYPQFVQYHHDAVLRLYAMPKTPSSMGIKKSLR

SEQ ID NO: 2225 - protein, 511 aa, Unknown
  Description of Unknown: uncultivated organism sequence
  Category: MG81 effectors
  Description: MG81-504 effector
MREDSQNTCCLTLPLKIEKWQADRLIKRFEIARQIYNTLVHAELKKLQKMEASAEYRKIQDRIRELNPSDVRAKKEWKILKDKQEKLWKAWKITEYGFKSDIKAYYKYFNENIGSAVATHDIAPRVWAAFEKKLNDRTGKVKIQYKKAGDIRSLKGFSVSGKSGGTEIIFHKTYIAWKGLTLPLKLSPDNAYEKEMLMRRIKYVRILRKPGKHKDRWYAQLSLEGNPVVKLDPVSGLPRHPIGKGAVGIDIGPQTLAYSAEGGADLVELADQVQCIEQEKSRLQRKMDRSRRASNPDNYAQDGTIKRGVKLTHNKSRRYCKLQKELAYMLYRQAETRKRQHRELINRLLTMGDCFYIEDMHWNSLAHRAKKTEISEKTGRYKRKKRFGKSIANKAPAMLVDMLKQKCKSLELDVVMVNTSLKASQYNHQTGKYEKKTLSQRWNHMPDGEQIQRDLYSAFLLQHVVPEKNAFDNEALCREYPKFVQYHHEVIERLRSLPKTISSMGIRRSVS

SEQ ID NO: 2226 - protein, 530 aa, Unknown
  Description of Unknown: uncultivated organism sequence
  Category: MG81 effectors
  Description: MG81-505 effector
MILLAKNNNNNNTDTCVLTLPLRVEKWQEDCLLKRFEAARRIYNSLLNFELKKLRQLERTVEYRQIQSVISSAYRSNTKDSPECKDAFKRREKLISANGISENGFKSDVKFFYKHFDGLIGSNVAVHCIAVQLWAAFDKYLSGSGKEIHFKRLGDISSLKGYSVKGKSGGCEIIFRGQYVEWTRKKKKLLLPLKIDPDNEYEREMLSRRVKYVRIIKKPGKNRLRWYAQLTLEGKPALKYSAETGKPIHSVGKGNVGIDIGPQTVAYASDKEVALLELADRVTNIEHQKKKLQRKLDRSRRATNPDNYKPDGTIKCGVKLTRNKSKRYLKLQSKLAYIQHRQAEIRKLQHTCLANHMLTLGDRFFVEKMNWPGLAHRAKETSISEKTGRYKRKKRFGKSLANKAPAMFISILKRKCETLGLPGVVEVDTFRLRASQYNHLSDTYEKKSLSERWNYMPISDGSDSSKTKRIQRDLYSAFLLQHTIPQPCSFDKEALRIDYPNFVIMHDAEIHRLESLPKTITSMGVRRSHS

SEQ ID NO: 2227 - protein, 498 aa, Unknown
  Description of Unknown: uncultivated organism sequence
  Category: MG81 effectors
  Description: MG81-506 effector
MKRFEAARRIYNSLLNFELKKLRQLERTVEYRQIQSVISSAYRSNTKDSPECKAALKRREKLIDENGLTKNGFKNDVKFFYKHFDGLIGSSVAVHCIAVQLWAAFNKYLCGNGKEIHFKRLGDISSLKGYSVKGKSGGCEIIFRGQYVEWTRKKKKLLLPLKIDPDNEYEREMLSRRVKYVRIIKKPGKNRLRWYAQLTLEGKPALKYSAETGKPIHSVGKGDVGIDIGPQTVAYASDKEVALLELADRVTNIEHQKKKLQRKLDRSRRATNPDNYKPDGTIKRGVKLTRNKSKRYLKLQSKLAYIQHRQAEIRKLQHTCLANHMLTLGDRFFVEKMNWPGLAHRAKETSISEKTGRYKRKKRFGKSLANKAPAMFISILKQKCETLGLPGVVEVDTFRLKASQYNHLSDTCEKKSLSERWNYMPISDGSDSSKTKRIQRDLYSAFLLQHTIPQSCSFDKEALRIDYPNFVTMHDAEIHRLESLPKTITSMGVRRSHS

SEQ ID NO: 2228 - protein, 511 aa, Unknown
  Description of Unknown: uncultivated organism sequence
  Category: MG81 effectors
  Description: MG81-507 effector
MAKCSTDTCCLTLPLRLEKWQEDRLAKRFEIARQIYNTMVRAELKKLRAMEQSEPYKANQEKIQALDRKTQTDKQALKALYKERDKLLRDGGFSEYGFKSDIKNYYKHFNNNIGSNVAFHGIAPQVWAAFEKMLFKKEGKKVHFKKKGDIHSLRGYSAAGKSGGVEIIFRETYIEWKGLKLPLKLSPDNIYETQMLSYRVKYVRLLRKPGKRKDRWYAQLSLEGKPVIKYNPKTGEVRHPIGKGAVGLDIGPQTLAYSAATGADLVELANQVQNVEQEKRRLQRKLDRSRRATNPGNYADDGTIRRGIALTHNKSKRYLRTQQELKYLQHQQAEIRKRQHTELANHLLSLGDCFYVEKMVWTSLTHRAKETEISEKTGKIKRKKRFGKSVANKAPATLIGILQRKSAALGIPGVIEVPTSVKASQYNHQSGTYTPKPLSQRWNNMPDGERIQRDLYSAFLLQHYDPQTNTFDANSLHQDYPQFVQYHHDAVLRLYAMPKAPSSMGIKRSLR

SEQ ID NO: 2229 - protein, 550 aa, Unknown
  Description of Unknown: uncultivated organism sequence
  Category: MG81 effectors
  Description: MG81-508 effector
MGWKSKGRGGTLVDNEEKKEDGATCCLTLPLKLEKWQSDHLEKRFEIARQLYNTLVHAELKKKCQVERMPEYQEIMKMIDAASNQKEKWALEKKRKAFLEENGFSRNAFKADMEKYYKHFNDNIGANVALHGITAQVWIAFDKVFVDNYKQKGKVHFKKPGELCSVQGYSQKKSGGKEIMFREDRIIWNQQGNRDRKKVKREFLLKLSPDNPYEAEMLKRHVKFVRILRKDGKTKPHWYAQLVLEGKPAVKRDPASGAPKHPIGHGVVGIDIGTRTLAYSTDSEVNLLELADRVQNIEQEKRRLQRKMDRSRRAMNPGNYKPDGSIKQGVKLTWNNSKRYKRIQHQYAMIQHHQADIRKQQHNELANYLLTLGDCFFVENMSYCDLAHRANKTEISEKTGRYKRKKRFGKSIANKAPAMLITMLKQKCQSRGLEGVKEVDTHVCASQYNHQTDTCIKKALENRWNIMPDGERIQRDLYSAFLLQHCRRDLPEYNRKELQKEFGEELYRVFDREALQRDYPQFVAYHHMTIQRLSELPHTIPSMGIRRIIS

SEQ ID NO: 2230 - protein, 526 aa, Unknown
  Description of Unknown: uncultivated organism sequence
  Category: MG81 effectors
  Description: MG81-509 effector
MAKNNNNDTDTCVLALPLRVEKWQEDCLLKRFEAARRIYNSLLNFELKKLRQLERTVEYRQIQSVISSAYRSNTKDSPECKDAFKRREKLISANGISEYGFKSDVKFFYKHFDGLIGSSVAVHCIAVQLWVAFDKYLSGSGKEIHFKRLGDISSLKGYSVKGKSGGLEIIFRGQYVEWTRKKKKLLLPLKIDPDNEYEREMLSRRVKYVRIIKKPGKNRLRWYAQLTLEGKPALKYSAETGKPIHSVGKGNVGIDIGPQTVAYASDKEVALLELADRVTNIEHQKKKLQRKLDRSRRATNPDNYKPDGTIKRGVKLTRNKSKRYLKLQSKLAYIQHRQAEIRKLQHTCLANHMLTLGDRFFVEKMNWPGLAHRAKETSISEKTGRYKRKKRFGKSLANKAPAMFISILKRKCETLGLPGVVEVDTYSLKASQYNHLSDTYEKKSLSERWNYMPISDGSDSSKTKRIQRDLYSAFLLQHTIPQPCSFDKKALRIDYPNFVTMHDAEIHRLESLPKTITSMGVRRSHS

SEQ ID NO: 2231 - protein, 529 aa, Unknown
  Description of Unknown: uncultivated organism sequence
  Category: MG81 effectors
  Description: MG81-510 effector
MILLAKNNNNNTDTCVLTLPLRVEKWQEDCLLKRFEAARRIYNSLLNFELKKLRQLERTVEYRQIQSVISSAYRSNTKDSPECKDAFKRREKLISANGISEYGFKSDVKFFYKHFDGLIGSSVAVHCIAVQLWAAFDKYLRGSGKEIHFKRLGEISSLKGYSVKGKSGGLEIIFRGQYVEWTRKKKKLLLPLKIDPDNEYEREMLSRRVKYVRIIKKPGKNRLRWYAQLTLEGKPALKYSAETGKPIHSVGKGNVGIDIGPQTVAYASDKEVALLELADRVTNIEHQKKKLQRKLDRSRRATNPDNYKPDGTIKRGVKLTRNKSKRYLKLQSKLAYIQHRQAEIRKLQHTCLANHMLTLGDRFFVEKMNWPGLAHRAKETSISEKTGRYKRKKRFGKSLANKAPAMFISILKQKCETLGLPGVVEVDTFRLKASQYNHLSDTCEKKSLSERWNYMPISDGSDSSKTKRIQRDLYSAFLLQHTIPQSCSFDKEALRIDYPNFVTMHDAEIHRLESLPKTITSMGVRRSHS

SEQ ID NO: 2232 - protein, 512 aa, Unknown
  Description of Unknown: uncultivated organism sequence
  Category: MG81 effectors
  Description: MG81-511 effector
MKKSSTDTCCLTLPLKLEKWQEDRLAKRFEIARQLYNTLVHAELKRLAQVKQTAEYRENERKIRALDWNDPGDQTKLKGLYKERRKSLKTAGFTDYSFTTDMGKYYKHFRDNIGSSVAVHGIAPQVWAAFDKLLFKKGGKKVHYKKPGEVNSVQGYSRTGKSGGTEIMFRGPYIEWKGLKLPLKLSPDNAYETDMLQRRVKLVRLVRRPGKRRGRWYAQLVLEAKPAIKADPVTGKAVHPIGSGPVGLDIGPQTLAYSAAGAAGLVELADRVQNIEQEKRCLQRKMDRSRRAANPDNYAEDGTIRRGVKLTHNKSKRYRRSQQELKYLQHRQAEIRKLQHIQLANHLLSLGDHFYVEKMEWSSLTHRAKKTVISEKTGKPRSKKRFGKSIANKAPAMLIEILRQKCKSLGLPNVVEINPADIKASQYNHLTGEYVKKSLSRRWNEMQDGEHLQRDLYSAFLLQHYDSMSKALDLDSLARDYPAFVQYHHREIERLHALPKTPASMGIRRSIA

SEQ ID NO: 2233 - protein, 511 aa, Unknown
  Description of Unknown: uncultivated organism sequence
  Category: MG81 effectors
  Description: MG81-512 effector
MREDSQNTCCLTLPLKIEKWQADRLIKRFEIARQIYNTLVHAELKKLQKMEASAEYRQIQDRIRELNPSDAGAKKEWKILKDKQEKLWKAWKITEYGFKSDIKAYYKYFNENIGAAGATHDIAPRVWAAFEKKLNDRTGKVKIQYKKAGDIRSLKGFSVSGKSGGTEIIFHKTYIAWKGLTLPLKLSPDNAYEKEMLMRRIKYVRILRKPGKHKDRWYAQLSLEGNPVVKLDPVSGLPRHPIGKGAVGIDIGPQTLAYSAEGGADLVELADRVQCIEQEKSRLQRKMDRSRRASNPDNYAQDGTIKRGVKLTHNKSRRYCKLQKELAYMLYRQAETRKRQHRELINRLLTMGDCFYIEDMHWNSLAHRAKKTEISEKTGRYKRKKRFGKSIANKAPAMLVDMLEQKCKSLELDVVMVNTSLKASQYNHQTGKYEKKTLSQRWNRMPDGEQIQRDLYSAFLLQHVVPEKNAFDNEALCRDYPKFVQYHHEVIERLRSLPKTISSMGIRRSVS

SEQ ID NO: 2234 - protein, 511 aa, Unknown
  Description of Unknown: uncultivated organism sequence
  Category: MG81 effectors
  Description: MG81-513 effector
MREHSQNTCCLTLPLKIEKWQADRLIKRFEIARQIYNTLVHAELKKLQKMEASAEYRQIQDRIRELNPSDAGAKKEWKILKDKQEKLWKAWKITEYGFKSDIKAYYKYFNENIGAAGATHDIAPRVWAAFEKKLNDRTGKVKIQYKKAGDIRSLKGFSVSGKSGGTEIIFHKTYIAWKGLTLPLKLSPDNAYEKEMLMRRIKYVRILRKPGKHKDRWYAQLSLEGNPVVKLDPVSGLPRHPIGKGAVGIDIGPQTLAYSAEGGADLVELADRVQCIEQEKSRLQRKMDRSRRASNPDNYAQDGTIKRGVKLTHNKSRRYCKLQKELAYMLYRQAETRKRQHRELINRLLTMGDCFYIEDMHWNSLAHRAKKTEISEKTGRYKRKKRFGKSIANKAPAMLVDMLEQKCKSLELDVVMVNTSLKASQYNHQTGKYEKKTLSQRWNRMPDGEQIQRDLYSAFLLQHVVPEKNAFDNEALCRDYPKFVQYHHEVIERLRSLPKTISSMGIRRSVS

SEQ ID NO: 2235 - protein, 536 aa, Unknown
  Description of Unknown: uncultivated organism sequence
  Category: MG81 effectors
  Description: MG81-514 effector
MDNEEKKEDGATCCLTLPLKLEKWQSDHLEKRFEIARQLYNTLVHAELKRIHRIERMPEYREIERLIEATTDKKEKWALKNQKKQFLRKNGINRNTFTTDMKRLYKHFNDNIGSNVAQHGIVSQVLTAFEKVYIENQSGEVHFKKPGDLRSVQGYSQKKSGGVEIMFREGKIIWNQQGNNDRKGVAREFPLKLSPDNSYEAEMLKKHVKFVRILRNEGKTKPHWYAQLVLEGKPAIKRDPASGAPKHPVGHGAVGIDIGTRTLAYSADSKVDLIELADLVQNIEQEKLLLQRKLDRSRRATNPENYKPDGTIKKGVKLTRNKSKRYRKIQHQLAMLQHRQADIRKRQHNELANYLLTLGDCFFVEDMDYRALTRKAKKTEISEKTGRYKRKKRFWKSIANKAPSMLIALLDQKCKSLNLEGVKKVDTAVKASQYNHQTDECKAKELKERWNIMPDGERIQRDLYSAFLLQHCRRDLPEYNRKELQKEFGEELYRVFDREALQRDYPQFVAYHHMTIQRLSELPHTIPSMGIRRIIS

SEQ ID NO: 2236 - protein, 542 aa, Unknown
  Description of Unknown: uncultivated organism sequence
  Category: MG81 effectors
  Description: MG81-515 effector
MATTDKKDKDKEKLRAYKFRLDPNQAQTIALYQAAGAARYTYNMLTAYNLEVNRLRDDYWKKRHDEGISDADIKKELNALTKEDKRYKQLKYGAFGTQYLTPEKKRHEQAEHRIENGEDPSVVWNQETERSANPWLHTANQRVLVSGLQNASDAWDNFWASRTGKRAGRLVGAPRFKKKGISRDSFTVPAAETMGAYGTAYLRGEAAYQQGKRTITDYRHVRLSYLGVIRTYDSTKPLVKAVAAGAEIRSYTVSRNADRWYVSFLVKFSEPIRRSATKRARAAGAVGVDLGVKYLASLSDSEAPQRFPNLKFAEGLPSLENPRWSEASSRRLHKLQRALARSQKGSNRRSRLVKQIARLHHMTALRRESNLHQLTKKLSTGYTLVGLEDLNVSGMTASAKGTVENPGKNVAQKSGLNRVVLDAAFGVFRYQLEYKTAWYGSTLEKIDRYFASSQTCSECGRKAKTKLTLRDRVFDCAYCGNMMDRDFNAAVNICREAQRLFNKKLASENGESLNGRGSRGALQGAETVEASRPPTSHRRGSP

SEQ ID NO: 2237 - protein, 512 aa, Unknown
  Description of Unknown: uncultivated organism sequence
  Category: MG81 effectors
  Description: MG81-516 effector
MKKCTTDTCCLTLPLKLEKWQEDRLAKRFEIARQIYNTLVRAEFKKLNELERTPEYKKILEQIHSLDWKDSGSRQRLNDLYRERNQILKNAKFTEYGFKSDMKFYYKHFSDNIGSCVAVHGIAPQVWAAFEKYLFKPEGKKVHFKRFGDVHSLRGYSKAGESGGAEITFCGTHIRWKNLELPIKLSPDNAYETEMLSRRVKYVRILRKPGKSKDRWYVQLSLEGKPAIKYDRNAGEIKHPVAHGAVGLDIGPQTLAYSAETTADLVELADQVQNIEQEKRRLQRKMDRSRRSTNPGNYNTDGTIRRGVKLTRNKSKAYCKLQRQLAYLQHTQAETRKRQHTELANYLLSLGDCFYVEEMKWSSLAHRAKETAVSEKTGRFKQKKRFGKSIANKAPSTLIGILQQKCESLGLPGIIYVPLSAKASQYNHLTGEYTPKPLSQRWNTMPDAQRVQRDLYSAFLLQHFDSQAGTYNLQSLQRDYPQFLQYHDQSIRRLSEMPKTLSSMGIRKSIRA

SEQ ID NO: 2238 - protein, 535 aa, Unknown
  Description of Unknown: uncultivated organism sequence
  Category: MG81 effectors
  Description: MG81-517 effector
MILLANNNNNNNNNNNNTDTCVLTLPLRVEKWQEDCLLKRFEAARRIYNSLLNFELKKLRQLERTVEYRQIQSVISSAYRSNTKDSLECKDAFKRREKLISANGISENGFKSDVKFFYKHFDGLIGSNVAVHCIAVQLWAAFDKYLSGSGKEIHFKRLGDISSLKGYYVKGKSGGCEIIFRGQYVEWTRKKKKLLLPLKIDPDNEYEREMLSRRVKYVRIIKKPGKNRLRWYAQLTLEGKPALKYSAGTGKPIHSVGKGNVGIDIGPQTVAYASDKEVALLELADRVTNIEHQKKKLQRKLDRSRRATNPDNYKPDGTIKRGVKLTRNKSKRYLKLQSKLAYIQHRQAEIRKLQHTCLANHMLTLGDRFFVEKMNWPGLAHRAKETSISEKTGRYKRKKRFGKSLANKAPAMFISILKRKCETLGLPGVVEVDTYSLKASQYNHLSDTYEKKSLSERWNYMPISDGSDSSKTKRIQRDLYSAFLLQHTIPQPCSFDKEALRIDYPNFVTMHDAEIHRLESLPKTITSMGVRRSHS

SEQ ID NO: 2239 - protein, 524 aa, Unknown
  Description of Unknown: uncultivated organism sequence
  Category: MG81 effectors
  Description: MG81-518 effector
MAKNNNTDTCVLTLPLRVEKWQEDCLLKRFEAARRIYNSLLNFELKKLRQLERTVEYRQIQSVISSAYRSNTKDSPECKDAFKRREKLISANGISEYGFKSDVKFFYKHFDGLIGSNVAVHCIAVQLWAAFDKYLRGSGKEIHFKRLGDISSLKGYSVKGKSGGREIIFRGQYIEWTRKKKKLLLPLKIDPDNEYEREMLSRRVKYVRIIKKPGKNRLRWYAQLTLEGKPALKYSAGTGKPIHSVGKGNVGIDIGPQTVAYASDKEVALLELADRVTNIEHQKKKLQRKLDRSRRATNPDNYKPDGTIKRGVKLTRNKSKRYLKLQSKLAYIQHRQAEIRKLQHTCLANHMLTLGDRFFVEKMNWPGLAHRAKETSISEKTGRYKRKKRFGKSLANKAPAMFISILKRKCETLGLPGVVEVDTYSLKASQYNHLSDTYEKKSLSERWNYMPISDGSDSSKTKRIQRDLYSAFLLQHTIPQPCSFDKEALRIDYPNFVTMHDAEIHRLESLPKTVTSMGVRRSHS

SEQ ID NO: 2240 - protein, 510 aa, Unknown
  Description of Unknown: uncultivated organism sequence
  Category: MG81 effectors
  Description: MG81-519 effector
MAARASTDTCCLTLPLLLEKWQSDRLEKRFEIARQIYNTLLRFELKKLERLKQTEEYQAILEKLQALDDSAQSGAERKTLFRELDAMRKKAGFTEYGFKSDIKDFYKHFNDNIGSNVAVHGIAPQVWQAFDRLFYGNGKKIHFKKRGDIHSLRGYSVAGKSGGVEIIYRGAFVEWKGLKLRIKHDSSNEYETEMLQNRIKYCRIVKREGKNKTRWYVQLMLEGKPAVKRDKQTDAPKHPVGQGSVGIDIGPQTIAYVANHEAALLELADKVQNIEREKRILLRKLDRSRRATNPDNYREDGTICSGKKLVWHKSNRYLRCQKQLSYLMRQQAEIRKAQHNELANHLLSLGDRFFVEDMEWPALTHRSKKTEISEKTGRYKKKKRFGKSVGNKAPALLIELLNQKLHSRGKEGVIKVPTTVRASQYNHITDTYQKKELSQRWNEMPDGKRIQRDLYSAFLLQHMNEAQTGFDRSALQRDYQAFTQLHDQVIDELRQAPKTIASMGVVRTKR

SEQ ID NO: 2241 - protein, 356 aa, Unknown
  Description of Unknown: uncultivated organism sequence
  Category: MG81 effectors
  Description: MG81-520 effector
MEATKTLKLRIKDKHAAVLSLMAREVNQVWNYCNETSSRAIRERREWLSGFDLQKLTAGYSKCEGVRIGSATVQLVCEEYATRRKQFKKARLNWRVSNPKSAKYSLGWVPFKAGGVKYKAGQVSFLGHRFSLWDSYGLSRFDLRAGSFSQDARGRWYLNVCVKVDVPKSAGTGLVGVDLGLKTAATCSDGEELASGLYRKHEGALGIAQRARKKGRVRAIHAKIANTRKDAMHKFSTGLVARNAAIFVGNVSADAMVKTRMAKSTLDAGWSMLKTMLEYKSHQAGIVFEEVNEAYTTQTCSSCGVIPSSSPKGRTGLRMRRWTCCGCGAEHDRDVNAAMNIAARGHARLAGGIPVL

SEQ ID NO: 2242 - protein, 534 aa, Unknown
  Description of Unknown: uncultivated organism sequence
  Category: MG81 effectors
  Description: MG81-521 effector
MGWKSTGRGGTRVKRSSTDTCCLTLPLKLEKWQSDRLEKRFEIGRQIYNTIVHAELKKLRKLERTQQYQEIEQKLENAKQEETKELWKKKRQLLDQNGLSENHFKADMKYYYPHFKDNIASSVAVHGIASQAWTAFEKVLLSKDGKMVHFKKKGELSSLRGYSQAGKSGGIEIIFRGSYVEWKGLKLPLQLSPNNEYETEMLSKRVKYVRILRKDGKTKTHWYAQLALEGKPAVKRDSISGAPKHPVGHGVVGIDIGTRTLAYSTDSAVNLLELADRVQNIEQEKRRLQRKMDRSRRAMNPGNYKPDGSIKQGVKLTWNNSKRYKRIQHQYAMIQHHQADIRKQQHNELANYLLTLGDCFFVENMSYCDLAHRANKTEISEKTGRYKRKKRFGKSIANKAPAMLITMLKQKCQSRGLKGVKEVDTHVRASQYNHQTDTCIEKALENRWNVMPDGERIQRDLYSAFLLQHCKQGLSEYNRKELKKEFGEELYRVFDREALQRDYPQFVAYHHMTIQRLSELPHTIPSMGIRRIIS

SEQ ID NO: 2243 - protein, 538 aa, Unknown
  Description of Unknown: uncultivated organism sequence
  Category: MG81 effectors
  Description: MG81-522 effector
MNNEEKEKEGATCCLTLPLKLEKWQSDHLEKRFEIARQLYNTLVHAELKKKCQVERMPEYQEIMKMIDTASNQKEKWALEKKRKAFLEENGFSRNAFKADMEKYYKHFNDNIGANVALHGITAQVWIAFDKVFVDNYKQKGKVHFKKPGELCSVQGYSQKKSGGKEIMFREDRIIWNQQGNRDRKKVKREFLLKLSPDNPYEAEMLKRHVKFVRILRKDGKTKPHWYAQLVLEGKPAVKRDPASGAPKHPIGHGVVGIDIGTRTLAYSTDSEVNLLELADRVQNIEQEKRRLQRKMDRSRRAMNPGNYKPDGSIKQGVKLTWNNSKRYKRIQHQYAMIQHHQADIRKQQHNELANYLLTLGDCFFVENMSYCDLAHRANKTEISEKTGRYKRKKRFGKSIANKAPAMLITMLKQKCQSRGLEGVKEVDTHVCASQYNHQTDTCIKKALENRWNIMPDGERIQRDLYSAFLLQHCRRDLPEYNRKELQKEFGEELYRVFDREVLQRDYPQFVAYHHMTIQRLSELPHTIASMGIRRSIS

SEQ ID NO: 2244 - protein, 505 aa, Unknown
  Description of Unknown: uncultivated organism sequence
  Category: MG81 effectors
  Description: MG81-523 effector
MAKATTDTCCLTLPLKLEKWQEDRLDKRLEIARKIYNTLVNFELKKLRKLEANSDYIALQEKLKETTNNTERKKLYKEIDKLRKEAGFTEYAFKSDVKAFYKVFNANIGSAVAVHGIAPQVWAAFDRLFYGNGKAVHFKRYGEINSLRGYSVAGKSGGVEIIYHETHIEWKGLKLPIKLDPDNDYEREMLQYRVKYCRIIRKPGRNKNHWYVQLSLEGKPAVKYDRNTGEVRHPVGSGAVGIDIGPQTIAYASDTEVALKELADKVNNIEQKKRVLQRKLDRSRRATNPDNYAPDGTIRRGVKLTRNKSRKYLKCQKELAYIQRQQADIRKRQHNELANHLLILGDRFYVEDMEWPALTHRAKKTEISEKTGKIKRKKRFGKSVGNKAPASLIGLLDLKLKSRGLAGVIRVDTRVRASQYNHLSDDYRKKELRDRWNDMPDGRHIQRDLYSAFLLQHMNEKQDGFDKAALHRDYEQFTERHNQCIEELRTAPKTLASMGIVRRAG

SEQ ID NO: 2245 - protein, 521 aa, Unknown
  Description of Unknown: uncultivated organism sequence
  Category: MG81 effectors
  Description: MG81-524 effector
MLILGRRMYMPAKQKEGGNRCVLTLPLLTEPWQEHIIEKRFKIIEHLKNQLISIELRKLKNLQRTKAYKNLIKQIESVPKSERTALYKERNKMLKDAGFSQYTFMDDMAGKKSLMQKHFESHINVQIAHKAAIDVWSSFEKFLFGTGQIVHYQKRGTLSSVASKSPKTGMFYYSDENIFKWSGGGTKPKGGIILCLRVAPVKTNYEKEMVANNETKYYRVVRKWMKTKYKYYLQITFAGKPADKHREISTGRVGIDIGTQTIAIASDKSVKLLELADKVNKNHIKKCELQRKLDRSRRYTNPDNFNPDGTVKRGTKGHKLKWNKSKHYIEIAGKIRELERKNADIRKYQHTCLANDILAMGNQIYIEPMNYKGLQKRAKETQVDEKGRYKKKKRFGKSLANKAPAMFVTILKTKVEQHGGEVYEVDIMSYRASQCDHTTGEYTKHGLNDRWRILGNGDKVQRDLYSAFLIKNSNKTHDEIDLDKCSKTYDNFKKLHDKEIENIRNEVKLRERKNISSYGIA

SEQ ID NO: 2246 - protein, 511 aa, Unknown
  Description of Unknown: uncultivated organism sequence
  Category: MG81 effectors
  Description: MG81-525 effector
MGKSSTDTCCLTLPLKLEKWQEDRLAKRFEIARQIYNTMVRAELKKLERVKQLPEYRKNQKEIQELDWKNSADKPRLKELRANQKRILQKQGFTEYGFKADSKDYYKHFIENIGSSVATHGIAPQVWNAFDKMLFQKDGKVVHFKRHGDVHSLKGGSVTHKSGGAEIMFRKTYIEWKGLKLPLKLSPNNAYEAEMLSYRVKYVRILRTRGKTKDRWYAQLSLEGKPAVKFDSSTGKLVHPVGRGAVGLDIGPQTLAYAAADEANLVELADQVQNIEQEKRRLQRKLDRSRRATNPDNYNENGTIRRGVKLTHNKSKRYCKLQKELSWIQHCQAETRKRQHIALANHLLSLGDCFYVEPMAWPSLTHRAKKTEVSEKTGKIKRKKRFGKSVANKAPASLIGILKLKCISLGLTGVVEVPMLLRASQYNHQSKDYEKKSLSQRWNDMPDGNRIQRDLYSAFLLQHYNSQSESFDQETLERDYPQFVRLHNQTIQRLSALPKTPSSMGIRRSVS

SEQ ID NO: 2247 - protein, 528 aa, Unknown
  Description of Unknown: uncultivated organism sequence
  Category: MG81 effectors
  Description: MG81-526 effector
MILLTKNNNNTDTCVLTLPLRVEKWQEDCLLKRFEAARRIYNSLLNFELKKLRQLERTVEYRQIQSVISSAYRSNTKDSPECKDAFKRREKLISANGISEYGFKSDVKFFYKHFDGLIGSNVAVHCIAVQLWAAFDKYLRGSGKEIHFKRLGDISSLKGYSVKGKSGGCEIIFRGQYIEWTRKKKKLLLPLKIDPDNEYEREMLSRRVKYVRIIKKPGKNRLRWYAQLTLEGKPALKYSAETGKPIHSVGKGNVGIDIGPQTVAYASDKEVALLELADRVTNIEHQKKKLQRKLDRSRRATNPDNYKPDGTIKRGVKLTRNKSKRYLKLQSKLAYIQHRQAEIRKLQHTCLANHMLTLGDRFFVGKMNWPGLAHRAKETSISEKTGRYKRKKRFGKSLANKAPAMFISILKRKCETLGLPGVVEVDTYNLKASQYNHLSDTCEKKSLSERWNYMPISDGSDSSKTKRIQRDLYSAFLLQHTIPQPCSFDKEALRIDYPNFVIMHDAEIHRLESLPKTITSMGVRRSHS

SEQ ID NO: 2248 - protein, 511 aa, Unknown
  Description of Unknown: uncultivated organism sequence
  Category: MG81 effectors
  Description: MG81-527 effector
MAKCSTDTCCLTLPLRLEKWQEDRLAKRFEIARQIYNTMVRAELKKLRAMEQSEPYKANQEKIQALDWKTQTDKQALKALYKERDKLLRDGGFSEYGFKSDIKNYYKHFNNNIGSNVAFHGIAPQVWAAFEKMLFKKEGKKVHFKKKGDIHSLRGYSAAGKSGGVEIIFRETYIEWKGLKLPLKLSPDNIYETQMLSYRVKYVRLLRKPGKRKDRWYAQLSLEGKPVIKYNPKTGEVRHPIGKGAVGLDIGPQTLAYSAATGADLVELANQVQNVEQEKRRLQRKLDRSRRATNPGNYADDGTIRRGIALTHNKSKRYLRTQQELKYLQHQQAEIRKRQHTELANHLLSLGDCFYVEKMVWTSLTHRAKETEISEKTGKIKRKKRFGKSVANKAPATLIGILQRKSAALGIPGVIEVPPSVKASQYNHQSGTYTPKPLSQRWNNMPDGERIQRDLYSAFLLQHYDPQTNTFDANSLHQDYPQFVQYHHDAVLRLYAMPKTPSSMGIKRSLR

SEQ ID NO: 2249 - protein, 333 aa, Unknown
  Description of Unknown: uncultivated organism sequence
  Category: MG81 effectors
  Description: MG81-528 effector
MAKCSTDTCCLTLPLRLEKWQEDRLAKRFEIARQIYNTMVRAELKKLRAMEQSEPYKANQEKIQALDWKTQADKQALKALYKERDKLLQDGGFSERGFKSDIKNYYKHFNNNIGSNVAFHGIAPQVWAAFEKMLFKKEGKKVHFKKKGDIRSLRGYSATGRSGGVEIIFRETYIEWKGLKLPLKLSPDNIYETQMLSYRVKYVRLLRKPGKRKDRWYAQLSLEGKPVIKYNPKTGEVRHPIGKGAVGLDIGPQTLAYSAATGADLVELANQVQNVEQEKRRLQRKLDRSRRATNPGNYADDGTIRRGIALTHNKSKRYLKNTAGIKISPASAS

SEQ ID NO: 2250 - protein, 512 aa, Unknown
  Description of Unknown: uncultivated organism sequence
  Category: MG81 effectors
  Description: MG81-529 effector
MPTKQKEDSNRCVLTLPLLTEPWQEHIIEKRFKIIEHLKNQLISIELRKLKNLQRTKAYKNLIKQIESVPKSERTVLYKERNKMLKDAGFSQYTFMDDMAGKKSLMQKHFESHINVQIAHKAAIDVWSSFEKFLFGTGQIVHYQKRGTLSSVASKSPKTGMFYYSDENIFKWSGGGTKPKGGIILCLRVASVKTNYEKEMVANNEIKYYRVVRKWMKTKYKYYLQITFAGKPADKHREISTGRVGIDIGTQTIAIASDKSVKLLELADKVNKNHIKKCELQRKLDRSRRYTNPDNFNPDGTVKRGTKGHKLKWNKSKHYIEIAGKIRELERKNADIRKYQHTCLANDVLAMENQIYIEPMNYKGLQKRAKETQVDEKGRYKKKKRFGKSLANKAPAMFVTILKTKAEQHGGEVYEVDIMSYRASQCDHTTGEYTKHGLNDRWRILGNGDKVQRDLYSAFLIKNSNKTHDEIDLDKCSKTYDSFKKLHDKEIENIRNEVILRKRRNISSYGIA

SEQ ID NO: 2251 - protein, 508 aa, Unknown
  Description of Unknown: uncultivated organism sequence
  Category: MG81 effectors
  Description: MG81-530 effector
MADKECCVLTLPLQTEIWQEHIIEKRFAIMEHLKNQLIAKELRRLKNLERTKEYRNLIDEINNTPKEKRKALFSKRRKLLKDSGFSEYDFKDDIAGKNSLMQKHFIEHIATQIAHKLASDVWRSFDKFLFGNGRFIHFSKRGSLRSVASQKNGNGMTYKNGYFIWNGGQSKNKIILKIKVTPPKNEYEKEMLSKKIKYLRIVKKWVKTRYKYYLQFALEGKPVKKDRIVNKGNVGIDIGTQTVAISSADSVKILELADKIDKNHTKKKILQRKMDRSRRYTNPQNYNEDGTIKKPPKEQRFSWYKSKKYIQLAGKVRELERKNADIRKYQHTCLANWILSLGDTVYVEQMNFSGLQRRAKETKIDKNGKYAKKKRYGKSLANKAPSMFLTILGSKLNQYGGQLNKINTYEFKASQYDHTDDTFTKHNRSERWHILSNGDKNQRDLYSAFLIMNSDISLKHCNREKCNETYSNFKVLQDKEIERLYSDIRKGNCKNISSFGFQRNAKAM

(The sequence listing continues in the following parts.)
